United States Patent Application Publication US 2011/0183924 A1 - sequence listing, part 155

SEQ ID NO: 405239 - DNA, 4143 bp, Homo sapiens
atgcgcgttcactccggcgcggagtgccggccggggcggggatacgccgtgtgcgcggccgggggcggaacggaggaggaggcggtggtgtcccggctgcggggtaggagtccgcggcagcctccgggtaagccaagcgccgcgcagtgctgagttcccgcacgccgcagagccatggagatcggcaccgagatcagccgcaagatccggagtgccattaaggggaaattacaagaattaggagcttatgttgatgaagaacttcctgattacattatggtgatggtggccaacaagaaaagtcaggaccaaatgacagaggatctgtccctgtttctagggaacaacacaattcgattcaccgtatggcttcatggtgtattagataaacttcgctctgttacaactgaaccctctagtctgaagtcttctgataccaacatctttgatagtaacgtgccttcaaacaagagcaatttcagtcggggagatgagaggaggcatgaagctgcagtgccaccacttgccattcctagcgcgagacctgaaaaaagagattccagagtttctacaagttcgcaggagtcaaaaaccacaaatgtcagacagacttacgatgatggagctgcaacccgactaatgtcaacagtgaaacctttgagggagccagcaccctctgaagatgtgattgatattaagccagaaccagatgatctcattgacgaagacctcaactttgtgcaggagaatcccttatctcagaaaaaacctacagtgacacttacatatggttcttctcgcccttctattgaaatttatcgaccacctgcaagtagaaatgcagatagtggtgttcatttaaacaggttgcaatttcaacagcagcagaatagtattcatgctgccaagcagcttgatatgcagagtagttgggtatatgaaacaggacgtttgtgtgaaccagaggtgcttaacagcttagaagaaacgtatagtccgttctttagaaacaactcggagaaaatgagtatggaggatgaaaactttcggaagagaaagttgcctgtggtaagttcagttgttaaagtaaaaaaattcaatcatgatggagaagaggaggaagaagatgatgattacgggtctcgaacaggaagcatctccagcagtgtgtctgtgcctgcaaagcctgaaaggagaccttctcttccaccttctaaacaagctaacaagaatctgattttgaaggctatatctgaagctcaagaatccgtaacaaaaacaactaactactctacagttccacagaaacagacacttccagttgctcccagaactcgaacttctcaagaagaattgctagcagaagtggtccagggacaaagtaggacccccagaataagtccccccattaaagaagaggaaacaaaaggagattctgtagaaaaaaatcaaggaactcaacagaggcaattattatcccgactgcaaatcgacccagtaatggcagaaactctgcagatgagtcaagacacaagatcatttattctgaagaagccaaagctgtctgaggaagtagtagtggcaccaaaccaagagtcggggatgaagactgcagattcccttcgggtactttcaggacaccttatgcagacacgagatcttgtacaaccagataaacctgcaagtcccaagtttatagtgacgctggatggtgtccccagccccccaggatacatgtcagatcaagaggaggacatgtgctttgaaggaatgaaacccgtaaaccaaactgcagcctcaaacaagggactcagaggtctcctccacccacagcagttgcacttgctgagcaggcagcttgaggacccaaatggtagcttttctaacgctgagatgagtgaactgagtgtggcacagaaaccagaaaaacttttggagcgctgcaagtactggcctgcttgtaaaaatggggatgagtgtgcctaccatcaccccatctcaccctgcaaagccttccccaattgtaaatttgctgaaaaatgtttgtttgttcacccaaattgtaaatatgatgcaaagtgtactaaaccagattgtcccttcactcatgtgagtagaagaattccagtactgtctccaaaaccagattggagatcagtcctggtttttattttgttagcagttgcaccaccagcaccaccttccagtagtcagctctgccgttacttccctgcttgtaagaagatggaatgtcccttctatcatccaaaacattgtaggtttaacactcaatgtacaagaccggactgcacattctaccatcccaccattaatgtcccaccacgacatgccttgaaatggattcgacctcaaaccagcgaatagcacccagtcctgcctggcagaagatcatgcagtttggaagttttcatgtactgatgaaagatactctacagaacttgtcaaatctttgaaacttggaatatattgctttcataatatgaagttttattgcctatctatctgaagtgtctaatttttcaagtttgtaagtttattatgtggttttaacattgggtgtttttgttttgtttttactatgaaaagacagcttaaggaagagctaaattctgttaaaatatttggggcatgtttgtgcactgctgttgtgaggatcagcatatgaaattgacatcatggttagtcatggtactgcagcttagggggctacacggttgctgtgtgagtggagagatgcagtgaggcagttgtcattattctaaaaattgtactactttcacttttcccaaagattatataatgttcataatccaccatgaaaacagcattggccaaaggtactgaggctgcttaaaatattcaattctgctttttaatttttaagtgaatttagtttgaaaagcatgattatacaggcctctcaggctgagtgctactttggtaaagttcccagttttcctgccttctgtgacaggatgaatgaggtgggtatggacagtggaggcagctggaatggcaagtgcagaaaataggaacagttctatacagtgctctcatttactaataacataatgccttctaaataatttttttgggaaactacattatcacaaaattatacaaatttttttacaagtatttacatactgtatctgaaaacagactttaaagtcacaagattataaatgtacatatgtattctcacattctgaaaaataacattctcagaatccacagaaaatatacttagttactactgaagataatttttgaaatgtaaaaattagatttaaatagtatattttaaatgacagaactataattacagagatcagatcagataggtaaactgcaagatagataggatgaaacttttggcctactgtattacttacagagtttttttgtgtgtggtttttaaaactgttaaggcaagaagtgtcaaatgctttagagttaaataacagatcactgatttcaaagacttggtgtatagtgttaaaaattaaagcttaaaaggtggttagaaaagtggattaatgcaaaaggggtaataaagactgcaacattctcaggaccaaattaaactgctaaaaaaaaaaaaaaagttcattgacttgcttagtcgtatactcaaatgatgataaacctacatgtgcaaaggctcacgtttaagattgtcaagccagcagtctactgttgtgttgccattgcttttccattgggagaagaaagaattaaccagtcattaaaccatttggtaagttgcactttgctgtgctgatcccacaggaaaggcttgaaacacgagaagcagcaaagacagagcacacaagtgcataaggctgttgtcttcggcttgggtgaaatgacagttcctcttcattctaaaggtttactccattgaatttaaggcatttgttcattccagtgttgagatgctttgcatctctgcagaagaaatttattttaaattgtttaaatatctggaaatacttttagctatcatttataaagatagttttgttctcagtttcactataaattatagaacaaatgggaaacaagggtttaatttagttcagccattttacaaggaaataataaaatactaaaatctga

SEQ ID NO: 405240 - DNA, 4169 bp, Homo sapiens
atgcgcgttcactccggcgcggagtgccggccggggcggggatacgccgtgtgcgcggccgggggcggaacggaggaggaggcggtggtgtcccggctgcggggtaggagtccgcggcagcctccgggtaagccaagcgccgcgcagtgctgagttcccgcacgccgcagagccatggagatcggcaccgagatcagccgcaagatccggagtgccattaaggggaaattacaagaattaggagcttatgttgtatttgaaatacctgtggaatgaagagaaaaaaattaaagctaagccatcttgtccaatatgaagaacttcctgattacattatggtgatggtggccaacaagaaaagtcaggaccaaatgacagaggatctgtccctgtttctagggaacaacacaattcgattcaccgtatggcttcatggtgtattagataaacttcgctctgttacaactgaaccctctagtctgaagtcttctgataccaacatctttgatagtaacgtgccttcaaacaagagcaatttcagtcggggagatgagaggaggcatgaagctgcagtgccaccacttgccattcctagcgcgagacctgaaaaaagagattccagagtttctacaagttcgcaggagtcaaaaaccacaaatgtcagacagacttacgatgatggagctgcaacccgactaatgtcaacagtgaaacctttgagggagccagcaccctctgaagatgtgattgatattaagccagaaccagatgatctcattgacgaagacctcaactttgtgcaggagaatcccttatctcagaaaaaacctacagtgacacttacatatggttcttctcgcccttctattgaaatttatcgaccacctgcaagtagaaatgcagatagtggtgttcatttaaacaggttgcaatttcaacagcagcagaatagtattcatgctgccaagcagcttgatatgcagagtagttgggtatatgaaacaggacgtttgtgtgaaccagaggtgcttaacagcttagaagaaacgtatagtccgttctttagaaacaactcggagaaaatgagtatggaggatgaaaactttcggaagagaaagttgcctgtggtaagttcagttgttaaagtaaaaaaattcaatcatgatggagaagaggaggaagaagatgatgattacgggtctcgaacaggaagcatctccagcagtgtgtctgtgcctgcaaagcctgaaaggagaccttctcttccaccttctaaacaagctaacaagaatctgattttgaaggctatatctgaagctcaagaatccgtaacaaaaacaactaactactctacagttccacagaaacagacacttccagttgctcccagaactcgaacttctcaagaagaattgctagcagaagtggtccagggacaaagtaggacccccagaataagtccccccattaaagaagaggaaacaaaaggagattctgtagaaaaaaatcaaggaactcaacagaggcaattattatcccgactgcaaatcgacccagtaatggcagaaactctgcagatgagtcaagacacaagatcatttattctgaagaagccaaagctgtctgaggaagtagtagtggcaccaaaccaagagtcggggatgaagactgcagattcccttcgggtactttcaggacaccttatgcagacacgagatcttgtacaaccagataaacctgcaagtcccaagtttatagtgacgctggatggtgtccccagccccccaggatacatgtcagatcaagaggaggacatgtgctttgaaggaatgaaacccgtaaaccaaactgcagcctcaaacaagggactcagaggtctcctccacccacagcagttgcacttgctgagcaggcagcttgaggacccaaatggtagcttttctaacgctgagatgagtgaactgagtgtggcacagaaaccagaaaaacttttggagcgctgcaagtactggcctgcttgtaaaaatggggatgagtgtgcctaccatcaccccatctcaccctgcaaagccttccccaattgtaaatttgctgaaaaatgtttgtttgttcacccaaattgtaaatatgatgcaaagtgtactaaaccagattgtcccttcactcatgtgagtagaagaattccagtactgtctccaaaaccagcagttgcaccaccagcaccaccttccagtagtcagctctgccgttacttccctgcttgtaagaagatggaatgtcccttctatcatccaaaacattgtaggtttaacactcaatgtacaagaccggactgcacattctaccatcccaccattaatgtcccaccacgacatgccttgaaatggattcgacctcaaaccagcgaatagcacccagtcctgcctggcagaagatcatgcagtttggaagttttcatgtactgatgaaagatactctacagaacttgtcaaatctttgaaacttggaatatattgctttcataatatgaagttttattgcctatctatctgaagtgtctaatttttcaagtttgtaagtttattatgtggttttaacattgggtgtttttgttttgtttttactatgaaaagacagcttaaggaagagctaaattctgttaaaatatttggggcatgtttgtgcactgctgttgtgaggatcagcatatgaaattgacatcatggttagtcatggtactgcagcttagggggctacacggttgctgtgtgagtggagagatgcagtgaggcagttgtcattattctaaaaattgtactactttcacttttcccaaagattatataatgttcataatccaccatgaaaacagcattggccaaaggtactgaggctgcttaaaatattcaattctgctttttaatttttaagtgaatttagtttgaaaagcatgattatacaggcctctcaggctgagtgctactttggtaaagttcccagttttcctgccttctgtgacaggatgaatgaggtgggtatggacagtggaggcagctggaatggcaagtgcagaaaataggaacagttctatacagtgctctcatttactaataacataatgccttctaaataatttttttgggaaactacattatcacaaaattatacaaatttttttacaagtatttacatactgtatctgaaaacagactttaaagtcacaagattataaatgtacatatgtattctcacattctgaaaaataacattctcagaatccacagaaaatatacttagttactactgaagataatttttgaaatgtaaaaattagatttaaatagtatattttaaatgacagaactataattacagagatcagatcagataggtaaactgcaagatagataggatgaaacttttggcctactgtattacttacagagtttttttgtgtgtggtttttaaaactgttaaggcaagaagtgtcaaatgctttagagttaaataacagatcactgatttcaaagacttggtgtatagtgttaaaaattaaagcttaaaaggtggttagaaaagtggattaatgcaaaaggggtaataaagactgcaacattctcaggaccaaattaaactgctaaaaaaaaaaaaaaagttcattgacttgcttagtcgtatactcaaatgatgataaacctacatgtgcaaaggctcacgtttaagattgtcaagccagcagtctactgttgtgttgccattgcttttccattgggagaagaaagaattaaccagtcattaaaccatttggtaagttgcactttgctgtgctgatcccacaggaaaggcttgaaacacgagaagcagcaaagacagagcacacaagtgcataaggctgttgtcttcggcttgggtgaaatgacagttcctcttcattctaaaggtttactccattgaatttaaggcatttgttcattccagtgttgagatgctttgcatctctgcagaagaaatttattttaaattgtttaaatatctggaaatacttttagctatcatttataaagatagttttgttctcagtttcactataaattatagaacaaatgggaaacaagggtttaatttagttcagccattttacaaggaaataataaaatactaaaatctga

SEQ ID NO: 405241 - DNA, 3345 bp, Homo sapiens
aggctggtcttgaaatcctggccctgtgatccacccaccttgatcttggctcactgcaacctgtgcttcccaggttcaagtgattcttctgattcagcctcctgaatagctgggattacaggctggagtgcagtggcatgatcttggctccctacatcctccacctcccgggttcaaagacagggtttcaccatattggccaggctggtctcgaaatcctgaccttgtgatccgcccacttcggccttccaaagtgctaggattacagatgatgaaaactttcggaagagaaagttgcctgtggtaagttcagttgttaaagtaaaaaaattcaatcatgatggagaagaggaggaagaagatgatgattacgggtctcgaacaggaagcatctccagcagtgtgtctgtgcctgcaaagcctgaaaggagaccttctcttccaccttctaaacaagctaacaagaatctgattttgaaggctatatctgaagctcaagaatccgtaacaaaaacaactaactactctacagttccacagaaacagacacttccagttgctcccagaactcgaacttctcaagaagaattgctagcagaagtggtccagggacaaagtaggacccccagaataagtccccccattaaagaagaggaaacaaaaggagattctgtagaaaaaaatcaaggaactcaacagaggcaattattatcccgactgcaaatcgacccagtaatggcagaaactctgcagatgagtcaagacacaagatcatttattctgaagaagccaaagctgtctgaggaagtagtagtggcaccaaaccaagagtcggggatgaagactgcagattcccttcgggtactttcaggacaccttatgcagacacgagatcttgtacaaccagataaacctgcaagtcccaagtttatagtgacgctggatggtgtccccagccccccaggatacatgtcagatcaagaggaggacatgtgctttgaaggaatgaaacccgtaaaccaaactgcagcctcaaacaagggactcagaggtctcctccacccacagcagttgcacttgctgagcaggcagcttgaggacccaaatggtagcttttctaacgctgagatgagtgaactgagtgtggcacagaaaccagaaaaacttttggagcgctgcaagtactggcctgcttgtaaaaatggggatgagtgtgcctaccatcaccccatctcaccctgcaaagccttccccaattgtaaatttgctgaaaaatgtttgtttgttcacccaaattgtaaatatgatgcaaagtgtactaaaccagattgtcccttcactcatgtgagtagaagaattccagtactgtctccaaaaccagcagttgcaccaccagcaccaccttccagtagtcagctctgccgttacttccctgcttgtaagaagatggaatgtcccttctatcatccaaaacattgtaggtttaacactcaatgtacaagaccggactgcacattctaccatcccaccattaatgtcccaccacgacatgccttgaaatggattcgacctcaaaccagcgaatagcacccagtcctgcctggcagaagatcatgcagtttggaagttttcatgtactgatgaaagatactctacagaacttgtcaaatctttgaaacttggaatatattgctttcataatatgaagttttattgcctatctatctgaagtgtctaatttttcaagtttgtaagtttattatgtggttttaacattgggtgtttttgttttgtttttactatgaaaagacagcttaaggaagagctaaattctgttaaaatatttggggcatgtttgtgcactgctgttgtgaggatcagcatatgaaattgacatcatggttagtcatggtactgcagcttagggggctacacggttgctgtgtgagtggagagatgcagtgaggcagttgtcattattctaaaaattgtactactttcacttttcccaaagattatataatgttcataatccaccatgaaaacagcattggccaaaggtactgaggctgcttaaaatattcaattctgctttttaatttttaagtgaatttagtttgaaaagcatgattatacaggcctctcaggctgagtgctactttggtaaagttcccagttttcctgccttctgtgacaggatgaatgaggtgggtatggacagtggaggcagctggaatggcaagtgcagaaaataggaacagttctatacagtgctctcatttactaataacataatgccttctaaataatttttttgggaaactacattatcacaaaattatacaaatttttttacaagtatttacatactgtatctgaaaacagactttaaagtcacaagattataaatgtacatatgtattctcacattctgaaaaataacattctcagaatccacagaaaatatacttagttactactgaagataatttttgaaatgtaaaaattagatttaaatagtatattttaaatgacagaactataattacagagatcagatcagataggtaaactgcaagatagataggatgaaacttttggcctactgtattacttacagagtttttttgtgtgtggtttttaaaactgttaaggcaagaagtgtcaaatgctttagagttaaataacagatcactgatttcaaagacttggtgtatagtgttaaaaattaaagcttaaaaggtggttagaaaagtggattaatgcaaaaggggtaataaagactgcaacattctcaggaccaaattaaactgctaaaaaaaaaaaaaaagttcattgacttgcttagtcgtatactcaaatgatgataaacctacatgtgcaaaggctcacgtttaagattgtcaagccagcagtctactgttgtgttgccattgcttttccattgggagaagaaagaattaaccagtcattaaaccatttggtaagttgcactttgctgtgctgatcccacaggaaaggcttgaaacacgagaagcagcaaagacagagcacacaagtgcataaggctgttgtcttcggcttgggtgaaatgacagttcctcttcattctaaaggtttactccattgaatttaaggcatttgttcattccagtgttgagatgctttgcatctctgcagaagaaatttattttaaattgtttaaatatctggaaatacttttagctatcatttataaagatagttttgttctcagtttcactataaattatagaacaaatgggaaacaagggtttaatttagttcagccattttacaaggaaataataaaatactaaaatctga

SEQ ID NO: 405242 - DNA, 2901 bp, Homo sapiens
agaggatccccgacggatagcggatctgcaacaaaaacaactaactactctacagttccacagaaacagacacttccagttgctcccagaactcgaacttctcaagaagaattgctagcagaagtggtccagggacaaagtaggacccccagaataagtccccccattaaagaagaggaaacaaaaggagattctgtagaaaaaaatcaaggaactcaacagaggcaattattatcccgactgcaaatcgacccagtaatggcagaaactctgcagatgagtcaagattactatgacatggaatccatggtccatgcagacacaagatcatttattctgaagaagccaaagctgtctgaggaagtagtagtggcaccaaaccaagagtcggggatgaagactgcagattcccttcgggtactttcaggacaccttatgcagacacgagatcttgtacaaccagataaacctgcaagtcccaagtttatagtgacgctggatggtgtccccagccccccaggatacatgtcagatcaagaggaggacatgtgctttgaaggaatgaaacccgtaaaccaaactgcagcctcaaacaagggactcagaggtctcctccacccacagcagttgcacttgctgagcaggcagcttgaggacccaaatggtagcttttctaacgctgagatgagtgaactgagtgtggcacagaaaccagaaaaacttttggagcgctgcaagtactggcctgcttgtaaaaatggggatgagtgtgcctaccatcaccccatctcaccctgcaaagccttccccaattgtaaatttgctgaaaaatgtttgtttgttcacccaaattgtaaatatgatgcaaagtgtactaaaccagattgtcccttcactcatgtgagtagaagaattccagtactgtctccaaaaccagcagttgcaccaccagcaccaccttccagtagtcagctctgccgttacttccctgcttgtaagaagatggaatgtcccttctatcatccaaaacattgtaggtttaacactcaatgtacaagaccggactgcacattctaccatcccaccattaatgtcccaccacgacatgccttgaaatggattcgacctcaaaccagcgaatagcacccagtcctgcctggcagaagatcatgcagtttggaagttttcatgtactgatgaaagatactctacagaacttgtcaaatctttgaaacttggaatatattgctttcataatatgaagttttattgcctatctatctgaagtgtctaatttttcaagtttgtaagtttattatgtggttttaacattgggtgtttttgttttgtttttactatgaaaagacagcttaaggaagagctaaattctgttaaaatatttggggcatgtttgtgcactgctgttgtgaggatcagcatatgaaattgacatcatggttagtcatggtactgcagcttagggggctacacggttgctgtgtgagtggagagatgcagtgaggcagttgtcattattctaaaaattgtactactttcacttttcccaaagattatataatgttcataatccaccatgaaaacagcattggccaaaggtactgaggctgcttaaaatattcaattctgctttttaatttttaagtgaatttagtttgaaaagcatgattatacaggcctctcaggctgagtgctactttggtaaagttcccagttttcctgccttctgtgacaggatgaatgaggtgggtatggacagtggaggcagctggaatggcaagtgcagaaaataggaacagttctatacagtgctctcatttactaataacataatgccttctaaataatttttttgggaaactacattatcacaaaattatacaaatttttttacaagtatttacatactgtatctgaaaacagactttaaagtcacaagattataaatgtacatatgtattctcacattctgaaaaataacattctcagaatccacagaaaatatacttagttactactgaagataatttttgaaatgtaaaaattagatttaaatagtatattttaaatgacagaactataattacagagatcagatcagataggtaaactgcaagatagataggatgaaacttttggcctactgtattacttacagagtttttttgtgtgtggtttttaaaactgttaaggcaagaagtgtcaaatgctttagagttaaataacagatcactgatttcaaagacttggtgtatagtgttaaaaattaaagcttaaaaggtggttagaaaagtggattaatgcaaaaggggtaataaagactgcaacattctcaggaccaaattaaactgctaaaaaaaaaaaaaaagttcattgacttgcttagtcgtatactcaaatgatgataaacctacatgtgcaaaggctcacgtttaagattgtcaagccagcagtctactgttgtgttgccattgcttttccattgggagaagaaagaattaaccagtcattaaaccatttggtaagttgcactttgctgtgctgatcccacaggaaaggcttgaaacacgagaagcagcaaagacagagcacacaagtgcataaggctgttgtcttcggcttgggtgaaatgacagttcctcttcattctaaaggtttactccattgaatttaaggcatttgttcattccagtgttgagatgctttgcatctctgcagaagaaatttattttaaattgtttaaatatctggaaatacttttagctatcatttataaagatagttttgttctcagtttcactataaattatagaacaaatgggaaacaagggtttaatttagttcagccattttacaaggaaataataaaatactaaaatctga

SEQ ID NO: 405243 - DNA, 3155 bp, Homo sapiens
atgcgcgttcactccggcgcggagtgccggccggggcggggatacgccgtgtgcgcggccgggggcggaacggaggaggaggcggtggtgtcccggctgcggggtaggagtccgcggcagcctccgggtaagccaagcgccgcgcagtgctgagttcccgcacgccgcagagccatggagatcggcaccgagatcagccgcaagatccggagtgccattaaggggaaattacaagaattaggagcttatgttgatgaagaacttcctgattacattatggtgatggtggccaacaagaaaagtcaggaccaaatgacagaggatctgtccctgtttctagggaacaacacaattcgattcaccgtatggcttcatggtgtattagataaacttcgctctgttacaactgaaccctctagtctgaagtcttctgataccaacatctttgatagtaacgtgccttcaaacaagagcaatttcagtcggggagatgagaggaggcatgaagctgcagtgccaccacttgccattcctagcgcgagacctgaaaaaagagattccagagtttctacaagttcgcaggagtcaaaaaccacaaatgtcagacagacttacgatgatggagctgcaacccgactaatgtcaacagtgaaacctttgagggagccagcaccctctgaagatgtgattgatattaagccagaaccagatgatctcattgacgaagacctcaactttgtgcaggagaatcccttatctcagaaaaaacctacagtgacacttacatatggttcttctcgcccttctattgaaatttatcgaccacctgcaagtagaaatgcagatagtggtgttcatttaaacaggttgcaatttcaacagcagcagaatagtattcatgctgccaagcagcttgatatgcagagtagttgggtatatgaaacaggacgtttgtgtgaaccagaggtgcttaacagcttagaagaaacgtatagtccgttctttagaaacaactcggagaaaatgagtatggaggatgaaaactttcggaagagaaagttgcctgtggtaagttcagttgttaaagtaaaaaaattcaatcatgatggagaagaggaggaagaagatgatgattacgggtctcgaacaggaagcatctccagcagtgtgtctgtgcctgcaaagcctgaaaggagaccttctcttccaccttctaaacaagctaacaagaatctgattttgaaggctatatctgaagctcaagaatccgtaacaaaaacaactaactactctacagttccacagaaacagacacttccagttgctcccagaactcgaacttctcaagaagaattgctagcagaagtggtccagggacaaagtaggacccccagaataagtccccccattaaagaagaggaaacaaaaggagattctgtagaaaaaaatcaagctgagatgagtgaactgagtgtggcacagaaaccagaaaaacttttggagcgctgcaagtactggcctgcttgtaaaaatggggatgagtgtgcctaccatcaccccatctcaccctgcaaagccttccccaattgtaaatttgctgaaaaatgtttgtttgttcacccaaattgtaaatatgatgcaaagtgtactaaaccagattgtcccttcactcatgtgagtagaagaattccagtactgtctccaaaaccagcagttgcaccaccagcaccaccttccagtagtcagctctgccgttacttccctgcttgtaagaagatggaatgtcccttctatcatccaaaacattgtaggtttaacactcaatgtacaagaccggactgcacattctaccatcccaccattaatgtcccaccacgacatgccttgaaatggattcgacctcaaaccagcgaatagcacccagtcctgcctggcagaagatcatgcagtttggaagttttcatgtactgatgaaagatactctacagaacttgtcaaatctttgaaacttggaatatattgctttcataatatgaagttttattgcctatctatctgaagtgtctaatttttcaagtttgtaagtttattatgtggttttaacattgggtgtttttgttttgtttttactatgaaaagacagcttaaggaagagctaaattctgttaaaatatttggggcatgtttgtgcactgctgttgtgaggatcagcatatgaaattgacatcatggttagtcatggtactgcagcttagggggctacacggttgctgtgtgagtggagagatgcagtgaggcagttgtcattattctaaaaattgtactactttcacttttcccaaagattatataatgttcataatccaccatgaaaacagcattggccaaaggtactgaggctgcttaaaatattcaattctgctttttaatttttaagtgaatttagtttgaaaagcatgattatacaggcctctcaggctgagtgctactttggtaaagttcccagttttcctgccttctgtgacaggatgaatgaggtgggtatggacagtggaggcagctggaatggcaagtgcagaaaataggaacagttctatacagtgctctcatttactaataacataatgccttctaaataatttttttgggaaactacattatcacaaaattatacaaatttttttacaagtatttacatactgtatctgaaaacagactttaaagtcacaagattataaatgtacatatgtattctcacattctgaaaaataacattctcagaatccacagaaaatatacttagttactactgaagataatttttgaaatgtaaaaattagatttaaatagtatattttaaatgacagaactataattacagagatcagatcagataggtaaactgcaagatagataggatgaaacttttggcctactgtattacttacagagtttttttgtgtgtggcagtttaatttggtcctgagaatgttgcagtctttattaccccttttgcattaatccacttttctaaccaccttttaagctttaatttttaacactatacaccaagtctttgaaatcagtgatctgttatttaactctaaagcatttgacacttcttgccttaacagttttaaaaaccacacacaaaa

SEQ ID NO: 405244 - DNA, 2608 bp, Homo sapiens
atgcgcgttcactccggcgcggagtgccggccggggcggggatacgccgtgtgcgcggccgggggcggaacggaggaggaggcggtggtgtcccggctgcggggtaggagtccgcggcagcctccgggtaagccaagcgccgcgcagtgctgagttcccgcacgccgcagagccatggagatcggcaccgagatcagccgcaagatccggagtgccattaaggggaaattacaagaattaggagcttatgttgatgaagaacttcctgattacattatggtgatggtggccaacaagaaaagtcaggaccaaatgacagaggatctgtccctgtttctagggaacaacacaattcgattcaccgtatggcttcatggtgtattagataaacttcgctctgttacaactgaaccctctagtctgaagtcttctgataccaacatctttgatagtaacgtgccttcaaacaagagcaatttcagtcggggagatgagaggaggcatgaagctgcagtgccaccacttgccattcctagcgcgagacctgaaaaaagagattccagagtttctacaagttcgcaggagtcaaaaaccacaaatgtcagacagacttacgatgatggagctgcaacccgactaatgtcaacagtgaaacctttgagggagccagcaccctctgaagatgtgattgatattaagccagaaccagatgatctcattgacgaagacctcaactttgtgcaggagaatcccttatctcagaaaaaacctacagtgacacttacatatggttcttctcgcccttctattgaaatttatcgaccacctgcaagtagaaatgcagatagtggtgttcatttaaacaggttgcaatttcaacagcagcagaatagtattcatgctgccaagcagcttgatatgcagagtagttgggtatatgaaacaggacgtttgtgtgaaccagaggtgcttaacagcttagaagaaacgtatagtccgttctttagaaacaactcggagaaaatgagtatggaggatgaaaactttcggaagagaaagttgcctgtggtaagttcagttgttaaagtaaaaaaattcaatcatgatggagaagaggaggaagaagatgatgattacgggtctcgaacaggaagcatctccagcagtgtgtctgtgcctgcaaagcctgaaaggagaccttctcttccaccttctaaacaagctaacaagaatctgattttgaaggctatatctgaagctcaagaatccgtaacaaaaacaactaactactctacagttccacagaaacagacacttccagttgctcccagaactcgaacttctcaagaagaattgctagcagaagtggtccagggacaaagtaggacccccagaataagtccccccattaaagaagaggaaacaaaaggagattctgtagaaaaaaatcaaggaactcaacagaggcaattattatcccgactgcaaatcgacccagtaatggcagaaactctgcagatgagtcaagacacaagatcatttattctgaagaagccaaagctgtctgaggaagtagtagtggcaccaaaccaagagtcggggatgaagactgcagattcccttcgggtactttcaggacaccttatgcagacacgagatcttgtacaaccagataaacctgcaagtcccaagtttatagtgacgctggatggtgtccccagccccccaggatacatgtcagatcaagaggaggacatgtgctttgaaggaatgaaacccgtaaaccaaactgcagcctcaaacaagggactcagaggtctcctccacccacagcagttgcacttgctgagcaggcagcttgaggacccaaatggtagcttttctaacgctgagatgagtgaactgagtgtggcacagaaaccagaaaaacttttggagcgctgcaagtactggcctgcttgtaaaaatggggatgagtgtgcctaccatcaccccatctcaccctgcaaagccttccccaattgtaaatttgctgaaaaatgtttgtttgttcacccaaattgtaaatatgatgcaaagtgtactaaaccagattgtcccttcactcatgtgagtagaagaattccagtactgtctccaaaaccagcagttgcaccaccagcaccaccttccagtagtcagctctgccgttacttccctgcttgtaagaagatggaatgtcccttctatcatccaaaacattgtaggtttaacactcaatgtacaagaccggactgcacattctaccatcccaccattaatgtcccaccacgacatgccttgaaatggattcgacctcaaaccagcgaatagcacccagtcctgcctggcagaagatcatgcagtttggaagttttcatgtactgatgaaagatactctacagaacttgtcaaatctttgaaacttggaatatattgctttcataatatgaaaaaaaaaaaaaaaaaaggggggggcaaaatcccggggcaagtagtaccaggtttgaaagggcccagggggtttaaaaagaggggggaaaagggcgagaagggggatggggagcttgggggagcacccagaagggaa

SEQ ID NO: 405245 - DNA, 303 bp, Homo sapiens
aaggttgtcaggggaagctttactgatgaggtgacttgagtgaagacctaaagaaggtaagggaggcagtcatgcaaagagctgattgaggaacattccagcctgggtgacagagcgagactccgtctcaaaaaacaacaacaacaacaacaacaacaaaaacaatcagccggctgtgctggtgcacacctgtaactcccagctacttgggaggttaaggcaggagaatcgcttgaacccgggaggcggatgttgcagcgagccaagatctgtcgtgagcagaaatcctgttttattaaaata

SEQ ID NO: 405246 - DNA, 509 bp, Homo sapiens
acgttgacagtttgaaagttggacttctagctctactgcgtagacttgtggttagagttcagtgagctgatgtgtaaagagtgtttcgctcaatgtctagaagtccaaaagcacctagtaaatgccagctgctgttttactggcaaagtctctaattaaagttctaaatagacgggtgtgaaggtgagtaacaagggccatattgaataagttgctcagtatctgcttgtttaggactttgcatgttactgaatgtaatatgtaaaagtttaaaaaatagtctaataacaagactccaattgtttatctctacaaagaccaagtttcagaatattaacagagtgttgggccgtgatcctttctgaatcagggccccttggagaaagctgtgcacgagttcctggtagggtatttagcccgtgaagggcaagtaatatcagtcttgaatgacagagttatctgcccaatttggacccctcagtggtccaaatggaagaaggtgtcagaca

SEQ ID NO: 405247 - DNA, 468 bp, Homo sapiens
aagaaaataaatcaatagaaatagactcaggaattatagacatggcgaaattagcagacaaagatggtaaagcagtcattatatgctccatgtgcgaacacagaggcaaacgtgaacatgatgagaaaaatggaagatataaaaaaatcttcctagtctccagtcttcaggcaagagcaatatgactactgtgtttctgtagcctgctggaacatctaggcagaatgtggctgtactgccctgctaccaacattctccatggagttgggagaggaacgaagtaccctgcagagaactgaatgtacactgggagctgctgagatgtggctggtctggggccagacagctgagcaggatcagttcagaaatgagggaaaactgtggatgttcctttaaaaagcacatcattattggtggccttgtgcccttaattctggttcgcacacagaacaagtgacaatttccatg

SEQ ID NO: 405248 - DNA, 670 bp, Homo sapiens
ctgctcttcaaaaatggagctggccctttaaatatttttcttttggtagttggtgcaatgctaggctctgtcaggagggggagctagagacattggaggaggaagaggccttcctttctggttgtgctgggctcatcttaacagcacagagctcacagcttctccaacatcaccctcccgcagtgcaggcaacttttccagaacaggaatcctgcagaggatggtggtcagtagcacttggcaactagcagcttctcctagtgcccccacaaataggtgtgcctctaatcagacactgttccatgacagctttccctggcacccaagggcagacttctagaacattctcccagacttctctgccattgtgaggcacagccatgcccttcccagcaacatctggatctcagctggggatagagcctgggggtgttctttcttagttctaggggtgctggctgctccttatgtccattattcctatattctttaaagctctcctgacttcttaccactccttcattactccaatcccctgttctagttagtacttatattaatcttctcatattcaaattgttatgtggtttctgtctcccaagtggatcatgactaatgcagaaatcaaattaagaggctgggcttatgtctgtggccccagaaatacagg

SEQ ID NO: 405249 - DNA, 611 bp, Homo sapiens
ggattagtagatagtaacttatccaaggtcacatcactagcaaaagacaaaacttggtattaaactcaggcattagctccagagcctgtgcacggaactgccatacaatactgccatgcgcatatatgaataagcctgagaatctgagaaagaaggagatgtgacctacctaaggccactcaactagttagttgtcccatataccatttgttttggtggttggaccagatctagtatgctcacagcaaatgaagaattttaaaatttccattttatagatgtagctcagttctagtaataatgatgatgacagtaacgacaacagcagtggcaactaatatttactaaacatctgttttggctgagcaccgtaatagctactttatgtatacactcatttattcatttatggaaacactgtttatggagagccttctatacacaaacaagtgtgttcacacaaaagcttgtacaccagtcgtttacagcagtattgttcataatagcctaaaggtggaccacttccaaatgtccatcaattagtgaatgaatacctgacatctggtatattcatgcactaaaatataatacaggcattaaaagattgaata

SEQ ID NO: 405250 - DNA, 476 bp, Homo sapiens
tgctctctgcctgaaacactctactttcttttcccttgctctttgaccctctctcaactggctaattcatactaacactttaggccccagtttattcaatacttcctccaagaagcgttcctcacttcctaaatctgggtatatgtgccaccctcactgcctatattcccattacaccctgaactcccccatcagaatactgtttactggtctatacctcacactgtattttatgttttctttggggaaggggtgtatctctattaccattgtaactccattcccagaatcgagcacaatgcctggcatagaagagatgctcaatcactatatgttgagtaaatgaaaaaaccttaaacaaaggttgctaatagcattatgtctctaataccagccagggcagaaagaaatgcatcccagacctacttgccaactgtcctcttcctcacaattctgatgcctctgcctggaccagt

SEQ ID NO: 405251 - DNA, 229 bp, Homo sapiens
ggcataagccaccaggcccagcctttctttctttttaaaattaatctttgtttaaaaatactctcattttttatttaattgtagcactcctagatcccgaaagcagatacactcttgttatgggtctgattcttttcattgcttcacgccttagaggatattgtccaatactggataaaagtttactcaggtctacttccactttaacggggatggctgaatatctctt

SEQ ID NO: 405252 - DNA, 407 bp, Homo sapiens
agaggctagcacaatgctgagctcaaaaactagttgttgaatttcagtaaaagtaagtagagcatttttcccaacattaaaagttagtgggcatgagatgacattcttttggtctactgggaaaagggtatctgactaaaagttagaaacacttttattttgcataaaaatgtaacattaaaacacagaaggaaaaagaaaatgaattcactgaattcatttgtcttttccattggttcgttgtcaatgtctgatgtcctggccataatggaaaaaacagttggcataaaagacatgggttgagactggctctgtcatttaatattgggttctgaaaaaaggccaatcctgagttgtagctttctctctgtaaaatggagttaatattactctagattatgatgaag

SEQ ID NO: 405253 - DNA, 355 bp, Homo sapiens
ttggaggtatgtactttattttagagacagggtcttgctttgtcacccaggctggagtgtagtggcacagtcatagctcactgcagccttgaactcctgggctccagtgatcctcttgccttagcctcccaaagcaatgggatcgtacaggtgagccattgcacctggccatgtatgtacattttttataagcattcagttgtttccaatagtctaatacattttgtatggccttcttatttttcatgaaaccttactacccattttaagaaatttgtaatatagaagaaaacagaagtttcaattgtggggtaagtaaagaaagatgatcaaagatgatttgaccaaaagagtt

SEQ ID NO: 405254 - DNA, 407 bp, Homo sapiens
ttattacattcgaagcagtttctaagtatcttcattcaatcacttaacaagtatttattaaatatatactgtgtatcagctattgtactgggctaagtcacagtgataaacaaaagaaacatagtccccaccccgtgcagtggctcatgcctgtaatcccagcactttgagagggcagatcacttgaggtcgggagttcaaaaccagcctggccaacatggtaaaaccccatctctacaaaaaatacaaaaaattagccgggtgtggtgggagacgcctgtaatcccagctacttgggagcctgaggtatgagaattgcttgaacccaggaagcaaaagttgcagtgagctgtggtggtaccaatactgtactccagactgggcaaaagagtaagactccaactcca

SEQ ID NO: 405255 - DNA, 272 bp, Homo sapiens
gcagacagctgcattgcccccttggtatgccgttgctgtcaggtcctcatctctatcgtacagtcattctctctgtctcgtacagtcactctctcagccatattcgtccctcagcagttcatcatgcttattactgtctatttaaaaaagaatcctccatttacttgtcagccacttccattttcaccctctttgtttcctgtttctaatcaaactgctcagaactgtctatacttaaacactattttctcaaatgctcacttctcagcccg

SEQ ID NO: 405256 - DNA, 105 bp, Homo sapiens
aaacagtttgtcgttggtcgttatgtcagaagaggagtgtattcctggaagaaggcccacaaaatatacccagagcccaggtgcctttctaagacgaatcaacat

SEQ ID NO: 405257 - DNA, 647 bp, Homo sapiens
atttctggaagtatgttaaaagcccatggaaattcatgagaaaatctggtataaccaaaagctgaatgggggtgaagctggatgtcaagagaactgggctctgagcccagcattaagtagataatatgctcccaggacaagccaccctaccactgtgaagtctctttttcctcacaaaataagaaactatacttgactgaaaaaaggtttctcaaggcccttaaaatgtggtgactctacatgtggttcagtaagagtcaaggccgggcaaaaaggcctgggaaacttccggtggaatacctgtatgcatcttagtcaaccactcttgaatatcatagggaagccaatcctcttgtttattgacaatcattcctctgagctatgtgtacaaaggagaatggaaagtagagatagataggaagaaagaaagaaatgaaggactgcatttaccacttggttttccaattttttgatttaagtggcaaaattgcttctgagcccctaaaccaccatttacccaactatattcactcacaggtctcccccagaggtttcttttgacttcatgccccgtgtctgggaatgtagctgaagaaagcatgcatctggataaagacacgaggagaacctgtgtgagactaattgct

SEQ ID NO: 405258 - DNA, 488 bp, Homo sapiens
tgagagcctggcaacagcgtctgattgctgcccgtcagcagcttcaccgcgagctaatctggactgcagtccgacctcccgggctccctcatgctccacgtgattgccatggtcaggaaggcaggaagcaaaaaatgcagctcaccatccagacgccctgcctcgtgctcccgcggactggctgcgccccagactcgggtttcagtagaatcaggatgagcctgctgggcagccgggtcacaggcccctaactcacctgcagacccacgcagatcagtcttcgcagtgagctcagggcagacctcagctttgctcaagcccggccctgccacaaacatgcctcacctcctgccacctaccctggccgttcctccagccaactgggcatgagaatgaaaactcccacaagttccatgggaatgcatatttgatgaactggaaaaatatcaggctaactaaataaaagttggatttccctgagcctcact

SEQ ID NO: 405259 - DNA, 453 bp, Homo sapiens
gaccctttcagtgaatgggaggtcctggggtctcagatattatcattaggcaggttgatgaaagtgtatgagttaagatgttaaatttataatgacccagaatgataaaattaagaaacttttttaggatatttagatacttagaagttagaccaaatataggtgcatgtgactggaaggatttagagtagagaaaaacctaagaaggaattctggaagaatatgtttccattttgaaaggtacattatatcttaccagctaccaatcaacttttttttttcctttgttttctttattttttgagacagggtctcgctcttttgcctaggttgaagtgcagtggcatgatcatggcttactgcagccttgacctcttgggctcaagtgatcctaccacctcagctcctgagtatctgggactacgggagtgctccactacatccagctaatta

SEQ ID NO: 405260 - DNA, 564 bp, Homo sapiens
ttctttcagatcttaagaaggactgtcacagcactgctgacctttgcgagatactagaccatactagaaacaagtacagaggagttatgagaaggaacgtccactattttcacctttccctatagatgactccatattaaacatagtccttcctgtcttctttctctgacttgaaaagtcacttttctttttcttttcttttttttttttttttgagcagtctcacaaaccccctttcccatgtctttctaggtttattttccttttctatatttgaatcttcctaaaacctgtttcttggaatatacatatatatatgtgtgtgtgtgtatatatatatatgtgtgtgtgtgtgtgtgtgtatatgtgtgtgtgtgtgtatatatatatgtataagagtgtgtacctatgaatgtgtacagatgtcttggctaaacggtagtataaatggcaagaatcatatgttacccaagctgcctgaagttttctagttacaaataaactctaaaatttctaaaccattaggagcatcactactataaaatcatctgttcacgtgcattt

SEQ ID NO: 405261 - DNA, 285 bp, Homo sapiens
ccaaagctgggggggttggttctcttttcattctcctggtttggggggtgtggggagaaatatgtggataatggcaaaccaggcaaggaggaatctaaccagaaagtctttatcaataaccttccacaccacaggttattaataaaattcaccaaggatggaagaagattttgttacggtggagagctggcttagaaaagaggaataaaagggaagaaataaatagagtagacagatataatccatccttctgcacatttaaaatcccaagaaggacagtccaga

SEQ ID NO: 405262 - DNA, 621 bp, Homo sapiens
aggacacagcaagaagtcatgctctatgagaaagctggctctcaccagacaccagatctgctggcaccttgatcttggacttctcagacttcaaaactgaaaaaaaatgtttaaatattagaacctacatttataaaatgcatggcccagaaatgttcctgactattgttattgaaaatgagagaaaacaagttacaattcaagggatataaaacagactggaaggatattcaccaacatgttggcaatgtttgtctctgggaagtagaacaattaataggacacggtggttcacacctgtaatcccagcaacttgggaggctgaagtgggcagatcacctgaggtcaagagttcaagaccagcctggccaacgtggcaaaaccccatttctacttaaaatacaaaaaaaattagccaggcatggtggtgtgtgcctgtaatcccagctacttgggaggctgaggcaggagaatcacttgaacactggagatagaggttgcagtgagccgagatcacaccattgcactcttgcctgggcgacaagagcaaaactctgtctcaaaaaaaatttttttttaatttttaaaaattaaataaataaataaacccatttccaaact

SEQ ID NO: 405263 - DNA, 390 bp, Homo sapiens
gctgcagtgtcgaattttaccaagattatttcaaagcacagaattttaaagtatctatttttaaactgcaggatctcttctgcctacttaataagatgggtaccagaacaaggttttgaaactgcatcagaaaatagaaacttacgaaaatgacaatgtaatatttgacatattttattgtataggcactattataaactgcaaaggccatacaaatggaggctactgttatgatctgacagaggaactctggactagcacaatccttcgccaaacatctcctctcttgcagtcagcatcggagaacccagttcccacaccaagtgtaacaaccaacacagactctgattctgcagcagacctacacccctccaacagctgtagcgtgct

SEQ ID NO: 405264 - DNA, 181 bp, Homo sapiens
ctccgtgtccccaacaaatctcatctcaaattgtaatcgccgcatgtcaggggagggacctggtgggaggtgatttcctccatggctgtttctcccatgctgttctcatgagagtgggatagctctcatgaaatctgatggtttaaaagtgtttggcagccaggcccagtggctcatgtct

SEQ ID NO: 405265 - DNA, 434 bp, Homo sapiens
gtttgaatgcaactaactgctcatcagttgacatgtattcacctggaacatatatccatcttataaatgttgattccagatctcaagtactgtatgtctttagttaattctagtgtattatttctggtgcttcttgttcttgcatggtcaaaacacagtgttttaaaaattttggctgggcgcagtagctcacccctgtaatcttagccctttgggaggctgaggcaggtgaatcacctaaggtcaggagttcaagaccagcttggctaacctggtgaaaccccatcgctactaaaaatacaaaaattagccaggcgtggcggcaggtgcctgtaatcccagctacttgagaggctgaggcaggagaatcgcttgaacctgggaggcagaagttgtagtgagctgagatcacgccattacactccagcctgggc

SEQ ID NO: 405266 - DNA, 183 bp, Homo sapiens
acgggtctgcaatagaagggggtggatacccccttccaccccatggagaagaaaagcaggaaaaagtgtggggccagtgggtcccttagggcaaaagtcctagtggcggcagctttcttgtctagaccctggttcgcgcagcgcgtgtcgcactcacccgtggagggtgggagacagcggccg

SEQ ID NO: 405267 - DNA, 464 bp, Homo sapiens
atgcataacatatacaaataagtaagtatatataatatatgtatatatcatttaagagtatatgtagctggaacctttgcgtcttttgagagagattaatgcctggagtggtactcattcaacaagtaggaacaaaatttgtttgaagtccaagtccaattaagaacaaatctgaggctgggcaccatagctcacgcctgtaatcccagcaccttggggggccgaggtgggtggatcacctaggttgggagtttgagaccagcctgttgaacatggaggaaaccctgtctctactaaagatacaaaattagcctggcatggtggcacatgcctgtaatcccagccactcggtaggctgaggcaggagaattgcttgaacctgggaggcggaggttgcagtgagctgagatcacgccattgcgcctccagcctgggcaacgagcaaaactctgtctcaaaaaaaa

SEQ ID NO: 405268 - DNA, 339 bp, Homo sapiens
tgctctatcttctgtttctaatctttgaataagctcaaaagtattttttaaatttccttatcttcctattgtttcataatttccatttctttgctgaggttccacatctcttcattcattgttagaatattttcctttacccccatgaacagatttataatagctgcctttaaacatcttgaattacaacaccttgaatatcttaggatcacttctactatcttcttgttaaattatgtatggatcccattttcatgtttcttcacacatctcatgaattttaaagttgtgtactaaaactgtaaggaattataaagatgctcaattctgttgtgtaac

SEQ ID NO: 405269 - DNA, 428 bp, Homo sapiens
tttccatttatttgtgtcttcttcaatttttacatcagtgttttatagtttccagtttgcaggtaatttactttccttagttaaatttatttctaagtgttttattttttcactattataaatggaattgttttcttgattacttttttagatagttcattgttagtgtatagaaacactattaatttttgtatgttggttttgtgtcctgcaaagttactgaatttgtttattagttctgtttgcagatgacaggatcttatatgtagaaaaattctaaagattccattaaaaaataattgtgcactgccaaaaggtgttattgttgttgttgttgttgtttttaagacaggcttttactctgtctcaaaaaaagaagagagaaaatgggcaagagatttgaacagacacttcaccaaagaagatat

SEQ ID NO: 405270 - DNA, 442 bp, Homo sapiens
acaggtttgaatgaaatttaatttttgttagaaccagaagctacagagagatcatctaactctgtagtccataaaatttgtggatcttaaccactaatttcttatttcattttaaaaataactttattaaggtataattcacataccataaaattttgtcttttaaactgtagaattcattagtttttagtatactcacaaggttgtgcaggcaggcgtggtggttcacgcccgtattagtagcacctttggaggccaaggcaggaggatctcttgagcccaggagtttgagaccagcttgggcaacatagaccctatctcttaaaaaaaaaaaaaaacagctgggcatggtggtatgcttctgtagtcccagcatactagggaggctgaggcaggaggattttttgagctttgagcccaggagatcgaggctgcagtgcta

SEQ ID NO: 405271 - DNA, 1341 bp, Homo sapiens
gaactcctgacttcaggtgatgcccgcctgggcctcccgaagtgctgggattacaggtgtgagccactacactcagcctaggaattctaaatcttgaaacaaaaccttgaagtacaccaaaatagagccttcttaaaacctaaatcttacagggcctatacaataacacaatgaaaaaacaacaaaatcaaagtattcaagcaacaactagcatgatgaatagaatagtacctcacatctcaaatactacgttggatgtaaatggcctaaatgctcctcttaaaagatacatttggaccaccaaccaagaatctgctgtgttcaggagactcacgtaacacataaggactcacataaacttaaggtaaaggggtgggaaaagatattccatgcaaatggaaaccaaaagcaagcaggactagctattcttatatcagacaaaacagactttaaagcaacaacagttaaaaaagacaaagagggacattacatactagtaaaatgattagtccaacaagaaatgtcataatccaaaatatatatgcacctaccaccagagcttccaaatttataaaaccattactactagacctaagaaattagacagatggcaacacaataatagggggtgacttcaatactccactgacagccctagacgggtcatcaagacagaaagtcacaaagaaacaatggagcttaaactataccttagaacaaatggacttaacagatacctacgggaacattctaccccaaaaactgcagaataatacattattttcaccagcacacggagcattctcaaggatagaccatatggtaggccacaaaacaagtctcgaataaacttaagaaaactgaaattgtatcaagtaccctctcacaccacagtggaatacaattggaaattaactccaaaaggaaccctcaaaactatatacaaatacatggaaatttaataatctgctcttgaatgatctttgtgtcaacaatgaaatcaagatggaaattaaaattttttgaactgaacaatagtgacacaacccatcaaaacctctgggatacagcaaaagcggcactacatttagtaagttcacagcattaaatgtctacatcaaaaagtctgaaagagcataaacagacaatctaagctcacacctcaaggaactagagaaacaagaacaaatcaaactcaaacccagcagaagaaaagaaataacaaatatcagagcagaactaaataaaactgaagcaaacactacaaaagataaatgaaacaaaaagctggttctgtggaaaaataaagaaaatcggtagaccattagcaagattaaccaa

SEQ ID NO: 405272 - DNA, 473 bp, Homo sapiens
attctgaatttattttcacagattcttaaagattgctcactttccctggatattgctttctgcttattattctttaaaacttaattggaagcaagcagccaaatcaaatctaacgaggctaagtaagcctatatttcttcaatagccagtgagaaaataaggttcaagatactaattcatttcagtgattttaaggaattaaatgatatttagacatttgtttcctgatttaaaaaatgactgagtgatttttaagccatctgaaattctgaggcaggcagtcacatttgatagacacgtttttagcatagttgaaagtttctctctttgtgaatcaaattgtcatactgaatataatgtaactacttttttatgtctcagggtcattatgaaaaatgattttaatactgagcttatggaaatgccctaaaactttttgtgtttagaacattaaaaatgcctggcaatgtgtg

SEQ ID NO: 405273 - DNA, 358 bp, Homo sapiens
gggctggcattgccctcaacaaccactgtgtcaagctcatttcctggtatgagaatgaatttggctacagcaacagggtggtggacgtcatggcccacaagtcctccaaggagtaagacccctgaaccaccagccccagtgacagcacaagaggaaaagagaggccctcactgctggggagtccctgccacactcagtcccctgccacaatgagaatctcccctcctcacagtttccatgcagaccccctgaagagggagtggcctagggagccccaccttgtcttgtaccatcaacaaagtcccctgtgctcagccaaaaaaataaatacataaaatttttttctataaagttaaaa

SEQ ID NO: 405274 - DNA, 365 bp, Homo sapiens
tttagcctgaaggacttcctttactatatcttacacaagagatttgctagtgacacattctttcagtttttgtttatctgacagtcttaatttttccttcatctttaaagttagttttgctggacatacactcttgattgacagttgttttcattcagtactttgaatatgtcatcccattgcctctggcttccatggatcctgatgagaaattggctgttaatctattaggcatcatttgcaatgcagcttctactttgctgctttaaagattttctgtttgttttggctatcagcagtttaattattttatttctagaagtggctcttttttagtttatcctatatgatgtcattgatattct

SEQ ID NO: 405275 - DNA, 419 bp, Homo sapiens
taaatgaaaaaactgaggtctagaaaggttaaataatttcccagaattcatatagtgagtatatggaggagccagaatttgctattctgcctttttgcactataaaaagtttgcgaagattggtagaccccagaaaggatggagtaattggctctaccttagaaaatcaaacagcatcacagaagagatggcactggagcatcttaagggacaggtctaagatagccagatgaattggaactgtgagcatttccagctgagggagcagtttctgcaaagccaaggaaacccgagagcaacatatgttccacagactacaaatagttgtataagaccataacacaataggcagatggagtataagaggaaaacagactgtataaggcagaggtcaaagtcttaaagaattttatatgcca

SEQ ID NO: 405276 - DNA, 426 bp, Homo sapiens
gacatcccgccccggggctaaaagtgtctgccaccttcatcggcaacagcacggccatccaggagctgttcaagcgcatctccgagcagttcacggccatgttccggcgcaaggccttcctgcactggtacacgggcgagggcatggacgagatggagttcaccgaggccgagagcaacatgaatgacctggtgtccgagtaccagcagtaccaggatgccacagccgaggaggagggcgagttcgaggaggaggctgaggaggaggtggcctagagccttcagtcactggggaaagcagggaagcagtgtgaactctttattcactcccagcctgtcctgtggcctgtcccactgtgtgcacttgctgttttccctgtccacatccatgctgtacagacaccaccattaaagcattttcatagtg

SEQ ID NO: 405277 - DNA, 811 bp, Homo sapiens
gacatcccgccccggggctaaaagtgtctgccaccttcatcggcaacagcacggccatccaggagctgttcaagcgcatctccgagcagttcacggccatgttccggcgcaaggccttcctgcactggtacacgggcgagggcatggacgagatggagttcaccgaggccgagagcaacatgaatgacctggtgtccgagtaccagcagtaccaggatgccacagccgaggaggagggcgagttcgaggaggaggctgaggaggaggtggcctagagccttcagtcactggggaaagcagggaagcagtgtgaactctttattcactcccagcctgtcctgtggcctgtcccactgtgtgcacttgctgttttccctgtccacatccatgctgtacagacaccaccattaaagcattttcatagtgtgtggtttcgctttgcccattccttccagtaggccctccgggtgctgttgccgaatgtcagggcgtagttgtcctgcatggcggggatgaaccccatgtagaaggggatcaggccttggctgctgtagatgtggttgctgggccagtgtgttccaggcagcttctcgcccaggtcacagtgggggtttctaaacaggaactggctcttgtcgaattcgtccatggcttgcatgacgccgtctcggtaattcaaccccattacccaggtgaaacggggaatgaagccagcgtagcctgagatggccttgcgttggattaggttagggtggtccagctgcggcagccgctggaagctgcccacatctagcgtctcctgctggcggcg

SEQ ID NO: 405278 - DNA, 308 bp, Homo sapiens
tcctcgactatcttgaatcttaaaagaattttcgttttaattttaagtatattattaagctagacagttatactgttaaacatttttaaagcagcttatgtgccatggttatacccttctttatctaatgtttttatatttcttgcatggcagattccatatgtgctcttgaacttgcctgaatgtcatgagtgtgaaggaagggtcaaggctgatatactgctttagcaatctgcatgtgctagcactgagtgacgggcaatagactcacattctctatgttactctgaaatcattcagaacaggca

SEQ ID NO: 405279 - DNA, 546 bp, Homo sapiens
agaggcttttcataaataatggtgtgctcttgtcaggggttctgggccttgcaggatggtaacatgtttccatagcagatgggtccgctcttgcctgccattctgtcttttgaacttcctgttcaagggtatggttttcatcaaccttgatgctgtagagaacacctactttataaaattggaatttttttagccaaaagaaaataactgaatgtttttgtatataaaagatttctttagaaaagaccaaaaggggatggaataaccagcccagatgtccaagtgaaaagttgtaactgtgatagaaattttttcttgtaatatatgaaaattaggactgaggagaacaatcctttctaggctcagatttcattaaatgtcattaagaaattataccttttgctataaaactacttttttggggcaaataatccctacacatatacaggtacactttgttttatggagcttcactttattgcactgtgcacatattgcattttttgtatggttttgtttttacaaattaaagatttctggcaaccc

SEQ ID NO: 405280 - DNA, 578 bp, Homo sapiens
agcgagttcacgagatctgatggttttatgtgtttggtagttcctcctgcattaattttccttcatgctgccttatgaagaaggtaccttgcttcccctttgccttctgccatgattgttaaatttcctgaggccttcccagccatgctaaactgtgagtcagttaacctgtttcctttataaattacccagtcttgggcagttctttacagcactgtgaagacagactaatacagtgggcttgttgacatagttttgcccttttatgaatgtgattatctcaattttattatgttaaggaaggacacagtggcccacacctgtaatcccaacactttgggagtccaaggcagaaggatggcttgagcccaggagttcaagaccaggctgggccacaaagtgagaccctgtctctacaaaaaattaaaaaactaactgggcatggtgatgcatgtctctagtcccagctactcgggaggctgaggtgggaggaccacttgatcccaggaggttgaggctgcagtgaaccatgttaccactgctgcatttcagctcgggtgacagagcaagaccctgtc

SEQ ID NO: 405281 - DNA, 342 bp, Homo sapiens
acgaattgagaactgagtgctagctttggtataaaagaaattaagatagaagggggaagattctaagaataacaatactataagctttttctttccactttggaaacatgtaaaatctctctgacaacaccttatcaaataaaaacctggcttctctttcatggagtgcttgcacaaagaagtttagcacctcatgtgtgagaagggggaaaaaatgagggtcttgttcatttgttgcttggttatcccttggtatgttttaaattgccttgtttgttcggcactagcacagaaacagatgttgctctaccgtgcaggataatttactgtacctcctggtgc

SEQ ID NO: 405282 - DNA, 2745 bp, Homo sapiens
  misc_feature (57)..(57): n is a, c, g, or t
  misc_feature (101)..(102): n is a, c, g, or t
gagttttaaagtagaagtacttgctagtaatgcagatagagtcagttctctcaccantatggatttaaattgtcctttccatctcagtttactcttttttnnaaaaaaaacaaaccaatatgctacctgaaactagaaacacatttttaattctgcagctctcctaacagattattttgctttagtacagagctgggctgcaggctgagttgggagttggtaaaggattgaggacagcaatgtaggtcgcctcttcctacaggaaaaaattgaggaacgttgtgtattactggttaaaagattgattaggattatttcaagggatggttgagttgtcgttttacttatttcacccaatattttgtgtctctacttaagcagtgttgttttaaatgttactggataattgtaacataatcaaattaaattttatatttaactgatacccaagcatttgatgaaaacatgttgcaggaatgggagagtattccatagcttttgttttattgtgatttgattaaatgtgacaactaatagtttaaagacaggacttcactgttttagctgatttcctgtagaaagtgtggctaagtttaattgaaagaaatgtcttcttactagaactgattttgggggactttatccactcttacttggaacactaactgttggctataagggttcaaaaaggaagcaacagttgcttatttggcatgttgaaatatcactggctattttagagtatgaagcaaactttatcaatatgttttcttttccctccttacacacaatgtagactgatagaaaattagttttagttcttctagaatttatataaattttgtaagctccacccaacacacacacacacacacacacacacacacacacacacacctgccccacttacaaaagtctatattagccttttaaaacaaaaatttcctgcgtgaaattctggcttagttaactttttggtctttctctcggggcttttcttgttcttataaaatactgtaaattacaaatggaaatttaatgcagaattaaatttctagtgtacaatatttgtaagacaagaagaaaatttccttttcccagatctcaggaactaccttgttcctgttaacttcttgaactggctagttgctcaaaggtatgtatacaggcctttagggaagagcagtttttaaaattttcctttctgatcattatatacctgtcagatgacaatagataatcttccaaagttgctacctaaaaatcctaggaaagaaactttggtgaacatgactgccattcccattaattgctaatgaaaaacatcaaacttgcttagtagaaaaacacctaatttggtataactttcttgcagtttatccatattatgtgcttgttacttaatgtaattaaaagcattttaaaattctacttttttcgtatccactttttatacttgctacttcctaaatcctccctcactgtttatttcatccatctactcatttcccatcatccaaagttagcctctccttgtataccaggcactgtctgatttccatgtattccttttatttttactgtgggcctttgtgcttagtatacttttacttcatataatgtgattaacaaatgaagtgattatcatatggagtttaaggaaattagatgtatcttgcaattactttgaaatctttgggaaaccttaagaagattgtatctgttttcatttttatttacaacatcttggaatttgttcatgatttcctaaaatttctttgcctacccacatctctgtgaaaattttccatatcagttaagtagttttcgcaatgaaaattttagaccatagatatgttgtatgctgtgatcttttgcagcctaatgtttgaagggagcatgatgcagagaggttttgttaaaatcattttagcccaaagctttgtgtaattttcctgcaactttgattttgatttctttctcaaatagacttttttaatgtttagaaaagttggaggtcaatttatgatgtgattcaagttttagatttatttgctattttcaaagttttttttaatagtcttctctttttccagcagagagagatcatcattgcctgaatttagctttgtgactgcaagagcaagaccagttcctgtctggagacgactgttacaataatatcatcctattattttatgttcactctttatcaatttgaacagatgtttacatgtactataattagcattttatctctacagttctctaagagtacatctgagtccaaagtgtatctgaatgtgtgctctgaccttattcttaaatgttttctccccatactttatagccatttattttttaaacaccttaagaaggaacgaaaaagttctcttggatgacgtatattcaagtctgagccaaattgaggattgtgtctaggaaatctgtaaagccatactactgtgttcattagcatgagcaatttaaaatgaaaatgaattaaaaagttaaacatgagtttggttttaattttggggggatcttaagatatatttctgggagtaggatagccactgaaaataattttgaatagatgataaagtacttttttatgtactgtaatagcttgtgcatttcttctgaatatactttctgatgttgccaaggtcatttacccaaatatttttttaaaaattcttagcccttcaaagccaacaaagaaaataattttcttccaagtga

SEQ ID NO: 405283 - DNA, 264 bp, Homo sapiens
tatcccttgcacgctggaaatcaggactagaagcagaagtcagaacacgaaggcaggaaagggatctggtaaaacctaaatatgacctggatagaacagatccattagaaaataattatactccagtctcttcggtacctagtatttcatctggccactaccctgtacctactttgagcagcactattacagtaattgctcctactcctcctcagactccacggttaatatcacagcagctgtgtcccgatttccaccttgcca

SEQ ID NO: 405284 - DNA, 3748 bp, Homo sapiens
aagccgtgatgagaggaaaaaagatgatcgttctcgcaaaagagattatgatcgaaaccctcctcgaagagattcatacagagaccggtacaatagaagacgagggcggagtcgcagttatagcaggagtcgaagtcgaagttggagtaaagagaggcttcgtgagagggacagagatagaagcaggactagaagcagaagcagaacacgaagcagggaaagggatctggtaaaacctaaatatgacctggatagaacagatccattagaaaataattatactccagtctcttcggtacctagtatttcatctggccactaccctgtacctactttgagcagcactattacagtaattgctcctactcatcatggaaacaacactaccgaaagttggtctgaatttcatgaagaccaagtggaccataactcttacgtaagaccacccatgccaaagaaacggtgtagagactatgatgaaaagggtttttgtatgagaggagacatgtgtccttttgatcatggaagtgatccagtagttgtagaagatgtgaatcttcctggtatgctgcctttcccagcacagcctcctgttgttgaaggaccacctcctcctggactccccccacctccaccaattcttacacccccacctgtgaatctcaggcccccagtaccaccgccaggtccattgccacccagtctcccacctgttacagatgatatttcttattctttggttttgacaggaccaccacttccagacctatgtatagacacagagtgcatgcacaaaggcccaacttgataggactaacatcaggggatatggatttgccacccagagaaaagcctcccaataaaagcagtatgaggatagtagtggactcagaatcaaggaaaagaaccattggttctggagagcctggagttcctacaaagaagacttggtttgataaaccaaattttaatagaacaaacagcccaggctttcagaagaaggttcaatttggaaatgaaaataccaagcttgaacttagaaaagttcctccagaattaaataatatcagcaaacttaatgaacattttagtcgatttggaaccttggttaacttacaggttgcttataatggtgatcctgaaggtgccctaatccaatttgcaacatacgaagaagcaaagaaagcaatatcaagtacggaagcagtattaaacaatcgctttattaaggtttattggcacagagaaggaagcacccaacagttacaaactacttctccaaagcctttagtccagcagcccattttgcctgttgtgaagcagtcagtcaaagagcggctgggtccagtaccttcaagtactattgaacctgcagaagcccagagtgcctcttcagaccttcctcaggtgttgtctacatctactggcctaacaaaaacagtgtataatccagctgctttgaaggctgcacagaaaaccttacttgtttccacctctgcagttgataataatgaagcacagaaaaaaaaacaggaggcattgaaacttcagcaggatgtaaggaaaaggaaacaagaaattttagaaaagcacattgaaacacagaagatgttaatttcaaaactggagaaaaacaaaacaatgaagtctgaagataaagcagaaataatgaaaactttagaggttttgacaaaaaatattaccaagttgaaagatgaggtcaaagctgcttctcctggacgctgtcttccaaaaagtataaaaaccaagactcagatgcagaaggaattacttgacacagaactggatttatataagaagatgcaggctggagaagaagtcactgaacttaggagaaagtatacagaattacagctggaagctgccaaacgagggattctttcatctggtcggggcagaggaattcattcaagaggtcgaggtgcagttcatggccgaggcagggggcgagggcgagggcgaggtgtgcctggtcatgctgtggtggatcaccgtcccagggcattggagatttctgcatttacggagagcgatagagaagatcttcttcctcattttgcgcaatatggtgaaattgaagattgtcagattgatgattcctcacttcatgcagtaattacattcaagacaagagcagaagctgaagcagctgcagttcatggagctcgtttcaaagggcaagatctaaaactggcatggaataaaccagtaactaatatttcagctgttgaaacagaagaagttgagcctgatgaagaagaatttcaggaagagtctttggtggatgactcattacttcaagatgatgatgaagaagaagaggacaatgaatctcgttcttggagaagatgatttgactgatcattgatctgcatatgctagaactctacctgtgtttcattagtattatctaatgtacttttacatatttgtaaaaacaatttttggtaaaatgtgatgaagatggatttcacaaatagacaaaaaagaagaaaactaccttctgatcttgtattttgaaagattgatgtttgcattttacttcagtaaacaattgctaaagacatcacactagaaacatatgcaatgtttttattacatacttctactggacatcacagaattctttgggttctttgtaatttaatgaataggtctgaaaacttatgaccaatacttgttataacttagaggactttgttttattccaaataaggaatgaatttgcatttaaaatcttaatgaatgttttcaaaactgaatagataacatagtactctaactaaagtctccaagttatgtattataatattacatagtagtatgcttaggctttactatgtattagccttttgttggactgtgtatgtattttaccatatgggttttaatgataatggtgtatgactgctttacatgagtccttatgcatccagatgttataataaagtggaatggtctctttaaaaaaaaaaaaggaaagaaaagagaaaagcaatgacaaaaaaaaaaaaaaaaaaaaaaaaaagccaagacaatgttccttgatttaaaaaaaaaaagaaaagaaaaaagaaaagaaaaaaattaaaatagaccattccagatggtgatctacccttccccccaattatcacaaaaggagctataatcactaacttattcttaataataatggttactggtacccttacaataatgtacaatccaatgtttaaaaattataccacttgagtttggtttgatcctataaattttcaacaaatgtcttaaaatttaaaagcaggctgattagtttggaaccagactgcaagtagagctaacatttggtgaataagaaaacatcacattacattttggatgtatgaaagaaaacttgaccatttgaagatatatgaataaagaaatgtactatagatactactttaggaaaacactgtttggtaagtgttccagtctgatattttaagtgtgtacttcctatacttgtataaaaatctttgatgtttgcaacaatactgtgatttttttaagtggatttcttttgcaagtgaacatgatcattgaaagttgatatggcagtttccaggaaataaatgcattctttgtagaatgggggtgggagattacatatttatattttcaaattcatcattttgattgcaagtgtttctgcctctcttgagattatagtgataatattaaaaaatcacatttaaaaaattac

SEQ ID NO: 405285 - DNA, 4406 bp, Homo sapiens
aagccgtgatgagaggaaaaaagatgatcgttctcgcaaaagagattatgatcgaaaccctcctcgaagagattcatacagagaccggtacaatagaagacgagggcggagtcgcagttatagcaggagtcgaagtcgaagttggagtaaagagaggcttcgtgagagggacagagatagaagcaggactagaagcagaagcagaacacgaagcagggaaagggatctggtaaaacctaaatatgacctggatagaacagatccattagaaaataattatactccagtctcttcggtacctagtatttcatctggccactaccctgtacctactttgagcagcactattacagtaattgctcctactcatcatggaaacaacactaccgaaagttggtctgaatttcatgaagaccaagtggaccataactcttacgtaagaccacccatgccaaagaaacggtgtagagactatgatgaaaagggtttttgtatgagaggagacatgtgtccttttgatcatggaagtgatccagtagttgtagaagatgtgaatcttcctggtatgctgcctttcccagcacagcctcctgttgttgaaggaccacctcctcctggactccccccacctccaccaattcttacacccccacctgtgaatctcaggcccccagtaccaccgccaggtccattgccacccagtctcccacctgttacaggaccaccacctccacttcctcctttgcagccatctggcatggatgctcctccaaactctgcaaccagttctgttcctactgtagtaacaactggcattcatcaccagcctcctcctgctccaccctctctttttactgcagattaccagatacatatgacacagatggctacaatcctgaagccccaagcataacaaacacttccagacctatgtatagacacagagtgcatgcacaaaggcccaacttgataggactaacatcaggggatatggatttgccacccagagaaaagcctcccaataaaagcagtatgaggatagtagtggactcagaatcaaggaaaagaaccattggttctggagagcctggagttcctacaaagaagacttggtttgataaaccaaattttaatagaacaaacagcccaggctttcagaagaaggttcaatttggaaatgaaaataccaagcttgaacttagaaaagttcctccagaattaaataatatcagcaaacttaatgaacattttagtcgatttggaaccttggttaacttacaggttgcttataatggtgatcctgaaggtgccctaatccaatttgcaacatacgaagaagcaaagaaagcaatatcaagtacggaagcagtattaaacaatcgctttattaaggtttattggcacagagaaggaagcacccaacagttacaaactacttctccaaagcctttagtccagcagcccattttgcctgttgtgaagcagtcagtcaaagagcggctgggtccagtaccttcaagtactattgaacctgcagaagcccagagtgcctcttcagaccttcctcagaatgtaactaagttatctgtgaaggacaggttgggttttgtatcaaagccatctgtttcagcaactgaaaaggtgttgtctacatctactggcctaacaaaaacagtgtataatccagctgctttgaaggctgcacagaaaaccttacttgtttccacctctgcagttgataataatgaagcacagaaaaaaaaacaggaggcattgaaacttcagcaggatgtaaggaaaaggaaacaagaaattttagaaaagcacattgaaacacagaagatgttaatttcaaaactggagaaaaacaaaacaatgaagtctgaagataaagcagaaataatgaaaactttagaggttttgacaaaaaatattaccaagttgaaagatgaggtcaaagctgcttctcctggacgctgtcttccaaaaagtataaaaaccaagactcagatgcagaaggaattacttgacacagaactggatttatataagaagatgcaggctggagaagaagtcactgaacttaggagaaagtatacagaattacagctggaagctgccaaacgagggattctttcatctggtcggggcagaggaattcattcaagaggtcgaggtgcagttcatggccgaggcagggggcgagggcgagggcgaggtgtgcctggtcatgctgtggtggatcaccgtcccagggcattggagatttctgcatttacggagagcgatagagaagatcttcttcctcattttgcgcaatatggtgaaattgaagattgtcagattgatgattcctcacttcatgcagtaattacattcaagacaagagcagaagctgaagcagctgcagttcatggagctcgtttcaaagggcaagatctaaaactggcatggaataaaccagtaactaatatttcagctgttgaaacagaagaagttgagcctgatgaagaagaatttcaggaagagtctttggtggatgactcattacttcaagatgatgatgaagaagaagaggacaatgaatctcgttcttggagaagatgatttgactgatcattgatctgcatatgctagaactctacctgtgtttcattagtattatctaatgtacttttacatatttgtaaaaacaatttttggtaaaatgtgatgaagatggatttcacaaatagacaaaaaagaagaaaactaccttctgatcttgtattttgaaagattgatgtttgcattttacttcagtaaacaattgctaaagacatcacactagaaacatatgcaatgtttttattacatacttctactggacatcacagaattctttgggttctttgtaatttaatgaataggtctgaaaacttatgaccaatacttgttataacttagaggactttgttttattccaaataaggaatgaatttgcatttaaaatcttaatgaatgttttcaaaactgaatagataacatagtactctaactaaagtctccaagttatgtattataatattacatagtagtatgcttaggctttactatgtattagccttttgttggactgtgtatgtattttaccatatgggttttaatgataatggtgtatgactgctttacatgagtccttatgcatccagatgttataataaagtggaatggtctctttaaaaaaaaaaaaggaaagaaaagagaaaagcaatgacaaaaaaaaaaaaaaaaaaaaaaaaaagccaagacaatgttccttgatttaaaaaaaaaaagaaaagaaaaaagaaaagaaaaaaattaaaatagaccattccagatggtgatctacccttccccccaattatcacaaaaggagctataatcactaacttattcttaataataatggttactggtacccttacaataatgtacaatccaatgtttaaaaattataccacttgagtttggtttgatcctataaattttcaacaaatgtcttaaaatttaaaagcaggctgattagtttggaaccagactgcaagtagagctaacatttggtgaataagaaaacatcacattacattttggatgtatgaaagaaaacttgaccatttgaagatatatgaataaagaaatgtactatagatactactttaggaaaacactgtttgtagtcgtgaaaggtgccaaattggcagaggctcacgtttcttctctttacaccaaacagcagagagagatcatcattgcctgaatttagctttgtgactgcaagagcaagaccagttcctgtctggagacgactgttacaataatatcatcctattattttatgttcactctttatcaatttgaacagatgtttacatgtactataattagcattttatctctacagttctctaagagtacatctgagtccaaagtgtatctgaatgtgtgctctgaccttattcttaaatgttttctccccatactttatagccatttattttttaaacaccttaagaaggaacgaaaaagttctcttggatgacgtatattcaagtctgagccaaattgaggattgtgtctaggaaatctgtaaagccatactactgtgttcattagcatgagcaatttaaaatgaaaatgaattaaaaagttaaacatgagtttggttttaattttggggggatcttaagatatatttctgggagtaggatagccactgaaaataattttgaatagatgataaagtacttttttatgtactgtaatagcttgtgcatttcttctgaatatactttctgatgttgccaaggtcatttacccaaatatttttttaaaaattcttagcccttcaaagccaacaaagaaaataattttcttccaagtga

SEQ ID NO: 405286 - DNA, 3149 bp, Homo sapiens
aagccgtgatgagaggaaaaaagatgatcgttctcgcaaaagagattatgatcgaaaccctcctcgaagagattcatacagagaccggtacaatagaagacgagggcggagtcgcagttatagcaggagtcgaagtcgaagttggagtaaagagaggcttcgtgagagggacagagatagaagcaggactagaagcagaagcagaacacgaagcagggaaagggatctggtaaaacctaaatatgacctggatagaacagatccattagaaaataattatactccagtctcttcggtacctagtatttcatctggccactaccctgtacctactttgagcagcactattacagtaattgctcctactcatcatggaaacaacactaccgaaagttggtctgaatttcatgaagaccaagtggaccataactcttacgtaagaccacccatgccaaagaaacggtgtagagactatgatgaaaagggtttttgtatgagaggagacatgtgtccttttgatcatggaagtgatccagtagttgtagaagatgtgaatcttcctggtatgctgcctttcccagcacagcctcctgttgttgaaggaccacctcctcctggactccccccacctccaccaattcttacacccccacctgtgaatctcaggcccccagtaccaccgccaggtccattgccacccagtctcccacctgttacaggaccaccacctccacttcctcctttgcagccatctggcatggatgctcctccaaactctgcaaccagttctgttcctactgtagtaacaactggcattcatcaccagcctcctcctgctccaccctctctttttactgcagattaccagatacatatgacacagatggctacaatcctgaagccccaagcataacaaacacttccagacctatgtatagacacagagtgcatgcacaaaggcccaacttgataggactaacatcaggggatatggatttgccacccagagaaaagcctcccaataaaagcagtatgaggatagtagtggactcagaatcaaggaaaagaaccattggttctggagagcctggagttcctacaaagaagacttggtttgataaaccaaattttaatagaacaaacagcccaggctttcagaagaaggttcaatttggaaatgaaaataccaagcttgaacttagaaaagttcctccagaattaaataatatcagcaaacttaatgaacattttagtcgatttggaaccttggttaacttacaggttgcttataatggtgatcctgaaggtgccctaatccaatttgcaacatacgaagaagcaaagaaagcaatatcaagtacggaagcagtattaaacaatcgctttattaaggtttattggcacagagaaggaagcacccaacagttacaaactacttctccaaagcctttagtccagcagcccattttgcctgttgtgaagcagtcagtcaaagagcggctgggtccagtaccttcaagtactattgaacctgcagaagcccagagtgcctcttcagaccttcctcaggtgttgtctacatctactggcctaacaaaaacagtgtataatccagctgctttgaaggctgcacagaaaaccttacttgtttccacctctgcagttgataataatgaagcacagaaaaaaaaacaggaggcattgaaacttcagcaggatgtaaggaaaaggaaacaagaaattttagaaaagcacattgaaacacagaagatgttaatttcaaaactggagaaaaacaaaacaatgaagtctgaagataaagcagaaataatgaaaactttagaggttttgacaaaaaatattaccaagttgaaagatgaggtcaaagctgcttctcctggacgctgtcttccaaaaagtataaaaaccaagactcagatgcagaaggaattacttgacacagaactggatttatataagaagatgcaggctggagaagaagtcactgaacttaggagaaagtatacagaattacagctggaagctgccaaacgagggattctttcatctggtcggggcagaggaattcattcaagaggtcgaggtgcagttcatggccgaggcagggggcgagggcgagggcgaggtgtgcctggtcatgctgtggtggatcaccgtcccagggcattggagatttctgcatttacggagagcgatagagaagatcttcttcctcattttgcgcaatatggtgaaattgaagattgtcagattgatgattcctcacttcatgcagtaattacattcaagacaagagcagaagctgaagcagctgcagttcatggagctcgtttcaaagggcaagatctaaaactggcatggaataaaccagtaactaatatttcagctgttgaaacagaagaagttgagcctgatgaagaagaatttcaggaagagtctttggtggatgactcattacttcaagatgatgatgaagaagaagaggacaatgaatctcgttcttggagaagatgatttgactgatcattgatctgcatatgctagaactctacctgtgtttcattagtattatctaatgtacttttacatatttgtaaaaacaatttttggtaaaatgtgatgaagatggatttcacaaatagacaaaaaagaagaaaactaccttctgatcttgtattttgaaagattgatgtttgcattttacttcagtaaacaattgctaaagacatcacactagaaacatatgcaatgtttttattacatacttctactggacatcacagaattctttgggttctttgtaatttaatgaataggtctgaaaacttatgaccaatacttgttataacttagaggactttgttttattccaaataaggaatgaatttgcatttaaaatcttaatgaatgttttcaaaactgaatagataacatagtactctaactaaagtctccaagttatgtattataatattacatagtagtatgcttaggctttactatgtattagccttttgttggactgtgtatgtattttaccatatgggttttaatgataatggtgtatgactgctttacatgagtccttatgcatccagatgttataataaagtggaatggtctcttta

SEQ ID NO: 405287 - DNA, 4247 bp, Homo sapiens
aagccgtgatgagaggaaaaaagatgatcgttctcgcaaaagagattatgatcgaaaccctcctcgaagagattcatacagagaccggtacaatagaagacgagggcggagtcgcagttatagcaggagtcgaagtcgaagttggagtaaagagaggcttcgtgagagggacagagatagaagcaggactagaagcagaagcagaacacgaagcagggaaagggatctggtaaaacctaaatatgacctggatagaacagatccattagaaaataattatactccagtctcttcggtacctagtatttcatctggccactaccctgtacctactttgagcagcactattacagtaattgctcctactcatcatggaaacaacactaccgaaagttggtctgaatttcatgaagaccaagtggaccataactcttacgtaagaccacccatgccaaagaaacggtgtagagactatgatgaaaagggtttttgtatgagaggagacatgtgtccttttgatcatggaagtgatccagtagttgtagaagatgtgaatcttcctggtatgctgcctttcccagcacagcctcctgttgttgaaggaccacctcctcctggactccccccacctccaccaattcttacacccccacctgtgaatctcaggcccccagtaccaccgccaggtccattgccacccagtctcccacctgttacaggaccaccacctccacttcctcctttgcagccatctggcatggatgctcctccaaactctgcaaccagttctgttcctactgtagtaacaactggcattcatcaccagcctcctcctgctccaccctctctttttactgcagattaccagatacatatgacacagatggctacaatcctgaagccccaagcataacaaacacttccagacctatgtatagacacagagtgcatgcacaaaggcccaacttgataggactaacatcaggggatatggatttgccacccagagaaaagcctcccaataaaagcagtatgaggatagtagtggactcagaatcaaggaaaagaaccattggttctggagagcctggagttcctacaaagaagacttggtttgataaaccaaattttaatagaacaaacagcccaggctttcagaagaaggttcaatttggaaatgaaaataccaagcttgaacttagaaaagttcctccagaattaaataatatcagcaaacttaatgaacattttagtcgatttggaaccttggttaacttacaggttgcttataatggtgatcctgaaggtgccctaatccaatttgcaacatacgaagaagcaaagaaagcaatatcaagtacggaagcagtattaaacaatcgctttattaaggtttattggcacagagaaggaagcacccaacagttacaaactacttctccaaagcctttagtccagcagcccattttgcctgttgtgaagcagtcagtcaaagagcggctgggtccagtaccttcaagtactattgaacctgcagaagcccagagtgcctcttcagaccttcctcaggtgttgtctacatctactggcctaacaaaaacagtgtataatccagctgctttgaaggctgcacagaaaaccttacttgtttccacctctgcagttgataataatgaagcacagaaaaaaaaacaggaggcattgaaacttcagcaggatgtaaggaaaaggaaacaagaaattttagaaaagcacattgaaacacagaagatgttaatttcaaaactggagaaaaacaaaacaatgaagtctgaagataaagcagaaataatgaaaactttagaggttttgacaaaaaatattaccaagttgaaagatgaggtcaaagctgcttctcctggacgctgtcttccaaaaagtataaaaaccaagactcagatgcagaaggaattacttgacacagaactggatttatataagaagatgcaggctggagaagaagtcactgaacttaggagaaagtatacagaattacagctggaagctgccaaacgagggattctttcatctggtcggggcagaggaattcattcaagaggtcgaggtgcagttcatggccgaggcagggggcgagggcgagggcgaggtgtgcctggtcatgctgtggtggatcaccgtcccagggcattggagatttctgcatttacggagagcgatagagaagatcttcttcctcattttgcggctgcagttcatggagctcgtttcaaagggcaagatctaaaactggcatggaataaaccagtaactaatatttcagctgttgaaacagaagaagttgagcctgatgaagaagaatttcaggaagagtctttggtggatgactcattacttcaagatgatgatgaagaagaagaggacaatgaatctcgttcttggagaagatgatttgactgatcattgatctgcatatgctagaactctacctgtgtttcattagtattatctaatgtacttttacatatttgtaaaaacaatttttggtaaaatgtgatgaagatggatttcacaaatagacaaaaaagaagaaaactaccttctgatcttgtattttgaaagattgatgtttgcattttacttcagtaaacaattgctaaagacatcacactagaaacatatgcaatgtttttattacatacttctactggacatcacagaattctttgggttctttgtaatttaatgaataggtctgaaaacttatgaccaatacttgttataacttagaggactttgttttattccaaataaggaatgaatttgcatttaaaatcttaatgaatgttttcaaaactgaatagataacatagtactctaactaaagtctccaagttatgtattataatattacatagtagtatgcttaggctttactatgtattagccttttgttggactgtgtatgtattttaccatatgggttttaatgataatggtgtatgactgctttacatgagtccttatgcatccagatgttataataaagtggaatggtctctttaaaaaaaaaaaaggaaagaaaagagaaaagcaatgacaaaaaaaaaaaaaaaaaaaaaaaaaagccaagacaatgttccttgatttaaaaaaaaaaagaaaagaaaaaagaaaagaaaaaaattaaaatagaccattccagatggtgatctacccttccccccaattatcacaaaaggagctataatcactaacttattcttaataataatggttactggtacccttacaataatgtacaatccaatgtttaaaaattataccacttgagtttggtttgatcctataaattttcaacaaatgtcttaaaatttaaaagcaggctgattagtttggaaccagactgcaagtagagctaacatttggtgaataagaaaacatcacattacattttggatgtatgaaagaaaacttgaccatttgaagatatatgaataaagaaatgtactatagatactactttaggaaaacactgtttgtagtcgtgaaaggtgccaaattggcagaggctcacgtttcttctctttacaccaaacagcagagagagatcatcattgcctgaatttagctttgtgactgcaagagcaagaccagttcctgtctggagacgactgttacaataatatcatcctattattttatgttcactctttatcaatttgaacagatgtttacatgtactataattagcattttatctctacagttctctaagagtacatctgagtccaaagtgtatctgaatgtgtgctctgaccttattcttaaatgttttctccccatactttatagccatttattttttaaacaccttaagaaggaacgaaaaagttctcttggatgacgtatattcaagtctgagccaaattgaggattgtgtctaggaaatctgtaaagccatactactgtgttcattagcatgagcaatttaaaatgaaaatgaattaaaaagttaaacatgagtttggttttaattttggggggatcttaagatatatttctgggagtaggatagccactgaaaataattttgaatagatgataaagtacttttttatgtactgtaatagcttgtgcatttcttctgaatatactttctgatgttgccaaggtcatttacccaaatatttttttaaaaattcttagcccttcaaagccaacaaagaaaataattttcttccaagtga

SEQ ID NO: 405288 - DNA, 2124 bp, Homo sapiens
accaatattttaaaggtacagaagatggcgtaatttgctaaagagaggcaggaaaaaatggcatgtacaaaggctttatttgatatttgtttagtgtgtttcatgcaagcaatagaatagatcatatagagaaaccattgagtggttaaatgttgcttttctttgttttgtgaatgttctagctataaaaataccttttgtattcaactctgttgagagagatgagtatttaaaatttcaggaagagtctttggtggatgactcattacttcaagatgatgatgaagaagaagaggacaatgaatctcgttcttggagaagatgatttgactgatcattgatctgcatatgctagaactctacctgtgtttcattagtattatctaatgtacttttacatatttgtaaaaacaatttttggtaaaatgtgatgaagatggatttcacaaatagacaaaaaagaagaaaactaccttctgatcttgtattttgaaagattgatgtttgcattttacttcagtaaacaattgctaaagacatcacactagaaacatatgcaatgtttttattacatacttctactggacatcacagaattctttgggttctttgtaatttaatgaataggtctgaaaacttatgaccaatacttgttataacttagaggactttgttttattccaaataaggaatgaatttgcatttaaaatcttaatgaatgttttcaaaactgaatagataacatagtactctaactaaagtctccaagttatgtattataatattacatagtagtatgcttaggctttactatgtattagccttttgttggactgtgtatgtattttaccatatgggttttaatgataatggtgtatgactgctttacatgagtccttatgcatccagatgttataataaagtggaatggtctctttaaaaaaaaaaaaggaaagaaaagagaaaagcaatgacaaaaaaaaaaaaaaaaaaaaaaaaaagccaagacaatgttccttgatttaaaaaaaaaaagaaaagaaaaaagaaaagaaaaaaattaaaatagaccattccagatggtgatctacccttccccccaattatcacaaaaggagctataatcactaacttattcttaataataatggttactggtacccttacaataatgtacaatccaatgtttaaaaattataccacttgagtttggtttgatcctataaattttcaacaaatgtcttaaaatttaaaagcaggctgattagtttggaaccagactgcaagtagagctaacatttggtgaataagaaaacatcacattacattttggatgtatgaaagaaaacttgaccatttgaagatatatgaataaagaaatgtactatagatactactttaggaaaacactgtttgtagtcgtgaaaggtgccaaattggcagaggctcacgtttcttctctttacaccaaacagcagagagagatcatcattgcctgaatttagctttgtgactgcaagagcaagaccagttcctgtctggagacgactgttacaataatatcatcctattattttatgttcactctttatcaatttgaacagatgtttacatgtactataattagcattttatctctacagttctctaagagtacatctgagtccaaagtgtatctgaatgtgtgctctgaccttattcttaaatgttttctccccatactttatagccatttattttttaaacaccttaagaaggaacgaaaaagttctcttggatgacgtatattcaagtctgagccaaattgaggattgtgtctaggaaatctgtaaagccatactactgtgttcattagcatgagcaatttaaaatgaaaatgaattaaaaagttaaacatgagtttggttttaattttggggggatcttaagatatatttctgggagtaggatagccactgaaaataattttgaatagatgataaagtacttttttatgtactgtaatagcttgtgcatttcttctgaatatactttctgatgttgccaaggtcatttacccaaatatttttttaaaaattcttagcccttcaaagccaacaaagaaaataattttcttccaagtga

SEQ ID NO: 405289 - DNA, 2192 bp, Homo sapiens
  misc_feature (2097)..(2097): n is a, c, g, or t
  misc_feature (2104)..(2104): n is a, c, g, or t
  misc_feature (2123)..(2123): n is a, c, g, or t
  misc_feature (2154)..(2154): n is a, c, g, or t
aagccgtgatgagaggaaaaaagatgatcgttctcgcaaaagagattatgatcgaaaccctcctcgaagagattcatacagagaccggtacaatagaagacgagggcggagtcgcagttatagcaggagtcgaagtcgaagttggagtaaagagaggcttcgtgagagggacagagatagaagcaggactagaagcagaagcagaacacgaagcagggaaagggatctggtaaaacctaaatatgacctggatagaacagatccattagaaaataattatactccagtctcttcggtacctagtatttcatctggccactaccctgtacctactttgagcagcactattacagtaattgctcctactcatcatggaaacaacactaccgaaagttggtctgaatttcatgaagaccaagtggaccataactcttacgtaagaccacccatgccaaagaaacggtgtagagactatgatgaaaagggtttttgtatgagaggagacatgtgtccttttgatcatggaagtgatccagtagttgtagaagatgtgaatcttcctggtatgctgcctttcccagcacagcctcctgttgttgaaggaccacctcctcctggactccccccacctccaccaattcttacacccccacctgtgaatctcaggcccccagtaccaccgccaggtccattgccacccagtctcccacctgttacaggaccaccacctccacttcctcctttgcagccatctggcatggatgctcctccaaactctgcaaccagttctgttcctactgtagtaacaactggcattcatcaccagcctcctcctgctccaccctctctttttactgcagattaccagatacatatgacacagatggctacaatcctgaagccccaagcataacaaacacttccagacctatgtatagacacagagtgcatgcacaaaggcccaacttgataggactaacatcaggggatatggatttgccacccagagaaaagcctcccaataaaagcagtatgaggatagtagtggactcagaatcaaggaaaagaaccattggttctggagagcctggagttcctacaaagaagacttggtttgataaaccaaattttaatagaacaaacagcccaggctttcagaagaaggttcaatttggaaatgaaaataccaagcttgaacttagaaaagttcctccagaattaaataatatcagcaaacttaatgaacattttagtcgatttggaaccttggttaacttacaggttgcttataatggtgatcctgaaggtgccctaatccaatttgcaacatacgaagaagcaaagaaagcaatatcaagtacggaagcagtattaaacaatcgctttattaaggtttattggcacagagaaggaagcacccaacagttacaaactacttctccaaagcctttagtccagcagcccattttgcctgttgtgaagcagtcagtcaaagagcggctgggtccagtaccttcaagtactattgaacctgcagaagcccagagtgcctcttcagaccttcctcaggtgttgtctacatctactggcctaacaaaaacagtgtataatccagctgctttgaaggctgcacagaaaaccttacttgtttccacctctgcagttgataataatgaagcacagaaaaaaaaacaggaggcattgaaacttcagcaggatgtaaggaaaaggaaacaagaaattttagaaaagcacattgaaacacagaagatgttaatttcaaaactggagaaaaacaaaacaatgaagtctgaagataaagcagaaataatgaaaactttagaggttttgacaaaaaatattaccaagttgaaagatgaggtcaaagctgcttctcctggacgctgtcttccaaaaagtataaaaaccaagactcagatgcagaaggaattacttgacacagaactggatttatataagaagatgcaggctggagaagaagtcactgaacttaggagaaagtatacagaattacagctggaagctcacaaacgagggattctttcatagccctacttatccaaaagtacatttccnataagantatacttcaatgattgaantgaagccaaaataaaataccaccagggtttncaaagagtaaatatttacaatgtttctaccccattcga

SEQ ID NO: 405290 - DNA, 1294 bp, Homo sapiens
gcggccgcctactactactactactgttcgaattcaagcttctaacgatgtacggggacatgagtccttatgcatccagatgttataataaagtggaatggtctctttaaaaaaaaaaaaggaaagaaaagagaaaagcaatgacaaaaaaaaaaaaaaaaaaaaaaaaaagccaagacaatgttccttgatttaaaaaaaaaaagaaaagaaaaaagaaaagaaaaaaattaaaatagaccattccagatggtgatctacccttccccccaattatcacaaaaggagctataatcactaacttattcttaataataatggttactggtacccttacaataatgtacaatccaatgtttaaaaattataccacttgagtttggtttgatcctataaattttcaacaaatgtcttaaaatttaaaagcaggctgattagtttggaaccagactgcaagtagagctaacatttggtgaataagaaaacatcacattacattttggatgtatgaaagaaaacttgaccatttgaagatatatgaataaagaaatgtactatagatactactttaggaaaacactgtttgtagtcgtgaaaggtgccaaattggcagaggctcacgtttcttctctttacaccaaacagcagagagagatcatcattgcctgaatttagctttgtgactgcaagagcaagaccagttcctgtctggagacgactgttacaataatatcatcctattattttatgttcactctttatcaatttgaacagatgtttacatgtactataattagcattttatctctacagttctctaagagtacatctgagtccaaagtgtatctgaatgtgtgctctgaccttattcttaaatgttttctccccatactttatagccatttattttttaaacaccttaagaaggaacgaaaaagttctcttggatgacgtatattcaagtctgagccaaattgaggattgtgtctaggaaatctgtaaagccatactactgtgttcattagcatgagcaatttaaaatgaaaatgaattaaaaagttaaacatgagtttggttttaattttggggggatcttaagatatatttctgggagtaggatagccactgaaaataattttgaatagatgataaagtacttttttatgtactgtaatagcttgtgcatttcttctgaatatactttctgatgttgccaaggtcatttacccaaatatttttttaaaaattcttagcccttcaaagccaacaaagaaaataattttcttccaagtga

SEQ ID NO: 405291 - DNA, 745 bp, Homo sapiens
cattggagatttctgcatttacggagagcgatagagaagatcttcttcctcattttgcggtactttcttactgctcaacaaaacaaatgctgataatcatcattggggatagtagacataattaaagaggaagttatgaaaaggacataagtaatttcaactcgttaatctgaacaaagagtttaatctttaatttttttgttaatttaaaaacaaactgtaggatttgtataattatctagaagagacattactattcttacacttagtaggccatgaaatactgtgaaatgaacaatataaactttgctgtttcagagagggaagtcttgtagtttagtttgatttgatatttacttttaaagaaaaagttaacatattgcatgggccatccagatttttaaaataaggtttgtgtttgttaaaaatgtattcttgatctagctgacccagtattgaaacaagataaaattttgacctatgatcttgaagttgcctccgtcagtgtcaggatgtaatgaaaaagactttgtataatggtaatatattgacctacaagaagggagaatgggattctagtctctgttaatccattatttaacttggacttcctgggatttattaggctcatgttcaaaatgaagattatacctgctgaatggccctttcatctcaaatgctgtgattcttagtggtatcccaaaggttggttactaagcatcagttttaccctcagcattatatt

SEQ ID NO: 405292 - DNA, 511 bp, Homo sapiens
gaaaccattgagtggttaaatgttgcttttctttgttttgtgaatgttctagctataaaaataccttttgtattcaactctgttgagagagatgagtatttaaaagtgtcaccttttttttcttttcttttttttttttttgggtaaattcctaaatacattttaacctatttcaggaagagtctttggtggatgactcattacttcaagatgatgatgaagaagaagaggacaatgaatctcgttcttggagaagatgatttgactgatcattgatctgcatatgctagaactctacctgtgtttcattagtattatctaatgtacttttacatatttgtaaaaacaatttttggtaaaatgtgatgaagatggatttcacaaatagacaaaaaagaagaaaactaccttctgatcttgtattttgaaagattgatgtttgcattttacttcagtaaacaattgctaaagacatcacactagaaacatatgcaatgtttttattacatac

SEQ ID NO: 405293 - DNA, 397 bp, Homo sapiens
taggaagctgttgcagttattgtggaggtgtggagtattttggcttggattagagtgattatactggagatagaaatatatggattaaatgggactgcgtaaaagttactttaaaaaggtttgtatcaatacaggatagtaattactgtcacctaaaatattaattactattttttagatgcagaaggaattacttgacacagaactggatttatataagaagatgcaggctggagaagaagtcactgaacttaggagaaagtatacagaattacagctggaagtatgtttaatcacaactacacagtaggcttaaaagaagcaaatgtagttgtagtggtcaatttaaaaatatattcccttcccttcattctcattagtaattgttggtaatccc

SEQ ID NO: 405294 - DNA, 4172 bp, Homo sapiens
aagccgtgatgagaggaaaaaagatgatcgttctcgcaaaagagattatgatcgaaaccctcctcgaagagattcatacagagaccggtacaatagaagacgagggcggagtcgcagttatagcaggagtcgaagtcgaagttggagtaaagagaggcttcgtgagagggacagagatagaagcaggactagaagcagaagcagaacacgaagcagggaaagggatctggtaaaacctaaatatgacctggatagaacagatccattagaaaataattatactccagtctcttcggtacctagtatttcatctggccactaccctgtacctactttgagcagcactattacagtaattgctcctactcatcatggaaacaacactaccgaaagttggtctgaatttcatgaagaccaagtggaccataactcttacgtaagaccacccatgccaaagaaacggtgtagagactatgatgaaaagggtttttgtatgagaggagacatgtgtccttttgatcatggaagtgatccagtagttgtagaagatgtgaatcttcctggtatgctgcctttcccagcacagcctcctgttgttgaaggaccacctcctcctggactccccccacctccaccaattcttacacccccacctgtgaatctcaggcccccagtaccaccgccaggtccattgccacccagtctcccacctgttacagatgatatttcttattctttggttttgacaggaccaccacttccagacctatgtatagacacagagtgcatgcacaaaggcccaacttgataggactaacatcaggggatatggatttgccacccagagaaaagcctcccaataaaagcagtatgaggatagtagtggactcagaatcaaggaaaagaaccattggttctggagagcctggagttcctacaaagaagacttggtttgataaaccaaattttaatagaacaaacagcccaggctttcagaagaaggttcaatttggaaatgaaaataccaagcttgaacttagaaaagttcctccagaattaaataatatcagcaaacttaatgaacattttagtcgatttggaaccttggttaacttacaggttgcttataatggtgatcctgaaggtgccctaatccaatttgcaacatacgaagaagcaaagaaagcaatatcaagtacggaagcagtattaaacaatcgctttattaaggtttattggcacagagaaggaagcacccaacagttacaaactacttctccaaagcctttagtccagcagcccattttgcctgttgtgaagcagtcagtcaaagagcggctgggtccagtaccttcaagtactattgaacctgcagaagcccagagtgcctcttcagaccttcctcaggtgttgtctacatctactggcctaacaaaaacagtgtataatccagctgctttgaaggctgcacagaaaaccttacttgtttccacctctgcagttgataataatgaagcacagaaaaaaaaacaggaggcattgaaacttcagcaggatgtaaggaaaaggaaacaagaaattttagaaaagcacattgaaacacagaagatgttaatttcaaaactggagaaaaacaaaacaatgaagtctgaagataaagcagaaataatgaaaactttagaggttttgacaaaaaatattaccaagttgaaagatgaggtcaaagctgcttctcctggacgctgtcttccaaaaagtataaaaaccaagactcagatgcagaaggaattacttgacacagaactggatttatataagaagatgcaggctggagaagaagtcactgaacttaggagaaagtatacagaattacagctggaagctgccaaacgagggattctttcatctggtcggggcagaggaattcattcaagaggtcgaggtgcagttcatggccgaggcagggggcgagggcgagggcgaggtgtgcctggtcatgctgtggtggatcaccgtcccagggcattggagatttctgcatttacggagagcgatagagaagatcttcttcctcattttgcgcaatatggtgaaattgaagattgtcagattgatgattcctcacttcatgcagtaattacattcaagacaagagcagaagctgaagcagctgcagttcatggagctcgtttcaaagggcaagatctaaaactggcatggaataaaccagtaactaatatttcagctgttgaaacagaagaagttgagcctgatgaagaagaatttcaggaagagtctttggtggatgactcattacttcaagatgatgatgaagaagaagaggacaatgaatctcgttcttggagaagatgatttgactgatcattgatctgcatatgctagaactctacctgtgtttcattagtattatctaatgtacttttacatatttgtaaaaacaatttttggtaaaatgtgatgaagatggatttcacaaatagacaaaaaagaagaaaactaccttctgatcttgtattttgaaagattgatgtttgcattttacttcagtaaacaattgctaaagacatcacactagaaacatatgcaatgtttttattacatacttctactggacatcacagaattctttgggttctttgtaatttaatgaataggtctgaaaacttatgaccaatacttgttataacttagaggactttgttttattccaaataaggaatgaatttgcatttaaaatcttaatgaatgttttcaaaactgaatagataacatagtactctaactaaagtctccaagttatgtattataatattacatagtagtatgcttaggctttactatgtattagccttttgttggactgtgtatgtattttaccatatgggttttaatgataatggtgtatgactgctttacatgagtccttatgcatccagatgttataataaagtggaatggtctctttaaaaaaaaaaaaggaaagaaaagagaaaagcaatgacaaaaaaaaaaaaaaaaaaaaaaaaaagccaagacaatgttccttgatttaaaaaaaaaaagaaaagaaaaaagaaaagaaaaaaattaaaatagaccattccagatggtgatctacccttccccccaattatcacaaaaggagctataatcactaacttattcttaataataatggttactggtacccttacaataatgtacaatccaatgtttaaaaattataccacttgagtttggtttgatcctataaattttcaacaaatgtcttaaaatttaaaagcaggctgattagtttggaaccagactgcaagtagagctaacatttggtgaataagaaaacatcacattacattttggatgtatgaaagaaaacttgaccatttgaagatatatgaataaagaaatgtactatagatactactttaggaaaacactgtttgtagtcgtgaaaggtgccaaattggcagaggctcacgtttcttctctttacaccaaacagcagagagagatcatcattgcctgaatttagctttgtgactgcaagagcaagaccagttcctgtctggagacgactgttacaataatatcatcctattattttatgttcactctttatcaatttgaacagatgtttacatgtactataattagcattttatctctacagttctctaagagtacatctgagtccaaagtgtatctgaatgtgtgctctgaccttattcttaaatgttttctccccatactttatagccatttattttttaaacaccttaagaaggaacgaaaaagttctcttggatgacgtatattcaagtctgagccaaattgaggattgtgtctaggaaatctgtaaagccatactactgtgttcattagcatgagcaatttaaaatgaaaatgaattaaaaagttaaacatgagtttggttttaattttggggggatcttaagatatatttctgggagtaggatagccactgaaaataattttgaatagatgataaagtacttttttatgtactgtaatagcttgtgcatttcttctgaatatactttctgatgttgccaaggtcatttacccaaatatttttttaaaaattcttagcccttcaaagccaacaaagaaaataattttcttccaagtga

SEQ ID NO: 405295 - DNA, 4334 bp, Homo sapiens
aagccgtgatgagaggaaaaaagatgatcgttctcgcaaaagagattatgatcgaaaccctcctcgaagagattcatacagagaccggtacaatagaagacgagggcggagtcgcagttatagcaggagtcgaagtcgaagttggagtaaagagaggcttcgtgagagggacagagatagaagcaggactagaagcagaagcagaacacgaagcagggaaagggatctggtaaaacctaaatatgacctggatagaacagatccattagaaaataattatactccagtctcttcggtacctagtatttcatctggccactaccctgtacctactttgagcagcactattacagtaattgctcctactcatcatggaaacaacactaccgaaagttggtctgaatttcatgaagaccaagtggaccataactcttacgtaagaccacccatgccaaagaaacggtgtagagactatgatgaaaagggtttttgtatgagaggagacatgtgtccttttgatcatggaagtgatccagtagttgtagaagatgtgaatcttcctggtatgctgcctttcccagcacagcctcctgttgttgaaggaccacctcctcctggactccccccacctccaccaattcttacacccccacctgtgaatctcaggcccccagtaccaccgccaggtccattgccacccagtctcccacctgttacaggaccaccacctccacttcctcctttgcagccatctggcatggatgctcctccaaactctgcaaccagttctgttcctactgtagtaacaactggcattcatcaccagcctcctcctgctccaccctctctttttactgcagattaccagatacatatgacacagatggctacaatcctgaagccccaagcataacaaacacttccagacctatgtatagacacagagtgcatgcacaaaggcccaacttgataggactaacatcaggggatatggatttgccacccagagaaaagcctcccaataaaagcagtatgaggatagtagtggactcagaatcaaggaaaagaaccattggttctggagagcctggagttcctacaaagaagacttggtttgataaaccaaattttaatagaacaaacagcccaggctttcagaagaaggttcaatttggaaatgaaaataccaagcttgaacttagaaaagttcctccagaattaaataatatcagcaaacttaatgaacattttagtcgatttggaaccttggttaacttacaggttgcttataatggtgatcctgaaggtgccctaatccaatttgcaacatacgaagaagcaaagaaagcaatatcaagtacggaagcagtattaaacaatcgctttattaaggtttattggcacagagaaggaagcacccaacagttacaaactacttctccaaagcctttagtccagcagcccattttgcctgttgtgaagcagtcagtcaaagagcggctgggtccagtaccttcaagtactattgaacctgcagaagcccagagtgcctcttcagaccttcctcaggtgttgtctacatctactggcctaacaaaaacagtgtataatccagctgctttgaaggctgcacagaaaaccttacttgtttccacctctgcagttgataataatgaagcacagaaaaaaaaacaggaggcattgaaacttcagcaggatgtaaggaaaaggaaacaagaaattttagaaaagcacattgaaacacagaagatgttaatttcaaaactggagaaaaacaaaacaatgaagtctgaagataaagcagaaataatgaaaactttagaggttttgacaaaaaatattaccaagttgaaagatgaggtcaaagctgcttctcctggacgctgtcttccaaaaagtataaaaaccaagactcagatgcagaaggaattacttgacacagaactggatttatataagaagatgcaggctggagaagaagtcactgaacttaggagaaagtatacagaattacagctggaagctgccaaacgagggattctttcatctggtcggggcagaggaattcattcaagaggtcgaggtgcagttcatggccgaggcagggggcgagggcgagggcgaggtgtgcctggtcatgctgtggtggatcaccgtcccagggcattggagatttctgcatttacggagagcgatagagaagatcttcttcctcattttgcgcaatatggtgaaattgaagattgtcagattgatgattcctcacttcatgcagtaattacattcaagacaagagcagaagctgaagcagctgcagttcatggagctcgtttcaaagggcaagatctaaaactggcatggaataaaccagtaactaatatttcagctgttgaaacagaagaagttgagcctgatgaagaagaatttcaggaagagtctttggtggatgactcattacttcaagatgatgatgaagaagaagaggacaatgaatctcgttcttggagaagatgatttgactgatcattgatctgcatatgctagaactctacctgtgtttcattagtattatctaatgtacttttacatatttgtaaaaacaatttttggtaaaatgtgatgaagatggatttcacaaatagacaaaaaagaagaaaactaccttctgatcttgtattttgaaagattgatgtttgcattttacttcagtaaacaattgctaaagacatcacactagaaacatatgcaatgtttttattacatacttctactggacatcacagaattctttgggttctttgtaatttaatgaataggtctgaaaacttatgaccaatacttgttataacttagaggactttgttttattccaaataaggaatgaatttgcatttaaaatcttaatgaatgttttcaaaactgaatagataacatagtactctaactaaagtctccaagttatgtattataatattacatagtagtatgcttaggctttactatgtattagccttttgttggactgtgtatgtattttaccatatgggttttaatgataatggtgtatgactgctttacatgagtccttatgcatccagatgttataataaagtggaatggtctctttaaaaaaaaaaaaggaaagaaaagagaaaagcaatgacaaaaaaaaaaaaaaaaaaaaaaaaaagccaagacaatgttccttgatttaaaaaaaaaaagaaaagaaaaaagaaaagaaaaaaattaaaatagaccattccagatggtgatctacccttccccccaattatcacaaaaggagctataatcactaacttattcttaataataatggttactggtacccttacaataatgtacaatccaatgtttaaaaattataccacttgagtttggtttgatcctataaattttcaacaaatgtcttaaaatttaaaagcaggctgattagtttggaaccagactgcaagtagagctaacatttggtgaataagaaaacatcacattacattttggatgtatgaaagaaaacttgaccatttgaagatatatgaataaagaaatgtactatagatactactttaggaaaacactgtttgtagtcgtgaaaggtgccaaattggcagaggctcacgtttcttctctttacaccaaacagcagagagagatcatcattgcctgaatttagctttgtgactgcaagagcaagaccagttcctgtctggagacgactgttacaataatatcatcctattattttatgttcactctttatcaatttgaacagatgtttacatgtactataattagcattttatctctacagttctctaagagtacatctgagtccaaagtgtatctgaatgtgtgctctgaccttattcttaaatgttttctccccatactttatagccatttattttttaaacaccttaagaaggaacgaaaaagttctcttggatgacgtatattcaagtctgagccaaattgaggattgtgtctaggaaatctgtaaagccatactactgtgttcattagcatgagcaatttaaaatgaaaatgaattaaaaagttaaacatgagtttggttttaattttggggggatcttaagatatatttctgggagtaggatagccactgaaaataattttgaatagatgataaagtacttttttatgtactgtaatagcttgtgcatttcttctgaatatactttctgatgttgccaaggtcatttacccaaatatttttttaaaaattcttagcccttcaaagccaacaaagaaaataattttcttccaagtga

SEQ ID NO: 405296 - DNA, 3261 bp, Homo sapiens
agtaaggtcagttcaagcagaaggagcattgctaccaaaggattggagaatgaatgcaatagggtatgtttcagtactggaagttgcaaatgattgtgttaaattgagggacagcaaccagtttcctcctgtgccatgctcttgagtgtggcttctgctttagtcactacaaatattagtaaatgtattcaacaactaatgctttctcagtgatgtagtaatagtaatgtttttctttttgacattttcatgtttttctttacttttttttctataggtatttggtgttcatttttttaaattttagagcttattatttatactctacctttcaaatcaccaaatatgatttcgttattataagtataaaatacatttagttcagtgtgttttgaagctgaagtttaacagtagtgctttaaagttgagtcttatagaaaataggatatcatgaacggctgatatatatttttaaaagttgaatttgtattggtaggtgttgtctacatctactggcctaacaaaaacagtgtataatccagctgctttgaaggctgcacagaaaaccttacttgtttccacctctgcagttgataataatgaagcacagaaaaaaaaacaggaggcattgaaacttcagcaggatgtaaggaaaaggaaacaagaaattttagaaaagcacattgaaacacagaagatgttaatttcaaaactggagaaaaacaaaacaatgaagtctgaagataaagcagaaataatgaaaactttagaggttttgacaaaaaatattaccaagttgaaagatgaggtcaaagctgcttctcctggacgctgtcttccaaaaagtataaaaaccaagactcagatgcagaaggaattacttgacacagaactggatttatataagaagatgcaggctggagaagaagtcactgaacttaggagaaagtatacagaattacagctggaagctgccaaacgagggattctttcatctggtcggggcagaggaattcattcaagaggtcgaggtgcagttcatggccgaggcagggggcgagggcgagggcgaggtgtgcctggtcatgctgtggtggatcaccgtcccagggcattggagatttctgcatttacggagagcgatagagaagatcttcttcctcattttgcgcaatatggtgaaattgaagattgtcagattgatgattcctcacttcatgcagtaattacattcaagacaagagcagaagctgaagcagctgcagttcatggagctcgtttcaaagggcaagatctaaaactggcatggaataaaccagtaactaatatttcagctgttgaaacagaagaagttgagcctgatgaagaagaatttcaggaagagtctttggtggatgactcattacttcaagatgatgatgaagaagaagaggacaatgaatctcgttcttggagaagatgatttgactgatcattgatctgcatatgctagaactctacctgtgtttcattagtattatctaatgtacttttacatatttgtaaaaacaatttttggtaaaatgtgatgaagatggatttcacaaatagacaaaaaagaagaaaactaccttctgatcttgtattttgaaagattgatgtttgcattttacttcagtaaacaattgctaaagacatcacactagaaacatatgcaatgtttttattacatacttctactggacatcacagaattctttgggttctttgtaatttaatgaataggtctgaaaacttatgaccaatacttgttataacttagaggactttgttttattccaaataaggaatgaatttgcatttaaaatcttaatgaatgttttcaaaactgaatagataacatagtactctaactaaagtctccaagttatgtattataatattacatagtagtatgcttaggctttactatgtattagccttttgttggactgtgtatgtattttaccatatgggttttaatgataatggtgtatgactgctttacatgagtccttatgcatccagatgttataataaagtggaatggtctctttaaaaaaaaaaaaggaaagaaaagagaaaagcaatgacaaaaaaaaaaaaaaaaaaaaaaaaaagccaagacaatgttccttgatttaaaaaaaaaaagaaaagaaaaaagaaaagaaaaaaattaaaatagaccattccagatggtgatctacccttccccccaattatcacaaaaggagctataatcactaacttattcttaataataatggttactggtacccttacaataatgtacaatccaatgtttaaaaattataccacttgagtttggtttgatcctataaattttcaacaaatgtcttaaaatttaaaagcaggctgattagtttggaaccagactgcaagtagagctaacatttggtgaataagaaaacatcacattacattttggatgtatgaaagaaaacttgaccatttgaagatatatgaataaagaaatgtactatagatactactttaggaaaacactgtttgtagtcgtgaaaggtgccaaattggcagaggctcacgtttcttctctttacaccaaacagcagagagagatcatcattgcctgaatttagctttgtgactgcaagagcaagaccagttcctgtctggagacgactgttacaataatatcatcctattattttatgttcactctttatcaatttgaacagatgtttacatgtactataattagcattttatctctacagttctctaagagtacatctgagtccaaagtgtatctgaatgtgtgctctgaccttattcttaaatgttttctccccatactttatagccatttattttttaaacaccttaagaaggaacgaaaaagttctcttggatgacgtatattcaagtctgagccaaattgaggattgtgtctaggaaatctgtaaagccatactactgtgttcattagcatgagcaatttaaaatgaaaatgaattaaaaagttaaacatgagtttggttttaattttggggggatcttaagatatatttctgggagtaggatagccactgaaaataattttgaatagatgataaagtacttttttatgtactgtaatagcttgtgcatttcttctgaatatactttctgatgttgccaaggtcatttacccaaatatttttttaaaaattcttagcccttcaaagccaacaaagaaaataattttcttccaagtga

SEQ ID NO: 405297 - DNA, 2777 bp, Homo sapiens
  misc_feature (2688)..(2688): n is a, c, g, or t
  misc_feature (2713)..(2713): n is a, c, g, or t
  misc_feature (2767)..(2767): n is a, c, g, or t
  misc_feature (2772)..(2772): n is a, c, g, or t
aagccgtgatgagaggaaaaaagatgatcgttctcgcaaaagagattatgatcgaaaccctcctcgaagagattcatacagagaccggtacaatagaagacgagggcggagtcgcagttatagcaggagtcgaagtcgaagttggagtaaagagaggcttcgtgagagggacagagatagaagcaggactagaagcagaagcagaacacgaagcagggaaagggatctggtaaaacctaaatatgacctggatagaacagatccattagaaaataattatactccagtctcttcggtacctagtatttcatctggccactaccctgtacctactttgagcagcactattacagtaattgctcctactcatcatggaaacaacactaccgaaagttggtctgaatttcatgaagaccaagtggaccataactcttacgtaagaccacccatgccaaagaaacggtgtagagactatgatgaaaagggtttttgtatgagaggagacatgtgtccttttgatcatggaagtgatccagtagttgtagaagatgtgaatcttcctggtatgctgcctttcccagcacagcctcctgttgttgaaggaccacctcctcctggactccccccacctccaccaattcttacacccccacctgtgaatctcaggcccccagtaccaccgccaggtccattgccacccagtctcccacctgttacaggaccaccacctccacttcctcctttgcagccatctggcatggatgctcctccaaactctgcaaccagttctgttcctactgtagtaacaactggcattcatcaccagcctcctcctgctccaccctctctttttactgcagattaccagatacatatgacacagatggctacaatcctgaagccccaagcataacaaacacttccagacctatgtatagacacagagtgcatgcacaaaggcccaacttgataggactaacatcaggggatatggatttgccacccagagaaaagcctcccaataaaagcagtatgaggatagtagtggactcagaatcaaggaaaagaaccattggttctggagagcctggagttcctacaaagaagacttggtttgataaaccaaattttaatagaacaaacagcccaggctttcagaagaaggttcaatttggaaatgaaaataccaagcttgaacttagaaaagttcctccagaattaaataatatcagcaaacttaatgaacattttagtcgatttggaaccttggttaacttacaggttgcttataatggtgatcctgaaggtgccctaatccaatttgcaacatacgaagaagcaaagaaagcaatatcaagtacggaagcagtattaaacaatcgctttattaaggtttattggcacagagaaggaagcacccaacagttacaaactacttctccaaagcctttagtccagcagcccattttgcctgttgtgaagcagtcagtcaaagagcggctgggtccagtaccttcaagtactattgaacctgcagaagcccagagtgcctcttcagaccttcctcaggtgttgtctacatctactggcctaacaaaaacagtgtataatccagctgctttgaaggctgcacagaaaaccttacttgtttccacctctgcagttgataataatgaagcacagaaaaaaaaacaggaggcattgaaacttcagcaggatgtaaggaaaaggaaacaagaaattttagaaaagcacattgaaacacagaagatgttaatttcaaaactggagaaaaacaaaacaatgaagtctgaagataaagcagaaataatgaaaactttagaggttttgacaaaaaatattaccaagttgaaagatgaggtcaaagctgcttctcctggacgctgtcttccaaaaagtataaaaaccaagactcagatgcagaaggaattacttgacacagaactggatttatataagaagatgcaggctggagaagaagtcactgaacttaggagaaagtatacagaattacagctggaagctgccaaacgagggattctttcatctggtcggggcagaggaattcattcaagaggtcgaggtgcagttcatggccgaggcagggggcgagggcgagggcgaggtgtgcctggtcatgctgtggtggatcaccgtcccagggcattggagatttctgcatttacggagagcgatagagaagatcttcttcctcattttgcgcaatatggtgaaattgaagattgtcagattgatgattcctcacttcatgcagtaattacattcaagacaagagcagaagctgaagcagctgcagttcatggagctcgtttcaaagggcaagatctaaaactggcatggaataaaccagtaactaatatttcagctgttgaaacagaagaagttgagcctgatgaagaagaacagagagagatcatcattgcctgaatttagctttgtgactgcaagagcaagaccagttcctgtctggagacgactgttacaataatatcatcctattattttatgttcactctttatcaatttgaacagatgtttacatgtactataattagcattttatctctacagttctctaagagtacatctgagtccaaagtgtatctgaatgtgtgctctgaccttattcttaaaaatgggtttttnttcccccattacctttttattaagncccatttttatttttttttttaaaaaaccaccccttttaaaggaaaaagggganacccnaaaaa

SEQ ID NO: 405298 - DNA, 720 bp, Homo sapiens
gttttgctaactatactatagacctataagatgtgaacattaagagcagctgggcaaaagctatacaggagttctcaactattttttaatcttttctctaaaagtagtttagaattaaaagttaaacacaaaaatttccactgatgaaggcttcccataaactatcaaatatggttataagaggaaaaaaggaaacacagaatattgtgtaaagcaagcttgtccaacccgcagcccgtgggctggatgcggcccaagacggctttgaatatggcccaacacaaattcataaactctcttaaaacattgtaagaatttttttgcaattttttttttattggttttttagttcatcagctattgttagtgtattttatgtgtggcccaagacaattcttcttccagtgtggcccagggaagccaaaagactggacacccctgggaaagatatcacaaattgttctagaaagcccattttgaaaatgcgccaatgcacatcaaacttagcataataaagttacactgccagacatatgaactcacaaaaagaattagctccattatgaaaaacagctaaatcatctatataaaatgctgtctatctagaaaataaacatgaatccaaaacccttacattgttctaaaccacactaatgttcccaatgagacaagaaaaaaacagtcatgaattaatacagaaaaagatatttaaaaaagaaa

SEQ ID NO: 405299 - DNA, 638 bp, Homo sapiens
gcccctgcagcaggctccctggctctgtccctctctgtctagtgtgcgtcctgcaaggctgttgcctcagtgtggttctgccagcattcctgggggcgtcactgaggggtagcccagttggcacctccaaccatggacatcttggagtcaggaacgggggccttgcatgctctggggaccaacaaggcctgctgtcattagggtccctgatcctgggtgacactaacaagaatgcaggagcccgagtttggggcttcacattcatacttgagtatggctgtcgggccccccgtggcctgtaaacaagctgtgatggagcacgtgcttgctgtgtttaggcatcacgcttggcgcttggcacacattctcttctttcatcctcaccactctataggacatgcgcctgcattccattgtccctttgcaaaagacattctcaacaccacgacgccaaaggaatcctgtgtgtctgtgttgtatgtcatcaaggagaaaccacctttgtctgcagaaagatctcatggctaccctcaccaccctgcccctatgaagcctgagaaccagctggctcagcagggaaggccgcaaagtcaggagcgaccaaagtccaagctccaacgtgcctctcgttctccaaa

SEQ ID NO: 405300 - DNA, 451 bp, Homo sapiens
tgagctcgggtacccaagttattagaaaaataaagaaaaaaaaaaagctttcttcactaaaaattctgattctgtacatctgagttgcttgaatatcaatatatttaatcttaccaaatggtttttattcacacctaaatttgacaaagttaacctgttcccttatgcacaccaccatcttacataaattcattattggcacccttttcctttttcagatcccttccctgaaagtattatattttatacttaggccatttgtttaatggattttgtatgcatgtatgttataggaaaataaaataggtttgccttcttcatttctttcagatttggagtcaaaatatggacctgagaaaatatctccagaaaatgatatttttgaaataaatttacccaaacatgttataaagcaaataagtaaaacacttggcctcgaggcctttttttt

SEQ ID NO: 405301 - DNA, 440 bp, Homo sapiens
gtgcgggtgggcgagagcgaggcgctcagaggaggaacccggggcgcagacggaatctgccagatccttaggcgggagaagcccgaggaagattgaccaattttgtaattctagaaacatggtccatggatcagtgacattcagggatgtggccattgacttctctcaggaggagtgggagtgcctgcagcctgatcagaggaccttgtacagggatgtgatgttggagaactacagccacctgatatcactgggaagttccatttctaagccagatgtgattacattactagagcaagagaaagagccctggattgttatttggagtcaaaatatggacctgagaaaatatctccagaaaatgatatttttgaaataaatttacccaaacatgttataaagcaaataagtaaaacacttggcctcgaggcctttttttt

SEQ ID NO: 405302 - DNA, 422 bp, Homo sapiens
ggtgataagggtcatcttctatgaatagctttcttcctggaactgactggacttcacaaccaattttgggctagtgtggagagatcagctgtgagaaacatccattgatttgctcaggctgccctttgtatcttaatgcttcaggttttgttatcctgcgcctttcttctgtcttctttcctcataagttttttagatacaattttattgccaataattaaagagtgagaatgagcggcaatgggctggtatggttgcattcaaactccaaagttcacattttggaatattgatttttgcttgagaacaacttacctaaaaaccatgggaatttggcagggagggatgtgatggggcatatgttgagttctttcaaggaatttaactttcatttctgaagaagtaaaaactgtggcatggtg

SEQ ID NO: 405303 - DNA, 388 bp, Homo sapiens
aggaacattatgtaatcttctttaaaaataagataagctgctctacccagtaaaaccctaggtttctgcagccatatgacagtctgatatgcatgctatggtcggtcacggtggctcacgcctgtagtccagtactttggaaggccgaggcaggcagatagcctgaggccacgagatctagaccagcctggccaacacggtgaaaccctgcctctactaaaaatacaaaaattagctgggcatggtggcgtgcgcctgtaaccccaactactcaggaggctgaggcaggagaatcgcttgaacctgggaggtggaggttgcagtaagctgagatcgcgccactgcactccagcctgggtgacagaatgagaatctgtctcaaataaag

SEQ ID NO: 405304 - DNA, 515 bp, Homo sapiens
  misc_feature (8)..(8): n is a, c, g, or t
  misc_feature (13)..(13): n is a, c, g, or t
  misc_feature (17)..(17): n is a, c, g, or t
ttttgaanccccntttnactactactatgctgcgagaagacgacagaatgggcatgtaacagaaccaattttaccacaggctaaatgatagaaacaagacttaagttcctatggcatatttctagtcacaaaaacatcaccaaacttttaataaagaccaaaacatttctaatattaaacattgaaataaatgtgagttatgcatacatttaagaaacagtaacaaaaacaagtgagataattattcactcaatgatttcagttcaagggtatgggtggccagagcctatgcagctcaggatgcaaggcagacactgacaccagacaggacgtcatcccagagcagggggcattcacacacgcgcacacacacgcacacgcacacacacacagttactcagactgggaccatttggacatgccaatttacataacatgcagtacgtgtttgggatgtggggggaaccagagtatccagagaaaacccatgcagacttggggaggatgtgctaact

SEQ ID NO: 405305 - DNA, 488 bp, Homo sapiens
gaaactgcgagtttaagcaaaacggcatgtaacagaaccaattttaccacaggctaaatgatagaaacaagacttaagttcctatggcatatttctagtcacaaaaacatcaccaaacttttaataaagaccaaaacatttctaatattaaacattgaaataaatgtgagttatgcatacatttaagaaacagtaacaaaaacaagtgagataattattcactcaatgatttcagttcaagggtatgggtggccagagcctatgcagctcaggatgcaaggcagacactgacaccagacaggacgtcatcccagagcagggggcattcacacacgcgcacacacacgcacacgcacacacacacagttactcagactgggaccatttggacatgccaatttacataacatgcagtacgtgtttgggatgtggggggaaccagagtatccagagaaaacccatgcagacttggggaggatgtgctaact

SEQ ID NO: 405306 - DNA, 412 bp, Homo sapiens
cgataaatggtaatacaaaaaaaaatgccctatatcaaattttaagcggaataaatgcatgcgaattttcgaaaagcaataaagtggtttttacttatttgaattgcgttacattgaaatcccctgttgggggaatttgtgggcgagagctggaaattattggcccatttaagggagcagcaatcttactgcagtgcagcgtttatgacacttgaaaacagattggagagtgggttttgctcgggcgacttgattgtctttcaagttggcgttaagagttttcaacaggtctccttccctgccagccgggaccccgggggtccctcggagcagggcgggtgggaccgctcggcctccttctctcgcccgcacgggcgccgccgcagacccggagcaggcacccggcggccgc

SEQ ID NO: 405307 - DNA, 426 bp, Homo sapiens
gaccccatccacccttcatcagtttgtatcttcaccactatctgaccttattgctgctgacactccttgtcacaggatgaaatcccaagatgatgcaggtgttcctcctagagatgttaagtgcctgcttgggtggaaaccgaattggagttaaattcaagaagccctgcagacaggactactagtgtctctttctggtttggccacaggacaatgaaaccctggaagacatctgttaattggtgtgctcctcttctttttagaagagtggcttttttgcagtgggaggtgatttggatgccggacattcttggcccacctcccacttcactgcagattcaacatgcacataaaaataaggaacacaaagccacacagccaaagcagagccacacagacagggcaataaaaggtttgagactcaaa

SEQ ID NO: 405308 - DNA, 380 bp, Homo sapiens
agaagcagtaagaaacatcgaggaatttcccaacatatcagggaatttgttatttcttctaaaacataaggaagtacgtggcaatataaatggcaaatgtgcggggtgcggtggctcacacctgtaatcccagcactttgggaggccaaggtgggcggaccaagaggtcagcagtttgagaccagcctgcccaacatggtgaaaccctgtctctactaaaaatacgaaaattagctgggcgtggtggcgggtgcctgtaatctcagctactcaggaagctgaggcaggagaatcgcttgaaccttgggggcggaggttgcagtgagccaagatcgtgccattgtactccagcctgggcaatagagcaagactctgtctca

SEQ ID NO: 405309 - DNA, 142 bp, Homo sapiens
agagataaaaataaggcagtatgttattttaaataatcctaaatgtagcttccaaccacttttagactcctgcacagagatagatgcagtactattgtaaaaaacccaatgttgcgaatgtggcatctctccccagcctgac

SEQ ID NO: 405310 - DNA, 178 bp, Homo sapiens
aataagatcagacacctacctcactagattctggaggttaagtgaactaatatatgtgaaccattcttagcactgagccacacatataatggggagtcaataaatgttagctctccccacccccaacccccaacccactgcaacctgcctcccaaggcctaccgtgtacttgcgaatt

SEQ ID NO: 405311 - DNA, 368 bp, Homo sapiens
ttggctgcaagactgtctagtagcctgcacttccaagtctcgctgccttctgggtgtggccaaagccctgttgctgcctctgggatccctgctcctccccatcccctgccagctcactctccagcctgacccaccgcgtttgctcttggtttatcagctcatgcctgtgatgcttcatcccagtgggtgaaagacaagattctggctgctccctgcctcaccccctcctcattcctcactggtgattcctaccgaggtccagggtaggccagggcctatggggagacctactatggtttgagggtagccaccctcctgcaggtgtgatagcaaggaggaacccacgtggggcccgggaagtcctatgg

SEQ ID NO: 405312 - DNA, 644 bp, Homo sapiens
gtcaaaatcttggtttccagctatgtttcccataaatgaagtttccagatataagccaaatgcttaaacaaaattgctgactacaggatcattttgtaatactgtatgggtgatttataagctgtgtttttttaaagaatgaagtcatctagtggctttgaactttctccccataggtgaagttataagtccagcaagctcctcagtggctcctttctcaacagtcatgtgagagaagccagcctcaattaagccccacggcattcactgatggaataaattaccttctattgtatatgtctagagtgatgcttgctataaccatccatggaagaaatgagaacacagtcactcaaaccattttctgggttcagtaccgtgttgtccagatgaggaacagtggctgcaaaaggccgtttgctatgcagagtgtgagctttcacctccagcctcagcctcgcctgggagctggttagaaatgcaaattctcagacctactgcagaccttttgaataataatttgcatttaaatgagccctcagggaattcgtatgcaagtttaatcagtattggtgtgaagcaatggattcaaaaattatagcctctcgcagcacacacaaggatacttagggacatacatgcac

SEQ ID NO: 405313 - DNA, 456 bp, Homo sapiens
aatctggaattagctcaaaggttcatcgacaaactgtggcatatccatggaatagtataatactcaacaataaaacagtgatgaacaattgatacactctatagtagggataaattcaaaataaatactctgagtgaaagaagccagataataatgagcacacagtgtatgattttattatagaaaatcttagaaaatgcaaactaatgtaccacgacaaaaaacagattagtggcagcctgaagatagaaaaaggggatgtcagggaaggtattgaaagaaaacattgcaaaggagcacaagggaacattgtagggtacgaattcttaattattatgatagtggtgattgtttcacaagtgtatatatatgctgaaatttaacaaaatttacacttaaatatgtgcagtttattgtatgtcaaatatagacaaataaaggtattaaaaacaaacc

SEQ ID NO: 405314 - DNA, 357 bp, Homo sapiens
caaatgatggatagtccaatggatttgaggatgtcacatatcttttccaagactaatggttaattaggctgaattaaattatgtgacaaaaagcttagtttctccactgtgaacactgtaacttagtggctaggcttattcatctactttgtggctctgaacagctctccagatagcttagaagtttttggacacaaaaactgagtcctatattatgtttctactccaaagcactaagtcatatgtcttgtaagtgctcaggaaatgctaattaaatgaataaattaactcagtacattctatgctgtattatatttatataaaagggacaaattttctttgctttattcattttca

SEQ ID NO: 405315 - DNA, 564 bp, Homo sapiens
tatccaagacaatacatctttgcaaagctgggttttctgtggctgctgtgataaaagccaaatgctgcggaaatattaatgtgaaacaggaaatgagagtggcagtgtccaacacgatcccaaggcttgaaaagtagtataggcacacacatacggttagtaattatgactttaaaggatgtaaaatattttttctctcagtttatgtatattattttttcaaacaacttctaagtaaatactcagttgtttgaacctaactactaactactgaaacctaagggaattgtgaaaaaattactaactactgaagcctaagggaattgtgaaaaaattaactcagacactaagggctccatgaaaccaagtttcagaatctttgccttaaccaagaagtaacaaaacagtgtaagattcaccaaggaaagccatgtgaccttgaagaaataaaacaaagacaataacacaaacatatcaaccaggaagaggaatttgggttgttaaaaccatttttaaaggtcactcttagcttaatccttcaaatcccacacaatgccttctgga

SEQ ID NO: 405316 - DNA, 361 bp, Homo sapiens
aagcaactgctggagccacataggtgaatttgttatgctggaagggggtggtcacctggcactgtgagtggctcagagatccctaagtgatcagaattgtaaacgacccaggggaaaaccttgggaaaaaactcaccctcttagatactgagtttctaggggaggagagtggcttagaagcccctaaaatgggtcagatgagaaaaggacagggccagagagggggagggagttgcccagagacacagagcaaccgtgcaaagctggctagagccagagcctgcgccttccagttccttgggtacaggctgtccacgcaggcatccctggtgggagtgagggtcacaatggctgtgacctt

SEQ ID NO: 405317 - DNA, 313 bp, Homo sapiens
tgactgtgatcatcctgaaggtgtttccctcaatgctgagtgcttggagccgctttagaattgctttcactctctgttaatttggagaacaaagaatcaataagtagaaggagattgggaaattagtgatcggggacggtgcagagttcataaataatttaaaatatacagagttctggcttttcaacagagattttaataaaagatgaacaaggtcatcttcttccttctgatgaaagttacccatctgtagtgccatggcggatgctgtgtacaagagctgaaatggtggttcctgttaactttgagagct

SEQ ID NO: 405318 - DNA, 783 bp, Homo sapiens
gcggccgccgcggccaccgcccactcggggctggccagcggcgggcggccggggcgcagagaacggcctggctgggcgagcgcacggccatggccccgtggctgcagctctgctccgtcttctttacggtcaacgcctgcctcaacggctcgcagctggctgtggccgctggcgggtccggccgcgcgcggggcgccgacacctgtggctggagggtaaggcgagggcggcgggtttcttgccgtcgccaactcgcggggaacgcagcgcgcacaggtgctcgcggggaggcgagcccgcgccaacctgtctgctcttcgcggggtccgcggccggcctgggtctcactcctcccgcgcatcctcctggtttccctccccggacgcgtgtcctccggccctggccgagatgaaagcggctgcccgaccccggctttgtgttgctaatgagggagtggggccagccagcagaaacagtgggctgtacaacatcaccttcaaatatgacaattgtaccacctacttgaatccagtggggaagcatgtgattgctgacgcccagaatatcaccatcagccagtatgcttgccatgaccaagtggcagtcaccattctttggtccccaggggccctcggcatcgaattcctgaaaggatttcgggtaatactggaggagctgaagtcggagggaagacagtgccaacaactgattctaaaggatccgaagcagctcaacagtagcttcaaaagaactgtaagtcacactggggaacgtgctcctgaa

SEQ ID NO: 405319 - DNA, 573 bp, Homo sapiens
agacatccgctcttcttttcctccgggaaaagaaacgggaagtggccgtgggccggtgaattccgtgtagtggccaagcttgttccaaagagggggaggtgttgacagtctcttgcccactgaagcgtgccagacagagtgctaggcatgggggcagaggtgaatcagatgacagccacctctcaccacgaggagtggctgaaagtgtgactggactacaggcaatcctggccttggcagggagtggggccagccagcagaaacagtgggctgtacaacatcaccttcaaatatgacaattgtaccacctacttgaatccagtggggaagcatgtgattgctgacgcccagaatatcaccatcagccagtatgcttgccatgaccaagtggcagtcaccattctttggtccccaggggccctcggcatcgaattcctgaaaggatttcgggtaatactggaggagctgaagtcggagggaagacagtgccaacaactgattctaaaggatccgaagcagctcaacagtagcttcaaaagaactgtaagtcacactggggaacgtgctcctgaa

SEQ ID NO: 405320 - DNA, 110 bp, Homo sapiens
ccaagaccaagaatgaaagattggtttaacatacaaaaatcagtcaatattccatattaataaaatgaagaaaaagaaacatatgattttctcaaaagatacagaaggta

SEQ ID NO: 405321 - DNA, 366 bp, Homo sapiens
tactgccttcactgcaatcttcctaatcccctcaagatctctaaggtcgatattacgatcctcattttaaaaatgaagaatgttggccaggcgtggtggctcatgcctgtaatcctaacacttcaggaggctgaggtgggtgaatcacttggggtcaggagttcaaaaccagcctggccaacatggtaaaaccccatctctactaaaaatacaaaaattagccaggcatggtggtgggtgcctgtaatcccagctacttcagaggctgaggcaggagaatcacttgaacctgggaggcggaggttgcagtaaccagagatcatgccactgcactccagcctgggcaacagagcaagactttgtctc

SEQ ID NO: 405322 - DNA, 498 bp, Homo sapiens
gcatgattcaacattcactcaacaaaatatttattgagcgcctgccaatgctagacccacatgctggccagcatccctgcctgtgcaagctctggatgagctgtgtgcccctgccacccacacccccactccctgccagcctggcctcagggcctctgatccatgtgcactggagtggtgatgactgacagggccactggggcatttccatgttaacagcagctgccactggcaaaagaagtgactcgccaatggtggcatctcagatgtgggcccaggagtctggggagctactttgaacagggctatccattcattgtcccaccaaaggctatggagcccacccaccatgtgctggagtagtcaagggaaataagacactctccttgtcctcgttaactcaatcaacaagcatttgcagagcaccgcctgtatgccggcgctgtccgaagtgctgaagatacagcaatgagcaaaccaaaagccatggacatcgga

SEQ ID NO: 405323 - DNA, 415 bp, Homo sapiens
ctgcacttcctacttatctcttacagcctctcacacagccctgtgttgattcagtggcttagaggagtacacagagctcaccatctccacctttgagcatgagaaggggaaagcttaaacctcctcagcagaaagcacctccactaaaggtccaacctctagcagcaagactgagcctaggaacccactggagtcctcagaagaatgcccattttctctttgtctccaggccctagccttactctgcaggctcagctcacacagtgtcctgctgagtctgccactactatcatgcagcctaaccccaccagtccccacttaacactgggagatttctctgtaattatccccactgccatttctgagtgagattggtagagggtttataaaagattgctgagatgtagttgactgg

SEQ ID NO: 405324 - DNA, 1418 bp, Homo sapiens
tcctgcacccctgctcttgggacacagtgccctccggctctaataggccaggagttgggggggcaactggctctgctccctggccctggctccccctgctccctggggctgcccgaggtgaaggtgacaggtgggggaggcaggtggagaattgggccagtgagctcatggcaaaggcgcccagctgggcaggggtgggtgctctggcctataaagcccccgaggccctgtggcctgcagaggcggttatggacggcaccatggaggactccgaggcggtgcagagggccacagcgctcatcgagcagcggctggcacaggaggaggagaatgagaaactccgaggagacacacgccagaagctgcccatggacttgctggtgctggaggatgagaagcaccacggggctcagagtgcagccctgcagaaggtgaagggccaagagcgcgtgcgcaagacgtccctggacctgcggcgggagatcatcgatgtgggcgggatccagaacctcatcgagctgcggaagaaacgcaagcagaagaagcgggacgctctggccgcctcgcatgagccgcccccagagcccgaggagatcactggccctgtggatgaggagaccttcctgaaagctgcggtggaggggaaaatgaaggtcattgagaagttcctggctgacggggggtcagccgacacgtgcgaccagttccgtcggacagcactgcaccgagcttccctggaaggccacatggaaatcctggagaagcttctagataatggggccactgtggacttccaggatcggctggactgcacagccatgcattgggcctgccgcgggggccacttagaggtggtgaaacttctgcaaagccatggagcagacaccaatgtgagggataagctgctgagcaccccgctgcacgtggcagtccggacagggcaggtggagattgtggagcactttctatccctgggcctggaaatcaatgccagagacagggaaggggatactgccctgcatgacgctgtgaggctcaaccgctacaaaatcatcaaactgctgctcctgcatggggctgacatgatgaccaagaacctggcaggaaagaccccgacggacctggtgcagctctggcaggctgatacccggcacgccctggagcatcctgagccgggggctgagcataacgggctggaggggcctaatgatagtgggcgagagacccctcagcctgtgccagcccagtgaatgcgtgccccagcccagccagctacccagcccctctctgtgtgcagccggagggtcctaagaatggctcccggagctaactgagggcccagccttttttctgcatgatccaggagcacataccacaaactaccacaataaaaaagctgtttttgctaaaaaaaaaaa

SEQ ID NO: 405325 - DNA, 592 bp, Homo sapiens
tttggttaggaagtaggaattttatgaggacttttattgtaaactgtgtcaagggaaaaatcatcttatactaaacgtctttattgccaaactagaataccttcacaatctgaactttctctagatgggcacagatcatgaataactcagaaaccattagcatattgtgtgcttaattaaggctggaaagtgctgaggctttttgcaggcgcagttagcaggcgaactggtcagcagggtttctggggaacgtagatttgcgtgacaggggccctgtgttgctaaggaattaatgcaggcactgagaaaagtctcagcgtcagacactcctccacctcccgggtcctgcttccctccctctcccctttccaggcaactcacagtttaggggtgtggttgtgtgtgttcaagctcttgggttttacatataaatgcctgagacttttctgcagggtttaaaaactaacatcttgtcttacagctcttttaggatttgtcttttagaatctccagtcctcacaggaaaaccccccaattaaaaaaataaaagaataaagaataaaaagaataccactactactataaaaaaaaa

SEQ ID NO: 405326 - DNA, 334 bp, Homo sapiens
tcactgcaacctccgccttccaggttcaagcgattcttctgcgtcagcctcctgaatagctgggactacaggcgctcgacaccacgaccagctcatttttgtatttttagtagagacggggtttcaccaggttggccaggctggtctcgaactcttgctcaggtgatccgtccaccttggcctcccaaagtgctgggattacaggtgtgagccactgtgcctggccagcggtcccctttttacagtatatcaaatttcccttgttacccacttcagtaatgttttacctaactcatttctaaccactcaattgattatttcctgtgagctgtca

SEQ ID NO: 405327 - DNA, 1095 bp, Homo sapiens
actgcaacctctgcctcccaggttcaagcaattctcctgcctcagcctcccaagtagtggggaagccgagacgggcactccctctgccggccggcagcgtggccctgagcatggcaagggggtctgtctctgccgatgctccttccgcggcactgactctgcgccgtgtcacatggtttttgaatcacactgcagctgctttccatttttatatatatataaatatatataaatatatactttttaaaaataatttataaatcttaccaaaacttatgctaaatatactttccagtatgaacgcacaggagagtcccatcagcaggcggcattggagtctaggagctcagctgtgtgtccatcaacacacaaattcgtaaaaaacacacatggcctcgccatcgtgggtaaaatcggccccacagcacgtctgcaccagcgggccgttactcccatgccgttcttctgtgtaatattaagaactgaatgtgaagtttatagctagcctgggtgtaccttttaagaattttgtaaaccgtttgtctgtcttttgttactgttttatggtgccaagtatcctacgttacaacaataatatcatgggagaaatagaaatagcctagtttgcttccaatagaaactgcttttaacatgggctgtatataaaaatattaaagagaaacaaaactgtacatttcctcattgctccgctacagacaacccatgtcataaccttgttgcaaatatttttctcctatagcagtaagtacagcattagaaggtgattagagagtctgttgatgaaacacaaatgtatgttttattgattttactttagaacactacagagttcctggaccgggtgaaggcattagctgggtgtttgtgtgggataaatactaccactgcaagtgactgctgtccgctgcggaatctgttcttggtggaagcacaggtccgtgtcgctgctgtggttgccgctgtccgcggttcaacacggagtccgccccgcgggtttcagctgttggtcgttctgaggggcctttggaagtgaccggtctggttcctaagcaataaaattgaccgtggtgaaaa

SEQ ID NO: 405328 - DNA, 439 bp, Homo sapiens
ttccctcccgccctggtctcatgccttgctctgtgttgaggaaaacagtggaaggagcgtggccccttactggcactttcaatgccatccgcctcccgggatgcactttttaaggcaaaacctttcaatgaagaagcatgttttgctgtcggcagagggatccgtgttggaatccggggtgcgcgggccctcaaggttgccccggatggcgggtgacagtgctgtggggctttgccctgtggcttccgccgtcggcacacaaggagctgctggagtgccgtcacagcgccaccccctcgatgcccacagagctgcagcctctgcagagtgtcagctccttcacactgtccaacttgatctcagcgattttttgtcataacacgtagaaactgtcagagcccgttttaaacattgtgcttttctgtctgcaaagtcatta

SEQ ID NO: 405329 - DNA, 599 bp, Homo sapiens
acctcgtccttctggtctcttccagctaagaagtatagaaaggtcgctggcaaagagatctactcggataccttagagagcacgcccatgctggagaaggagaagtttccgcaggactacttccccgagacacagttaccgacaggaaatgaacacagaggctccccggggcaaatggcctccccgagagaggaggcggacatgtttggaatcagagacaagtgtctggtgcagcacgcagggagcctgccaccccgccaccccgccatagagctccctgggtcgtctgggcatggccccatgcagcagccagaccagtagcctggggatgccttggccagcctcctggagctttggcacagcccatgttgtttggcaagcagggcagcctgagcacagcaggggatgtgggctcagtaccagagccagctcgtggtgtgaggacggatcctcctcgacgagtagagccatagcctggcgtccaagtgcgtggccaggccgggaggagtgtacaggaagtctctgtaccttatgctcaattcttctggaagcctaaagctgctctgaaaaataaagcctattacttctttaaaaaaaag

SEQ ID NO: 405330 - DNA, 265 bp, Homo sapiens
  misc_feature (69)..(69): n is a, c, g, or t
tgtatgttttattattttactttagaacactcaagctccgcccccccccaccaccccgtgtcgaatatnctaccactgcaagtgactgctgtccgctgcggaatctgttcttggtggaagcacaggtccgtgtcgctgctgtggttgccgctgtccgcggttcaacacggagtccgccccgcgggtttcagctgttggtcgttctgaggggcctttggaagtgaccggtctggttcctaagcaataaaattgaccgtggtgaaaa

SEQ ID NO: 405331 - DNA, 2735 bp, Homo sapiens
gaattccccgcggccccgcgaagaccccggccggccggtcccggaggaagcggccgccgccgccgccgcccagcccagcgcccgcgccgcccgggcaccatggcggggaaggcggccgccccgggcaccgcggtgctgctggtcacggccaacgtgggctcgctcttcgacgacccagaaaacctgcagaagaactggcttcgggaattttaccaggtcgtgcacacacacaagccgcacttcatggccttgcactgtcaggagtttggagggaagaactacgaggcctccatgtcccacgtggacaagttcgtcaaagaactattgtcgagtgatgcgatgaaagaatataacagggctcgagtctacctggatgaaaactacaaatcccaggagcacttcacggcactaggaagcttttattttcttcatgagtccttaaaaaacatctaccagtttgactttaaagctaagaagtatagaaaggtcgctggcaaagagatctactcggataccttagagagcacgcccatgctggagaaggagaagtttccgcaggactacttccccgagtgcaaatggtcaagaaaaggcttcatccggacgaggtggtgcattgcagactgtgcctttgacttggtgaatatccatcttttccatgatgcttccaatctggtcgcctgggaaacaagcccttccgtgtactcgggaatccggcacaaggcactgggctacgtgctggacagaatcattgatcagcgattcgagaaggtttcctactttgtatttggtgatttcaacttccggctggattccaagtccgtcgtggagacgctctgcacaaaagccaccatgcagacggtccgggccgccgacaccaatgaagtggtgaagctcatatttcgtgagtcggacaacgaccggaaggttatgctccagttagaaaagaaactcttcgactacttcaaccaggaggttttccgagacaacaacggcaccgcgctcttggagtttgacaaggagttgtctgtctttaaggacagactgtatgaactggacatctcgttccctcccagctacccgtacagtgaggacgcccgccagggtgagcagtacatgaacacccggtgcccagcctggtgtgaccgcatcctcatgtccccgtctgccaaggagctggtgctgcggtcggagagcgaggagaaggttgtcacctatgaccacattgggcccaacgtctgcatgggagaccacaagcccgtgttcctggccttccgaatcatgcccggggcagggaagagatgccagcgccacgagaggacacttcgtgagcctccctgtagccgtggaccgaatacgcactcttgaaagctgcatcgagaacccgcccaagcgccacctgctagacggccagccccacacttcgcttcagcctccggaccattccggagcagcctcacatacctcactgtctcgtctgtctatgtgacattaagtagaaatattggtttttttttttttttttaaataagtcacagtcctgttgtcaaaactctaatagacagcaaagagggtctgtaccgtagacttcacagttttcagtttttaatgattgccagtggaggggcttcttcagcacagagaccccccactgtgtccagggaccccctctgccaggtggaggtgtgtccaggggctggggaagccgagacgggcactccctctgccggccggcagcgtggccctgagcatggcaagggggtctgtctctgccgatgctccttccgcggcactgactctgcgccgtgtcacatggtttttgaatcacactgcagctgctttccatttttatatatatataaatatatataaatatatactttttaaaaataatttataaatcttaccaaaacttatgctaaatatactttccagtatgaacgcacaggagagtcccatcagcaggcggcattggagtctaggagctcagctgtgtgtccatcaacacacaaattcgtaaaaaacacacatggcctcgccatcgtgggtaaaatcggccccacagcacgtctgcaccagcgggccgttactcccatgccgttcttctgtgtaatattaagaactgaatgtgaagtttatagctagcctgggtgtaccttttaagaattttgtaaaccgtttgtctgtcttttgttactgttttatggtgccaagtatcctacgttacaacaataatatcatgggagaaatagaaatagcctagtttgcttccaatagaaactgcttttaacatgggctgtatataaaaatattaaagagaaacaaaactgtacatttcctcattgctccgctacagacaacccatgtcataaccttgttgcaaatatttttctcctatagcagtaagtacagcattagaaggtgattagagagtctgttgatgaaacacaaatgtatgttttattgattttactttagaacactacagagttcctggaccgggtgaaggcattagctgggtgtttgtgtgggataaatactaccactgcaagtgactgctgtccgctgcggaatctgttcttggtggaagcacaggtccgtgtcgctgctgtggttgccgctgtccgcggttcaacacggagtccgccccgcgggtttcagctgttggtcgttctgaggggcctttggaagtgaccggtctggttcctaagcaataaaattgaccgtggtgaaaa

SEQ ID NO: 405332 - DNA, 3255 bp, Homo sapiens
  misc_feature (2796)..(2796): n is a, c, g, or t
  misc_feature (2808)..(2808): n is a, c, g, or t
gaattccccgcggccccgcgaagaccccggccggccggtcccggaggaagcggccgccgccgccgccgcccagcccagcgcccgcgccgcccgggcaccatggcggggaaggcggccgccccgggcaccgcggtgctgctggtcacggccaacgtgggctcgctcttcgacgacccagaaaacctgcagaagaactggcttcgggaattttaccaggtcgtgcacacacacaagccgcacttcatggccttgcactgtcaggagtttggagggaagaactacgaggcctccatgtcccacgtggacaagttcgtcaaagaactattgtcgagtgatgcgatgaaagaatataacagggctcgagtctacctggatgaaaactacaaatcccaggagcacttcacggcactaggaagcttttattttcttcatgagtccttaaaaaacatctaccagtttgactttaaagctaagaagtatagaaaggtcgctggcaaagagatctactcggataccttagagagcacgcccatgctggagaaggagaagtttccgcaggactacttccccgagtgcaaatggtcaagaaaaggcttcatccggacgaggtggtgcattgcagactgtgcctttgacttggtgaatatccatcttttccatgatgcttccaatctggtcgcctgggaaacaagcccttccgtgtactcgggaatccggcacaaggcactgggctacgtgctggacagaatcattgatcagcgattcgagaaggtttcctactttgtatttggtgatttcaacttccggctggattccaagtccgtcgtggagacgctctgcacaaaagccaccatgcagacggtccgggccgccgacaccaatgaagtggtgaagctcatatttcgtgagtcggacaacgaccggaaggttatgctccagttagaaaagaaactcttcgactacttcaaccaggaggttttccgagacaacaacggcaccgcgctcttggagtttgacaaggagttgtctgtctttaaggacagactgtatgaactggacatctcgttccctcccagctacccgtacagtgaggacgcccgccagggtgagcagtacatgaacacccggtgcccagcctggtgtgaccgcatcctcatgtccccgtctgccaaggagctggtgctgcggtcggagagcgaggagaaggttgtcacctatgaccacattgggcccaacgtctgcatgggagaccacaagcccgtgttcctggccttccgaatcatgcccggggcaggtaaacctcatgcccatgtgcacaagtgttgtgtcgtgcagtgacgtggtgggaagagatgccagcgccacgagaggacacttcgtgagcctccctgtagccgtggaccgaatacgcactcttgaaagctgcatcgagaacccgcccaagcgccacctgctagacggccagccccacacttcgcttcagcctccggaccattccggagcagcctcacatacctcactgtctcgtctgtctatgtgacattaagtagaaatattggtttttttttttttttttaaataagtcacagtcctgttgtcaaaactctaatagacagcaaagagggtctgtaccgtagacttcacagttttcagtttttaatgattgccagtggaggggcttcttcagcacagagaccccccactgtgtccagggaccccctctgccaggtggaggtgtgtccaggggctggggaagccgagacgggcactccctctgccggccggcagcgtggccctgagcatggcaagggggtctgtctctgccgatgctccttccgcggcactgactctgcgccgtgtcacatggtttttgaatcacactgcagctgctttccatttttatatatatataaatatatataaatatatactttttaaaaataatttataaatcttaccaaaacttatgctaaatatactttccagtatgaacgcacaggagagtcccatcagcaggcggcattggagtctaggagctcagctgtgtgtccatcaacacacaaattcgtaaaaaacacacatggcctcgccatcgtgggtaaaatcggccccacagcacgtctgcaccagcgggccgttactcccatgccgttcttctgtgtaatattaagaactgaatgtgaagtttatagctagcctgggtgtaccttttaagaattttgtaaaccgtttgtctgtcttttgttactgttttatggtgccaagtatcctacgttacaacaataatatcatgggagaaatagaaatagcctagtttgcttccaatagaaactgcttttaacatgggctgtatataaaaatattaaagagaaacaaaactgtacatttcctcattgctccgctacagacaacccatgtcataaccttgttgcaaatatttttctcctatagcagtaagtacagcattagaaggtgattagagagtctgttgatgaaacacaaatgtatgttttattgattttactttagaacactacagagttcctggaccgggtgaaggcattagctgggtgtttgtgtgggataaatactaccactgcaagtgactgctgtccgctgcggaatctgttcttggtggaagcacaggtccgtgtcgctgctgtggttgccgctgtccgcggttcaacacggagtccgccccgcgggtttcagctgttggtcgttctgaggggcctttggaagtgaccggtctggttcctaagcaataaaattgaccgtggtgaaaaaccaaacacnaaccaacaaaanaaaaattgggggggggccgggccggaaaagggtttcagaaccatccggtggggggggggggccccggggagggaacacggggccaaagggggcccaaagaaaacccgggccgagaaaggggggggggtctccccaataaaaaaacgcggagagacccgcgggagcaaggccaatggcggaggtcagggggctccacgaatttttccaggcatcccaaagacgctcctccgcgggagggtggggtgtgaaaacaacaaacaaacaaagaaacacacagcaaacaacgagaagcaagtagatagaaacaaagacacagcacgacacgacacaaataaagaaaatggcagaatagatacaaatacagacagagatgccgacagctaaacaagatacaaacgctaaagaagtgaacatcggcgatacaacaacaacagcacaggcgggggt

SEQ ID NO: 405333 - DNA, 1689 bp, Homo sapiens
cggccggctggacatctcgttccctcccagctacccgtacagtgaggacgcccgccagggtgagcagtacatgaacacccggtgcccagcctggtgtgaccgcatcctcatgtccccgtctgccaaggagctggtgctgcggtcggagagcgaggagaaggttgtcacctatgaccacattgggcccaacgtctgcatgggagaccacaagcccgtgttcctggccttccgaatcatgcccggggcagggaagagatgccagcgccacgagaggacacttcgtgagcctccctgtagccgtggaccgaatacgcactcttgaaagctgcatcgagaacccgcccaagcgccacctgctagacggccagccccacacttcgcttcagcctccggaccattccggagcagcctcacatacctcactgtctcgtctgtctatgtgacattaagtagaaatattggtttttttttttttttttaaataagtcacagtcctgttgtcaaaactctaatagacagcaaagagggtctgtaccgtagacttcacagttttcagtttttaatgattgccagtggaggggcttcttcagcacagagaccccccactgtgtccagggaccccctctgccaggtggaggtgtgtccaggggctggggaagccgagacgggcactccctctgccggccggcagcgtggccctgagcatggcaagggggtctgtctctgccgatgctccttccgcggcactgactctgcgccgtgtcacatggtttttgaatcacactgcagctgctttccatttttatatatatataaatatatataaatatatactttttaaaaataatttataaatcttaccaaaacttatgctaaatatactttccagtatgaacgcacaggagagtcccatcagcaggcggcattggagtctaggagctcagctgtgtgtccatcaacacacaaattcgtaaaaaacacacatggcctcgccatcgtgggtaaaatcggccccacagcacgtctgcaccagcgggccgttactcccatgccgttcttctgtgtaatattaagaactgaatgtgaagtttatagctagcctgggtgtaccttttaagaattttgtaaaccgtttgtctgtcttttgttactgttttatggtgccaagtatcctacgttacaacaataatatcatgggagaaatagaaatagcctagtttgcttccaatagaaactgcttttaacatgggctgtatataaaaatattaaagagaaacaaaactgtacatttcctcattgctccgctacagacaacccatgtcataaccttgttgcaaatatttttctcctatagcagtaagtacagcattagaaggtgattagagagtctgttgatgaaacacaaatgtatgttttattgattttactttagaacactacagagttcctggaccgggtgaaggcattagctgggtgtttgtgtgggataaatactaccactgcaagtgactgctgtccgctgcggaatctgttcttggtggaagcacaggtccgtgtcgctgctgtggttgccgctgtccgcggttcaacacggagtccgccccgcgggtttcagctgttggtcgttctgaggggcctttggaagtgaccggtctggttcctaagcaataaaattgaccgtggtgaaaa

SEQ ID NO: 405334 - DNA, 1781 bp, Homo sapiens
tgtgcacaagggccgagctgcctctgctggccatcagctcctcccagcccggttcatggctgccctggtgagacgcagggtctgggggtgcaacgggaggcggcggcatgtgctgtgctgtcccgcgtgcgccgtgctgacaccgtcctctcttcctgctgcagcccgtgttcctggccttccgaatcatgcccggggcaggtaaacctcatgcccatgtgcacaagtgttgtgtcgtgcagtgacgtggtggtaaatatgactcctccctccagttcagcttttacgcagcttttcctggtgcgtttgttcctttaacaaattacgaattccgtgacagggaagagatgccagcgccacgagaggacacttcgtgagcctccctgtagccgtggaccgaatacgcactcttgaaagctgcatcgagaacccgcccaagcgccacctgctagacggccagccccacacttcgcttcagcctccggaccattccggagcagcctcacatacctcactgtctcgtctgtctatgtgacattaagtagaaatattggtttttttttttttttttaaataagtcacagtcctgttgtcaaaactctaatagacagcaaagagggtctgtaccgtagacttcacagttttcagtttttaatgattgccagtggaggggcttcttcagcacagagaccccccactgtgtccagggaccccctctgccaggtggaggtgtgtccaggggctggggaagccgagacgggcactccctctgccggccggcagcgtggccctgagcatggcaagggggtctgtctctgccgatgctccttccgcggcactgactctgcgccgtgtcacatggtttttgaatcacactgcagctgctttccatttttatatatatataaatatatataaatatatactttttaaaaataatttataaatcttaccaaaacttatgctaaatatactttccagtatgaacgcacaggagagtcccatcagcaggcggcattggagtctaggagctcagctgtgtgtccatcaacacacaaattcgtaaaaaacacacatggcctcgccatcgtgggtaaaatcggccccacagcacgtctgcaccagcgggccgttactcccatgccgttcttctgtgtaatattaagaactgaatgtgaagtttatagctagcctgggtgtaccttttaagaattttgtaaaccgtttgtctgtcttttgttactgttttatggtgccaagtatcctacgttacaacaataatatcatgggagaaatagaaatagcctagtttgcttccaatagaaactgcttttaacatgggctgtatataaaaatattaaagagaaacaaaactgtacatttcctcattgctccgctacagacaacccatgtcataaccttgttgcaaatatttttctcctatagcagtaagtacagcattagaaggtgattagagagtctgttgatgaaacacaaatgtatgttttattgattttactttagaacactacagagttcctggaccgggtgaaggcattagctgggtgtttgtgtgggataaatactaccactgcaagtgactgctgtccgctgcggaatctgttcttggtggaagcacaggtccgtgtcgctgctgtggttgccgctgtccgcggttcaacacggagtccgccccgcgggtttcagctgttggtcgttctgaggggcctttggaagtgaccggtctggttcctaagcaataaaattgaccgtggtgaaaa

SEQ ID NO: 405335 - DNA, 1043 bp, Homo sapiens
gaattccccgcggccccgcgaagaccccggccggccggtcccggaggaagcggccgccgccgccgccgcccagcccagcgcccgcgccgcccgggcaccatggcggggaaggcggccgccccgggcaccgcggtgctgctggtcacggccaacgtgggctcgctcttcgacgacccagaaaacctgcagaagaactggcttcgggaattttaccaggtcgtgcacacacacaagccgcacttcatggccttgcactgtcaggagtttggagggaagaactacgaggcctccatgtcccacgtggacaagttcgtcaaagaactattgtcgagtgatgcgatgaaagaatataacagggctcgagtctacctggatgaaaactacaaatcccaggagcacttcacggcactaggaagcttttattttcttcatgagtccttaaaaaacatctaccagtttgactttaaagctaagaagtatagaaaggtcgctggcaaagagatctactcggataccttagagagcacgcccatgctggagaaggagaagtttccgcaggactacttccccgagacacagttaccgacaggaaatgaacacagaggctccccggggcaaatggcctccccgagagaggaggcggacatgtttggaatcagagacaagtgtctggtgcagcacgcagggagcctgccaccccgccaccccgccatagagctccctgggtcgtctgggcatggccccatgcagcagccagaccagtagcctggggatgccttggccagcctcctggagctttggcacagcccatgttgtttggcaagcagggcagcctgagcacagcaggggatgtgggctcagtaccagagccagctcgtggtgtgaggacggatcctcctcgacgagtagagccatagcctggcgtccaagtgcgtggccaggccgggaggagtgtacaggaagtctctgtaccttatgctcaattcttctggaagcctaaagctgctctgaaaaataaagcctattacttctttaaaaaaaag

SEQ ID NO: 405336 - DNA, 2786 bp, Homo sapiens
gaattccccgcggccccgcgaagaccccggccggccggtcccggaggaagcggccgccgccgccgccgcccagcccagcgcccgcgccgcccgggcaccatggcggggaaggcggccgccccgggcaccgcggtgctgctggtcacggccaacgtgggctcgctcttcgacgacccagaaaacctgcagaagaactggcttcgggaattttaccaggtcgtgcacacacacaagccgcacttcatggccttgcactgtcaggagtttggagggaagaactacgaggcctccatgtcccacgtggacaagttcgtcaaagaactattgtcgagtgatgcgatgaaagaatataacagggctcgagtctacctggatgaaaactacaaatcccaggagcacttcacggcactaggaagcttttattttcttcatgagtccttaaaaaacatctaccagtttgactttaaagctaagaagtatagaaaggtcgctggcaaagagatctactcggataccttagagagcacgcccatgctggagaaggagaagtttccgcaggactacttccccgagtgcaaatggtcaagaaaaggcttcatccggacgaggtggtgcattgcagactgtgcctttgacttggtgaatatccatcttttccatgatgcttccaatctggtcgcctgggaaacaagcccttccgtgtactcgggaatccggcacaaggcactgggctacgtgctggacagaatcattgatcagcgattcgagaaggtttcctactttgtatttggtgatttcaacttccggctggattccaagtccgtcgtggagacgctctgcacaaaagccaccatgcagacggtccgggccgccgacaccaatgaagtggtgaagctcatatttcgtgagtcggacaacgaccggaaggttatgctccagttagaaaagaaactcttcgactacttcaaccaggaggttttccgagacaacaacggcaccgcgctcttggagtttgacaaggagttgtctgtctttaaggacagactgtatgaactggacatctcgttccctcccagctacccgtacagtgaggacgcccgccagggtgagcagtacatgaacacccggtgcccagcctggtgtgaccgcatcctcatgtccccgtctgccaaggagctggtgctgcggtcggagagcgaggagaaggttgtcacctatgaccacattgggcccaacgtctgcatgggagaccacaagcccgtgttcctggccttccgaatcatgcccggggcaggtaaacctcatgcccatgtgcacaagtgttgtgtcgtgcagtgacgtggtgggaagagatgccagcgccacgagaggacacttcgtgagcctccctgtagccgtggaccgaatacgcactcttgaaagctgcatcgagaacccgcccaagcgccacctgctagacggccagccccacacttcgcttcagcctccggaccattccggagcagcctcacatacctcactgtctcgtctgtctatgtgacattaagtagaaatattggtttttttttttttttttaaataagtcacagtcctgttgtcaaaactctaatagacagcaaagagggtctgtaccgtagacttcacagttttcagtttttaatgattgccagtggaggggcttcttcagcacagagaccccccactgtgtccagggaccccctctgccaggtggaggtgtgtccaggggctggggaagccgagacgggcactccctctgccggccggcagcgtggccctgagcatggcaagggggtctgtctctgccgatgctccttccgcggcactgactctgcgccgtgtcacatggtttttgaatcacactgcagctgctttccatttttatatatatataaatatatataaatatatactttttaaaaataatttataaatcttaccaaaacttatgctaaatatactttccagtatgaacgcacaggagagtcccatcagcaggcggcattggagtctaggagctcagctgtgtgtccatcaacacacaaattcgtaaaaaacacacatggcctcgccatcgtgggtaaaatcggccccacagcacgtctgcaccagcgggccgttactcccatgccgttcttctgtgtaatattaagaactgaatgtgaagtttatagctagcctgggtgtaccttttaagaattttgtaaaccgtttgtctgtcttttgttactgttttatggtgccaagtatcctacgttacaacaataatatcatgggagaaatagaaatagcctagtttgcttccaatagaaactgcttttaacatgggctgtatataaaaatattaaagagaaacaaaactgtacatttcctcattgctccgctacagacaacccatgtcataaccttgttgcaaatatttttctcctatagcagtaagtacagcattagaaggtgattagagagtctgttgatgaaacacaaatgtatgttttattgattttactttagaacactacagagttcctggaccgggtgaaggcattagctgggtgtttgtgtgggataaatactaccactgcaagtgactgctgtccgctgcggaatctgttcttggtggaagcacaggtccgtgtcgctgctgtggttgccgctgtccgcggttcaacacggagtccgccccgcgggtttcagctgttggtcgttctgaggggcctttggaagtgaccggtctggttcctaagcaataaaattgaccgtggtgaaaa

SEQ ID NO: 405337 - DNA, 812 bp, Homo sapiens
gaattccccgcggccccgcgaagaccccggccggccggtcccggaggaagcggccgccgccgccgccgcccagcccagcgcccgcgccgcccgggcaccatggcggggaaggcggccgccccgggcaccgcggtgctgctggtcacggccaacgtgggctcgctcttcgacgacccagaaaacctgcagaagaactggcttcgggaattttaccaggtcgtgcacacacacaagccgcacttcatggccttgcactgtcaggagtttggagggaagaactacgaggcctccatgtcccacgtggacaagttcgtcaaagaactattgtcgagtgatgcgatgaaagaatataacagggctcgagtctacctggatgaaaactacaaatcccaggagcacttcacggggcttattcagatgaaaaagaaaaacaccactgggggagcagcaaattagacattgcagaagaaaagagaaggtgactgaacttgaagacagccacaaaattaaagtgaaacagagagaaggactgaaaagtggatagaaatcactgtgaaataccaggtgtcctaacacgtgtggctgcagccccaggaggagcggggaaaggaggcagacagggtgatgcttacagatgtcatggctcagatttcttcatcagtccatgaaacttacagaaagatccaaatactgcaacaagcttcaagccgaataaacataccaacgcaggccaaggtccgattgctgaaagcaagttacatgaaggcccttccttgccacccatcatcctcggaagagtggggctctgctcc

SEQ ID NO: 405338 - DNA, 2732 bp, Homo sapiens
gaattccccgcggccccgcgaagaccccggccggccggtcccggaggaagcggccgccgccgccgccgcccagcccagcgcccgcgccgcccgggcaccatggcggggaaggcggccgccccgggcaccgcggtgctgctggtcacggccaacgtgggctcgctcttcgacgacccagaaaacctgcagaagaactggcttcgggaattttaccaggtcgtgcacacacacaagccgcacttcatggccttgcactgtcaggagtttggagggaagaactacgaggcctccatgtcccacgtggacaagttcgtcaaagaactattgtcgagtgatgcgatgaaagaatataacagggctcgagtctacctggatgaaaactacaaatcccaggagcacttcacggcactaggaagcttttattttcttcatgagtccttaaaaaacatctaccagtttgactttaaagctaagaagtatagaaaggtcgctggcaaagagatctactcggataccttagagagcacgcccatgctggagaaggagaagtttccgcaggactacttccccgagtgcaaatggtcaagaaaaggcttcatccggacgaggtggtgcattgcagactgtgcctttgacttggtgaatatccatcttttccatgatgcttccaatctggtcgcctgggaaacaagcccttccgtgtactcgggaatccggcacaaggcactgggctacgtgctggacagaatcattgatcagcgattcgagaaggtttcctactttgtatttggtgatttcaacttccggctggattccaagtccgtcgtggagacgctctgcacaaaagccaccatgcagacggtccgggccgccgacaccaatgaagtggtgaagctcatatttcgtgagtcggacaacgaccggaaggttatgctccagttagaaaagaaactcttcgactacttcaaccaggaggttttccgagacaacaacggcaccgcgctcttggagtttgacaaggagttgtctgtctttaaggacagactgtatgaactggacatctcgttccctcccagctacccgtacagtgaggacgcccgccagggtgagcagtacatgaacacccggtgcccagcctggtgtgaccgcatcctcatgtccccgtctgccaaggagctggtgctgcggtcggagagcgaggagaaggttgtcacctatgaccacattgggcccaacgtctgcatgggagaccacaagcccgtgttcctggccttccgaatcatgcccggggcaggtaaacctcatgcccatgtgcacaagtgttgtgtcgtgcagtgacgtggtgggaagagatgccagcgccacgagaggacacttcgtgagcctccctgtagccgtggaccgaatacgcactcttgaaagctgcatcgagaacccgcccaagcgccacctgctagacggccagccccacacttcgcttcagcctccggaccattccggagcagcctcacatacctcactgtctcgtctgtctatgtgacattaagtagaaatattggtttttttttttttttttaaataagtcacagtcctgttgtctttttaatgattgccagtggaggggcttcttcagcacagagaccccccactgtgtccagggaccccctctgccaggtggaggtgtgtccaggggctggggaagccgagacgggcactccctctgccggccggcagcgtggccctgagcatggcaagggggtctgtctctgccgatgctccttccgcggcactgactctgcgccgtgtcacatggtttttgaatcacactgcagctgctttccatttttatatatatataaatatatataaatatatactttttaaaaataatttataaatcttaccaaaacttatgctaaatatactttccagtatgaacgcacaggagagtcccatcagcaggcggcattggagtctaggagctcagctgtgtgtccatcaacacacaaattcgtaaaaaacacacatggcctcgccatcgtgggtaaaatcggccccacagcacgtctgcaccagcgggccgttactcccatgccgttcttctgtgtaatattaagaactgaatgtgaagtttatagctagcctgggtgtaccttttaagaattttgtaaaccgtttgtctgtcttttgttactgttttatggtgccaagtatcctacgttacaacaataatatcatgggagaaatagaaatagcctagtttgcttccaatagaaactgcttttaacatgggctgtatataaaaatattaaagagaaacaaaactgtacatttcctcattgctccgctacagacaacccatgtcataaccttgttgcaaatatttttctcctatagcagtaagtacagcattagaaggtgattagagagtctgttgatgaaacacaaatgtatgttttattgattttactttagaacactacagagttcctggaccgggtgaaggcattagctgggtgtttgtgtgggataaatactaccactgcaagtgactgctgtccgctgcggaatctgttcttggtggaagcacaggtccgtgtcgctgctgtggttgccgctgtccgcggttcaacacggagtccgccccgcgggtttcagctgttggtcgttctgaggggcctttggaagtgaccggtctggttcctaagcaataaaattgaccgtggtgaaaa

SEQ ID NO: 405339 - DNA, 3043 bp, Homo sapiens
gaattccccgcggccccgcgaagaccccggccggccggtcccggaggaagcggccgccgccgccgccgcccagcccagcgcccgcgccgcccgggcaccatggcggggaaggcggccgccccgggcaccgcggtgctgctggtcacggccaacgtgggctcgctcttcgacgacccagaaaacctgcagaagaactggcttcgggaattttaccaggtcgtgcacacacacaagccgcacttcatggccttgcactgtcaggagtttggagggaagaactacgaggcctccatgtcccacgtggacaagttcgtcaaagaactattgtcgagtgatgcgatgaaagaatataacagggctcgagtctacctggatgaaaactacaaatcccaggagcacttcacggcactaggaagcttttattttcttcatgagtccttaaaaaacatctaccagtttgactttaaagctaagaagtatagaaaggtcgctggcaaagagatctactcggataccttagagagcacgcccatgctggagaaggagaagtttccgcaggactacttccccgagtgcaaatggtcaagaaaaggcttcatccggacgaggtggtgcattgcagactgtgcctttgacttggtgaatatccatcttttccatgatgcttccaatctggtcgcctgggaaacaagcccttccgtgtactcgggaatccggcacaaggcactgggctacgtgctggacagaatcattgatcagcgattcgagaaggtttcctactttgtatttggtgatttcaacttccggctggattccaagtccgtcgtggagacgctctgcacaaaagccaccatgcagacggtccgggccgccgacaccaatgaagtggtgaagctcatatttcgtgagtcggacaacgaccggaaggttatgctccagttagaaaagaaactcttcgactacttcaaccaggaggttttccgagacaacaacggcaccgcgctcttggagtttgacaaggagttgtctgtctttaaggacagactgtatgaactggacatctcgttccctcccagctacccgtacagtgaggacgcccgccagggtgagcagtacatgaacacccggtgcccagcctggtgtgaccgcatcctcatgtccccgtctgccaaggagctggtgctgcggtcggagagcgaggagaaggttgtcacctatgaccacattgggcccaacgtctgcatgggagaccacaagcccgtgttcctggccttccgaatcatgcccggggcaggtaaacctcatgcccatgtgcacaagtgttgtgtcgtgcagtgacgtggtgggaagagatgccagcgccacgagaggacacttcgtgagcctccctgtagccgtggaccgaatacgcactcttgaaagctgcatcgagaacccgcccaagcgccacctgctagacggccagccccacacttcgcttcagcctccggaccattccggagcagcctcacatacctcactgtctcgtctgtctatgtgacattaagtagaaatattggtttttttttttttttttaaataagtcacagtcctgttgtcaaaactctaatagacagcaaagagggtctgtaccgtagacttcacagttttcagtttttaatgattgccagtggaggggcttcttcagcacagagaccccccactgtgtccagggaccccctctgccaggtggaggtgtgtccaggggctggggaagccgagacgggcactccctctgccggccggcagcgtggccctgagcatggcaagggggtctgtctctgccgatgctccttccgcggcactgactctgcgccgtgtcacatggtttttgaatcacactgcagctgctttccatttttatatatatataaatatatataaatatatactttttaaaaataatttataaatcttaccaaaacttatgctaaatatactttccagtatgaacgcacaggagagtcccatcagcaggcggcattggagtctaggagctcagctgtgtgtccatcaacacacaaattcgtaaaaaacacacatggcctcgccatcgtgggtaaaatcggccccacagcacgtctgcaccagcgggccgttactcccatgccgttcttctgtgtaatattaagaactgaatgtgaagtttatagctagcctgggtgtaccttttaagaattttgtaaaccgtttgtctgtcttttgttactgttttatggtgccaagtatcctacgttacaacaataatatcatgggagaaatagaaatagcctagtttgcttccaatagaaactgcttttaacatgggctgtatataaaaatattaaagagaaacaaaactgtacatttcctcattgctccgctacagacaacccatgtcataaccttgttgcaaatatttttctcctatagcagtaagtacagcattagaaggtgattagagagtctgttgatgaaacacaaatgtatgttttattgattttactttagaacactacagagttcctggaccgggtgaaggcattagctgggtgtttgtgtgggataaatactaccactgcaagtgactgctgtccgctgcggaatctgttcttggtggaagcacaggtccgtgtcgctgctgtggttgccgctgtccgcggttcaacacggagtccgccccgcgggtttcagctgttggtcgttctgaggggcctttggaagtgaccggtctggttcctaagcaataaaattgaccgtggtgaaaatagtcccgtgttgctttttcttcctttcccttctcctgccacctttgaaatgctaactcaggggagcggcctcctgtatagcctgttatttgagatcaagctcattagaaatcctggaatttcactgtatcacacgctgtcacaaaacactaagccgttcattgagaggagaaaaacagccttttggactttctactgtaataaaggatttatccctcaacattttaagacgggattatatcaacctttgccttcct

SEQ ID NO: 405340 - DNA, 2597 bp, Homo sapiens
gaattccccgcggccccgcgaagaccccggccggccggtcccggaggaagcggccgccgccgccgccgcccagcccagcgcccgcgccgcccgggcaccatggcggggaaggcggccgccccgggcaccgcggtgctgctggtcacggccaacgtgggctcgctcttcgacgacccagaaaacctgcagaagaactggcttcgggaattttaccaggcactaggaagcttttattttcttcatgagtccttaaaaaacatctaccagtttgactttaaagctaagaagtatagaaaggtcgctggcaaagagatctactcggataccttagagagcacgcccatgctggagaaggagaagtttccgcaggactacttccccgagtgcaaatggtcaagaaaaggcttcatccggacgaggtggtgcattgcagactgtgcctttgacttggtgaatatccatcttttccatgatgcttccaatctggtcgcctgggaaacaagcccttccgtgtactcgggaatccggcacaaggcactgggctacgtgctggacagaatcattgatcagcgattcgagaaggtttcctactttgtatttggtgatttcaacttccggctggattccaagtccgtcgtggagacgctctgcacaaaagccaccatgcagacggtccgggccgccgacaccaatgaagtggtgaagctcatatttcgtgagtcggacaacgaccggaaggttatgctccagttagaaaagaaactcttcgactacttcaaccaggaggttttccgagacaacaacggcaccgcgctcttggagtttgacaaggagttgtctgtctttaaggacagactgtatgaactggacatctcgttccctcccagctacccgtacagtgaggacgcccgccagggtgagcagtacatgaacacccggtgcccagcctggtgtgaccgcatcctcatgtccccgtctgccaaggagctggtgctgcggtcggagagcgaggagaaggttgtcacctatgaccacattgggcccaacgtctgcatgggagaccacaagcccgtgttcctggccttccgaatcatgcccggggcaggtaaacctcatgcccatgtgcacaagtgttgtgtcgtgcagtgacgtggtgggaagagatgccagcgccacgagaggacacttcgtgagcctccctgtagccgtggaccgaatacgcactcttgaaagctgcatcgagaacccgcccaagcgccacctgctagacggccagccccacacttcgcttcagcctccggaccattccggagcagcctcacatacctcactgtctcgtctgtctatgtgacattaagtagaaatattggtttttttttttttttttaaataagtcacagtcctgttgtcaaaactctaatagacagcaaagagggtctgtaccgtagacttcacagttttcagtttttaatgattgccagtggaggggcttcttcagcacagagaccccccactgtgtccagggaccccctctgccaggtggaggtgtgtccaggggctggggaagccgagacgggcactccctctgccggccggcagcgtggccctgagcatggcaagggggtctgtctctgccgatgctccttccgcggcactgactctgcgccgtgtcacatggtttttgaatcacactgcagctgctttccatttttatatatatataaatatatataaatatatactttttaaaaataatttataaatcttaccaaaacttatgctaaatatactttccagtatgaacgcacaggagagtcccatcagcaggcggcattggagtctaggagctcagctgtgtgtccatcaacacacaaattcgtaaaaaacacacatggcctcgccatcgtgggtaaaatcggccccacagcacgtctgcaccagcgggccgttactcccatgccgttcttctgtgtaatattaagaactgaatgtgaagtttatagctagcctgggtgtaccttttaagaattttgtaaaccgtttgtctgtcttttgttactgttttatggtgccaagtatcctacgttacaacaataatatcatgggagaaatagaaatagcctagtttgcttccaatagaaactgcttttaacatgggctgtatataaaaatattaaagagaaacaaaactgtacatttcctcattgctccgctacagacaacccatgtcataaccttgttgcaaatatttttctcctatagcagtaagtacagcattagaaggtgattagagagtctgttgatgaaacacaaatgtatgttttattgattttactttagaacactacagagttcctggaccgggtgaaggcattagctgggtgtttgtgtgggataaatactaccactgcaagtgactgctgtccgctgcggaatctgttcttggtggaagcacaggtccgtgtcgctgctgtggttgccgctgtccgcggttcaacacggagtccgccccgcgggtttcagctgttggtcgttctgaggggcctttggaagtgaccggtctggttcctaagcaataaaattgaccgtggtgaaaa

SEQ ID NO: 405341 - DNA, 1202 bp, Homo sapiens
gaattccccgcggccccgcgaagaccccggccggccggtcccggaggaagcggccgccgccgccgccgcccagcccagcgcccgcgccgcccgggcaccatggcggggaaggcggccgccccgggcaccgcggtgctgctggtcacggccaacgtgggctcgctcttcgacgacccagaaaacctgcagaagaactggcttcgggaattttaccaggtcgtgcacacacacaagccgcacttcatggccttgcactgtcaggagtttggagggaagaactacgaggcctccatgtcccacgtggacaagttcgtcaaagaactattgtcgagtgatgcgatgaaagaatataacagggctcgagtctacctggatgaaaactacaaatcccaggagcacttcacggcactaggaagcttttattttcttcatgagtccttaaaaaacatctaccagtttgactttaaagctaagaagtatagaaaggtcgctggcaaagagatctactcggataccttagagagcacgcccatgctggagaaggagaagtttccgcaggactacttccccgagtgcaaatggtcaagaaaaggcttcatccggacgaggtggtgcattgcagactgtgcctttgacttggtgaatatccatcttttccatgatgcttccaatctggtcgcctgggaaacaagcccttccgtgtactcgggaatccggcacaaggcactgggctacgtgctggacagaatcattgatcagcgattcgagaaggtttcctactttgtatttggtgatttcaacttccggctggattccaagtccgtcgtggagacgctctgcacaaaagccaccatgcagacggtccgggccgccgacaccaatgaagtggtgaagctcatatttcgtgagtcggacaacgaccggaaggttatgctccagttagaaaagaaactcttcgactacttcaaccaggaggttttccgagacaacaacggcaccgcgcgccagtgtctctgcaggagtggcgtgagcggcggccgggacagctcctgacagatgggcaggatcagccgctgccttgtcattgtccacacggccctgcctgccttcactttgtaatcaagaagaatgtgggagaccatgcgaaattggtgatcatgtttgtgaaaaatctcagagagatacaaattatcaattcaaca

SEQ ID NO: 405342 - DNA, 746 bp, Homo sapiens
gaattccccgcggccccgcgaagaccccggccggccggtcccggaggaagcggccgccgccgccgccgcccagcccagcgcccgcgccgcccgggcaccatggcggggaaggcggccgccccgggcaccgcggtgctgctggtcacggccaacgtgggctcgctcttcgacgacccagaaaacctgcagaagaactggcttcgggaattttaccaggtcgtgcacacacacaagccgcacttcatggccttgcactgtcaggagtttggagggaagaactacgaggcctccatgtcccacgtggacaagttcgtcaaagaactattgtcgagtgatgcgatgaaagaatataacagggctcgagtctacctggatgaaaactacaaatcccaggagcacttcacggcactaggaagcttttattttcttcatgagtccttaaaaaacatctaccagtttgactttaaagctaagaagtatagaaaggtcgctggcaaagagatctactcggataccttagagagcacgcccatgctggagaaggagaagtttccgccgtcggcacacaaggagctgctggagtgccgtcacagcgccaccccctcgatgcccacagagctgcagcctctgcagagtgtcagctccttcacactgtccaacttgatctcagcgattttttgtcataacacgtagaaactgtcagagcccgttttaaacattgtgcttttctgtctgcaaagtcatta

SEQ ID NO: 405343 - DNA, 410 bp, Homo sapiens
atgttgaaaggaaatgattaattcccaataagcaatataaggacaccaacatttgggagaatcgcggcagcgtggcagcaagggacacaggaaaccaaactgtgctgttctccctcaggatggaaaggccctgaggaaaggaaggggtaacacagggagaaagctgagggagaggagaacagagccctttccctccaggagctgcggaagggaggaaagtgaaggacaaaatcacacggtctcattcaagggacagttggtgtcagtgtcctggttgtgacatggtactgtaatagtgccagatgttacccttgggggaaactgggtaaaggtagacagagttcctctattatttctgaaactctctgtgaatctataattctcaaaataaagaggttttttaagtaaaa

SEQ ID NO: 405344 - DNA, 684 bp, Homo sapiens
caagaattcccttgaatcatttttctggcagcagggtgtcctccccaaaggcaggactattatccatgtgacctcccaagatccatttctctcctttgatttattcagtgacctcctctggtgcaaaaaatggtatctttgtggcttaaaagagtttttccccctcctccttcttcactctgagtcatttatttcttcctgccagtaggacacttctcttgttcattcccaaatcatccctgtaaagaaggcagtaagggtataaaaataaacccttcggaagcagaaatggctccaaagccctctgctaggaccaccccaccatcaccgtcatggagtaaacttggttagaatgtcagctctaaagtctgactacctcaattcacaccctcactccacactcagcagctgtgttaccttgggaaaactacttaacctctttatgtttttatttttccctctgtaaaaaggggctaaaaataacactgacctcatagcattttgtgaggatggaatgcgggaatacagcaaagcactttgaatagtgtctgccacgtggtaagagctcaataaaaattatctagaatttctttctgaggccactataaattctcagcattgaatatatacatggataaatgaaaaatgggattaaatgactcgcagagctcagagtaaaaatgc

SEQ ID NO: 405345 - DNA, 294 bp, Homo sapiens
taaatgagctggtacggcatgtgctgtaggccagcgaaactccgcggagcgcgcgcggcacgatggacggtcgggtgcagctgatgaaggccctcctggccgggcccctccggcccgcggcgcgtcgctggaggaacccgattccctttcccgagacgtttgacggagataccgaccgactcccggagttcatcgtgcagacgtgctcctacatgttcgtggacgagaacacgttctccaacgacgccctgaagacctacgctggcctacagcacatgccggtaccgagctgat

SEQ ID NO: 405346 - DNA, 1253 bp, Homo sapiens
tgggcggagctcgcgcaagcgcctgggctctcccccatggctccgcccacagcccgtcccggcccgggcccccaccctcgacatgcgcttccggcgacgccttagcgctgacccccacgcaacccagcgaaactccgcggagcgcgcgcggcacgatggacggtcgggtgcagctgatgaaggccctcctggccgggcccctccggcccgcggcgcgtcgctggaggaacccgattccctttcccgagacgtttgacggagataccgaccgactcccggagttcatcgtgcagacgtgctcctacatgttcgtggacgagaacacgttctccaacgacgccctgaaggtgacgttcctcatcacccgcctcacggggccagccctgcagtgggtgatcccctacatcaggaaggagagccccctgctcaatgattaccggggcttcctggccgagatgaagcgggtctttggatgggaggaggacgaggacttctaggccgggagacccttgggcctgggggcgggtgctctgggaagagttcgctgtgccagtggccaccgctagggtctccacaggcgccctccctccgcgcctccctccccctcgagccgccgcgatgtcccctgcgctcctgtcccctcccgcgtagtgcttgcctttgttccaggaatagcgctccaggctcctgctgcagctcctgggccgcactctagagcgcgctgcctccgccctcttttgccagcccagcccctccatgcacatttggacgctgtcctgcacttcaggtgcaagctgggctcctgttacatactggacagaccacccacagccgctgctgccaacccacctccactcctccagactgccagccaactacatcattctgcccacagacctacgctaccactgccatcgccatccaccgcatctcaccaacagactgtggctcctagtgatgtggactcacctcggaggtatccgagctggacacagcccctggacagtgatccagacagctggccgtcccccaaggagcctgtcaccttcagcgagacccatttcctccccatccccagagacctcttgtgttcctgccacatagctgccagggcttaagtgtgcctggcaaccaaatcgaatctctcattttctcctgtggaccagttagttttgcctagaatcctgttggcttgtgtcgccagccaacaggatttttttttttttttttttttttttttaggtttcctgttg

SEQ ID NO: 405347 - DNA, 1380 bp, Homo sapiens
tgggcggagctcgcgcaagcgcctgggctctcccccatggctccgcccacagcccgtcccggcccgggcccccaccctcgacatgcgcttccggcgacgccttagcgctgacccccacgcaacccagcgaaactccgcggagcgcgcgcggcacgatggacggtcgggtgcagctgatgaaggccctcctggccgggcccctccggcccgcggcgcgtcgctggaggaacccgattccctttcccgagacgtttgacggagataccgaccgactcccggagttcatcgtgcagacgtgctcctacatgttcgtggacgagaacacgttctccaacgacgccctgaaggtgacgttcctcatcacccgcctcacggggccagccctgcagtgggtgatcccctacatcaggaaggagagccccctgctcaatgattaccggggcttcctggccgagatgaagcgggtctttggatgggaggaggacgaggacttctaggccgggagacccttgggcctgggggcgggtgctctgggaagagttcgctgtgccagtggccaccgctagggtctccacaggcgccctccctccgcgcctccctccccctcgagccgccgcgatgtcccctgcgctcctgtcccctcccgcgtagtgcttgcctttgttccaggaatagcgctccaggctcctgctgcagctcctgggccgcactctagagcgcgctgcctccgccctcttttgccagcccagcccctccatgcacatttggacgctgtcctgcacttcaggtgcaagctgggctcctgttacatactggacagaccacccacagccgctgctgccaacccacctccactcctccagactgccagccaactacatcattctgcccacagacctacgctaccactgccatcgccatccaccgcatctcaccaacagactgtggctcctagtgatgtggactcacctcggaggtatccgagctggacacagcccctggacagtgatccagacagctggccgtcccccaaggagcctgtcaccttcagcgagacccatttcctccccatccccagagacctcttgtgttcctgccacatagctgccagggcttaagtgtgcctggcaaccaaagtaaatttttatttttccgcgggccaaaaaaataagagacaaaaacaatattttttttagttataaaaaaaagtatatcccacatggagaggactattggttagaccttaaaaataaaagagtaaacaacagtaagccctgctcccttccctgctctaatacactacctgtacaaaggttttttccttatttttaataaatgtcagacactattaaaatagaaactattaaatagaaaaaaaaa

SEQ ID NO: 405348 - DNA, 636 bp, Homo sapiens
taaatgagctggtacggcatgtgctgtaggccagcgaaactccgcggagcgcgcgcggcacgatggacggtcgggtgcagctgatgaaggccctcctggccgggcccctccggcccgcggcgcgtcgctggaggaacccgattccctttcccgagacgtttgacggagataccgaccgactcccggagttcatcgtgcagacgtgctcctacatgttcgtggacgagaacacgttctccaacgacgccctgaagacctacgctaccactgccatcgccatccaccgcatctcaccaacagactgtggctcctagtgatgtggactcaccttcagcgagacccatttcctccccatccccagagacctcttgtgttcctgccacatagctgccagggcttaagtgtgcctggcaaccaaatcgaatctctcattttctcctgtggaccagttagttttgcctagaatcctgttttcttctgaatttgcagctgtctctctgatgggtgccttttgttcaacacagtaagccctgctcccttccctgctctaatacactacctgtacaaaggttttttccttatttttaataaatgtcagacactattaaaatagaaactattaaatagaaaaaaaaa

SEQ ID NO: 405349 - DNA, 1046 bp, Homo sapiens
tgggcggagctcgcgcaagcgcctgggctctcccccatggctccgcccacagcccgtcccggcccgggcccccaccctcgacatgcgcttccggcgacgccttagcgctgacccccacgcaacccagcgaaactccgcggagcgcgcgcggcacgatggacggtcgggtgcagctgatgaaggccctcctggccgggcccctccggcccgcggcgcgtcgctggaggaacccgattccctttcccgagacgtttgacggagataccgaccgactcccggagttcatcgtgcagacgtgctcctacatgttcgtggacgagaacacgttctccaacgacgccctgaagacctacgctaccactgccatcgccatccaccgcatctcaccaacagactgtggctcctagtgatgtggactcacctcggaggtatccgagctggacacagcccctggacagtgatccagacagctggccgtcccccaaggagcctgtcaccttcagcgagacccatttcctccccatccccagagacctcttgtgttcctgccacatagctgccagggcttaagtgtgcctggcaaccaaatcgaatctctcattttctcctgtggaccagttagttttgcctagaatcctgttttcttctgaatttgcagctgtctctctgatgggtgccttttgttcaacacagtaagccctgctcccttccctgctctaatacactacctgtacaaaggttttttccttatttttaataaatgtcagacactattaaaatagaaaaaaaaaaacaaaaaaaaaagaagaaaaaatgaaagagaaaaagaaaaaagggggcagccaataataaattcccgaagggacaccctatgactgtgacacacagagtgtattataaaagaggggcccatataagaaagacaaataataaacagcaaccaggtgcgaggataacacaaacgcgtatgagtaaacaaaaaacagagggacgacaattgagaagaacacacacacatgggggcggaaaacatgagacacacccaa

SEQ ID NO: 405350 - DNA, 1594 bp, Homo sapiens
tgggcggagctcgcgcaagcgcctgggctctcccccatggctccgcccacagcccgtcccggcccgggcccccaccctcgacatgcgcttccggcgacgccttagcgctgacccccacgcaacccagcgaaactccgcggagcgcgcgcggcacgatggacggtcgggtgcagctgatgaaggccctcctggccgggcccctccggcccgcggcgcgtcgctggaggaacccgattccctttcccgagacgtttgacggagataccgaccgactcccggagttcatcgtgcagacgtgctcctacatgttcgtggacgagaacacgttctccaacgacgccctgaaggtgacgttcctcatcacccgcctcacggggccagccctgcagtgggtgatcccctacatcaggaaggagagccccctgctcaatgattaccggggcttcctggccgagatgaagcgggtctttggatgggaggaggacgaggacttctaggccgggagacccttgggcctgggggcgggtgctctgggaagagttcgctgtgccagtggccaccgctagggtctccacaggcgccctccctccgcgcctccctccccctcgagccgccgcgatgtcccctgcgctcctgtcccctcccgcgtagtgcttgcctttgttccaggaatagcgctccaggctcctgctgcagctcctgggccgcactctagagcgcgctgcctccgccctcttttgccagcccagcccctccatgcacatttggacgctgtcctgcacttcaggtgcaagctgggctcctgttacatactggacagaccacccacagccgctgctgccaacccacctccactcctccagactgccagccaactacatcattctgcccacagacctacgctaccactgccatcgccatccaccgcatctcaccaacagactgtggctcctagtgatgtggactcacctcggaggtatccgagctggacacagcccctggacagtgatccagacagctggccgtcccccaaggagcctgtcaccttcagcgagacccatttcctccccatccccagagacctcttgtgttcctgccacatagctgccagggcttaagtgtgcctggcaaccaaatcgaatctctcattttctcctgtggaccagttagttttgcctagaatcctgttttcttctgaatttgcagctgtctctctgatgggtgccttttgttcaacacagtaagccctgctcccttccctgctctaatacactacctgtacaaaggttttttccttatttttaataaatgtcagacactattaaaatagaaaaaaaaaaacaaaaaaaaaagaagaaaaaatgaaagagaaaaagaaaaaagggggcagccaataataaattcccgaagggacaccctatgactgtgacacacagagtgtattataaaagaggggcccatataagaaagacaaataataaacagcaaccaggtgcgaggataacacaaacgcgtatgagtaaacaaaaaacagagggacgacaattgagaagaacacacacacatgggggcggaaaacatgagacacacccaa

SEQ ID NO: 405351 - DNA, 1154 bp, Homo sapiens
tgggcggagctcgcgcaagcgcctgggctctcccccatggctccgcccacagcccgtcccggcccgggcccccaccctcgacatgcgcttccggcgacgccttagcgctgacccccacgcaacccagcgaaactccgcggagcgcgcgcggcacgatggacggtcgggtgcagctgatgaaggccctcctggccgggcccctccggcccgcggcgcgtcgctggaggaacccgattccctttcccgagacgtttgacggagataccgaccgactcccggagttcatcgtgcagacgtgctcctacatgttcgtggacgagaacacgttctccaacgacgccctgaaggtgcaagctgggctcctgttacatactggacagaccacccacagccgctgctgccaacccacctccactcctccagactgccagccaactacatcattctgcccacagacctacgctaccactgccatcgccatccaccgcatctcaccaacagactgtggctcctagtgatgtggactcacctcggaggtatccgagctggacacagcccctggacagtgatccagacagctggccgtcccccaaggagcctgtcaccttcagcgagacccatttcctccccatccccagagacctcttgtgttcctgccacatagctgccagggcttaagtgtgcctggcaaccaaatcgaatctctcattttctcctgtggaccagttagttttgcctagaatcctgttttcttctgaatttgcagctgtctctctgatgggtgccttttgttcaacacagtaagccctgctcccttccctgctctaatacactacctgtacaaaggttttttccttatttttaataaatgtcagacactattaaaatagaaaaaaaaaaacaaaaaaaaaagaagaaaaaatgaaagagaaaaagaaaaaagggggcagccaataataaattcccgaagggacaccctatgactgtgacacacagagtgtattataaaagaggggcccatataagaaagacaaataataaacagcaaccaggtgcgaggataacacaaacgcgtatgagtaaacaaaaaacagagggacgacaattgagaagaacacacacacatgggggcggaaaacatgagacacacccaa

SEQ ID NO: 405352 - DNA, 1055 bp, Homo sapiens
tatctctaaaaacaacaacaacaacaacaaacaaacaaaaaaccccatgaatttttactgatatttctaattcaaatttaggattgcagggttttgtttaacctctttgactttatatcattttttttcttatactgaaaatcttgatcttaacaacagtaatgtggttacttactcttttcctacacacacagagatctgtaaaatcatatatattatttgtaatatatatgaatccaagtgacaatatgaatgttattgttagcagtatgattactttgaagtcacttgaaataatttctctctattgttgttaagccacaaattcaatacacagttaaggttcatttgtttttatttgctttcagttttggggggttgcttttttcctttcaattttaccttacattatgtagatcatttatattgttccaaagggaaattttaaaaagttaaatacaaattgtgttcagagaggtctagcttccatctctgctccctccattctgtatcttcccattctctgtagttagctaaatgttttaaaacacctttttggttataatttctattgtttgtttattttaggaaaatgcattcataaaaaaaactttactgaggtgtaatttacataccatcaaatcaactaatttaatgatttttatgagttgtacaatcatcaccataatctagtttggggacattttcatcatccaaataagatccttcttgttcatttacagttactgcacattttcatcaccagcctcaggcagccactaatttattttctatcttgatagatttgcttattctggacatttcatataaatggaatcctatgatagatggtcttttgtatctggcttttttcacttaacataatattttttggttcatccatgttgtggcacatatcagtacgtcattcttttttattgctgaatattctgttgtatggatatatcatgtattttgtttaaatattaagccagttgatagacatttgagtggttttcactttttcactgttataaataaagttatttgcatac

SEQ ID NO: 405353 - DNA, 587 bp, Homo sapiens
agggtcagacaatgaagaagctggggcagccaagagtcataagaatgggagcctgcccacctgagttcctgagggcttgcgtcagaactgagaaaggcagctagacgttcagcctgcccctcaactctactccgaaccaatctccctgagacccagggccatggtcagagcagatagagaatgggcctatcctaagaccttggcctttcagagctctgtccatcccgacacctgacccctcgcatggggagtggggcctggtgagtgttctgtttgggtgctgtagggtaagaaaaagggctcccaccttcccaggtttccctgccccagtctatgtgactgggggaagaggcttcatccagcactactgcgtgggacactcttgcctgcccatcatatcttcagccagtagtgaacgtgctggtgacccatttcataggtggtggcctggaagtccagggttgttgaatgaccacgcacacagtcagggaggactctgaaggtagggtcctgggacacctggcctgacagagctgccatcagctctgacagctgacacaggcacgaaggcagctagcctaagccac

SEQ ID NO: 405354 - DNA, 278 bp, Homo sapiens
gactcacccaaggccacaaagccagtgttaggcagggctgtgccagaatccaggttgtaaccattatgctctgtcacctcccaagtatatggaaataatttatgaattaggaaatgataggtgtgtcaactctcctcccccacatccacaagccttctaataatcttttgcttttcagcagaagtctcaagactggagagtgaccaaaaactgcagtgttcactgattttatgtatagcacattaaagaatagcattggctagattttgagatttttt

SEQ ID NO: 405355 - DNA, 1985 bp, Homo sapiens
tcagctgtcaccaaggtcactgctgcctatgaccgccaacagctctggaaagccaacgtcggctttgttatccagctccaggcccgcctccgtggcttcctagttcggcagaagtttgctgagcattcccactttctgaggacctggctcccagcagtcatcaagatccaggctcattggcggggttataggcagcggaagatttacctggagtggttgcagtattttaaagcaaacctggatgccataatcaagatccaggcctgggcccggatgtgggcagctcggaggcaatacctgaggcgtctgcactacttccagaagaatgttaactccattgtgaagatccaggcatttttccgagccaggaaagcccaagatgactacaggatattagtgcatgcaccccaccctcctctcagtgtggtacgcagatttgcccatctcttgaatcaaagccagcaagacttcttggctgaggcagagctgctgaagctccaggaagaggtagttaggaagatccgatccaatcagcagctggagcaggacctcaacatcatggacatcaagattggcctgctggtgaagaaccggatcactctgcaggaagtggtctcccactgcaagaagctgaccaagaggaataaggaacagctgtcagatatgatggttctggacaagcagaagggtttaaagtcgctgagcaaagagaaacggcagaaactagaagcataccaacacctcttctacctgctccagactcagcccatctacctggccaagctgatctttcagatgccacagaacaaaaccaccaagttcatggaggcagtgattttcagcctgtacaactatgcctccagccgccgagaggcctatctcctgctccagctgttcaagacagcactccaggaggaaatcaagtaggctctccagacacaaaggaatggggagagaatgggttaagagatccccctgttggctccttcacaaggtgacaacttgttgaggcctaagggtagaaatggaatcagaagacctcttttctctacctcctgtggagaaaccgtaaaacatctgggacagcacagtgggaggatatgggctgacatgctaacacaaaggatgagagagatatcaagacattccttaagagcggggacaccagggcaggctttgagagccaaaatctcaaaaaggaaaagcaacggtatgtcctacacagaggcagaagactggtttcaatgacctcttaaaccacaggtcaaaggtggagcagccccaggacgtggtgacaggcaacccaacagtggtgaggctggtggtgagattctaccgtaatgggcggggacagagtgccctgcaggagattctgggcaaggttatccaggatgtgctagaagacaaagtgctcagcgtccacacagaccctgtccacctctataagaactggatcaaccagactgaggcccagacagggcagcgcagccatctcccatatgatgtcaccccggagcaggccttgagccaccccgaggtccagagacgactggacatcgccctacgcaacctcctcgccatgactgataagttccttttagccatcacctcatctgtggaccaaattccgtatgtgcaacagccccaccccagcctacgcatgggatttcaagagggccaggccaccatggggagcagagcagggtgatagtcctgcagggaggaaggcagggagggagatggagccaggggtactcagaggggttcctgaagagatgtggggaatgctcgaagctcctgctagagagctgagctgagagacggcgtgcaagtctgtgtgtggcctggtaggatgtcagtggaaccagaggagggaccctaaaatgatctcagggacactttattagctaagagcaaatgaggagaaaatgggactcttcagttcccaatatcaaaaataaatattttaagcccaaaaaaaaaaa

SEQ ID NO: 405356 - DNA, 231 bp, Homo sapiens
gcactgattctagaccgtatgttctgtgccctgggatggcctaggctagttgtatcacccgctcctccacccctgcaggaagtggtctcccactgcaagaagctgaccaagaggaataaggaacagctgtcagatatgatggttctggacaagcagaagggtttaaagtcgctgagcaaagagaaacggcagaaactagaagcataccaacacctcttctacctgctccag

SEQ ID NO: 405357 - DNA, 1645 bp, Homo sapiens
tcagctgtcaccaaggtcactgctgcctatgaccgccaacagctctggaaagccaacgtcggctttgttatccagctccaggcccgcctccgtggcttcctagttcggcagaagtttgctgagcattcccactttctgaggacctggctcccagcagtcatcaagatccaggctcattggcggggttataggcagcggaagatttacctggagtggttgcagtattttaaagcaaacctggatgccataatcaagatccaggcctgggcccggatgtgggcagctcggaggcaatacctgaggcgtctgcactacttccagaagaatgttaactccattgtgaagatccaggcatttttccgagccaggaaagcccaagatgactacaggatattagtgcatgcaccccaccctcctctcagtgtggtacgcagatttgcccatctcttgaatcaaagccagcaagacttcttggctgaggcagagctgctgaagctccaggaagaggtagttaggaagatccgatccaatcagcagctggagcaggacctcaacatcatggacatcaagattggcctgctggtgaagaaccggatcactctgcaggaagtggtctcccactgcaagaagctgaccaagaggaataaggaacagctgtcagatatgatggttctggacaagcagaagggtttaaagtcgctgagcaaagagaaacggcagaaactagaagcataccaacacctcttctacctgctccagactcagcccatctacctggccaagctgatctttcagatgccacagaacaaaaccaccaagttcatggaggcagtgattttcagcctgtacaactatgcctccagccgccgagaggcctatctcctgctccagctgttcaagacagcactccaggaggaaatcaagtcaaaggtggagcagccccaggacgtggtgacaggcaacccaacagtggtgaggctggtggtgagattctaccgtaatgggcggggacagagtgccctgcaggagattctgggcaaggttatccaggatgtgctagaagacaaagtgctcagcgtccacacagaccctgtccacctctataagaactggatcaaccagactgaggcccagacagggcagcgcagccatctcccatatgatgtcaccccggagcaggccttgagccaccccgaggtccagagacgactggacatcgccctacgcaacctcctcgccatgactgataagttccttttagccatcacctcatctgtggaccaaattccgtatgtgcaacagccccaccccagcctacgcatgggatttcaagagggccaggccaccatggggagcagagcagggtgatagtcctgcagggaggaaggcagggagggagatggagccaggggtactcagaggggttcctgaagagatgtggggaatgctcgaagctcctgctagagagctgagctgagagacggcgtgcaagtctgtgtgtggcctggtaggatgtcagtggaaccagaggagggaccctaaaatgatctcagggacactttattagctaagagcaaatgaggagaaaatgggactcttcagttcccaatatcaaaaataaatattttaagcccaaaaaaaaaaa

SEQ ID NO: 405358 - DNA, 421 bp, Homo sapiens
cagcttcctggtcaacgactgcagcctcatccacaacaatgtctgcatggccgccgtgttcgtggaccgagctggcgagtggaagcttgggggcctggactacatgtattcggcccagggcaacggtgggggacctccccgcaaggggatccccgagcttgagcagtatgaccccccggagttggctgacagcagtggcagagtggtcagagagaagtggtgggtgactgggggcagcgcgccccaacctgccctgtcctggaggcccctgcagcctcaggactcctagactagttggcactcccctgttccctgctgcctggctggggagggaatcagtgtcccaggagtgagggacactcctctgcccccagggtcctcagggcggtagggcgggatggacacagcattcggggttggg

SEQ ID NO: 405359 - DNA, 180 bp, Homo sapiens
caagaatgaattcagttaaaggtatttagggttcaaagaagacaaactgtacaagcccatttcattccttgttgtatacctttccatctgccctcccattttaactatctactgtggcctttttatggaaacagagcaagatcaatgaaggctaatggcaagaataagaaaaagagttga

SEQ ID NO: 405360 - DNA, 469 bp, Homo sapiens
gagctttcgtctcaacacaagtcaggcctcttctttagcaaatggctgagacggggctagggaaatcttgatcacacccattaagtgattcgaaagcgttgcaagtcccctgagcctggtacagcctggacccgtgtttctaggcgaatggatgagatattctgtcttgccgtgtgctaaattggacaggttcaggggaagataatttgtataaaaaggtagttctttactgctaactgccaaacttctgcaatcaaaaacacccgtagcagtaacttgacctaggttaaaaaagtgtgtggatgacaagctcagaaggaatatacaagcaactggaacaaggctttgacttaaaggtttggcgttgtttaaaagcagccccgtatacatattgtgttatgtatatgtattgaatgctgtatttttgctgaattaaagcacacttcaccgacagacgtttgtggttaaa

SEQ ID NO: 405361 - DNA, 242 bp, Homo sapiens
gcacttgggtcaggttgcagtcagacattgtcagcagcatcttacctaagaaggtcaggatagttcatttattttggggggcagttaagacatcagctgtccagcagtctcccttatcaggagcacagctaggaaccagtgaataagcaaaatgagaatctcaggctggccagcaaagatatcccaatgtccatcccttgtcctgctggctgcctgcctgccccagtctttcactggcaact

SEQ ID NO: 405362 - DNA, 284 bp, Homo sapiens
gtgtctgtgtgctgccgaatgaagctcaagtggctggatccagctccgaaggccagaagctctaagcagccccttctacaccacaccacccacttcctaatgttgtttttcccaccggcggtggactctgactctgggtggccttgggggtcctggagcttaagaccatgcagaagctgtcactcgggagaccagaagttcagaagtaggagctgcagccgcctgggtctgtggttcttggctgccccgagaggcagttcctctgcttggggagaaagcagggt

SEQ ID NO: 405363 - DNA, 316 bp, Homo sapiens
gtatttacatgttgattttacagatggtgaatctgaggcataggaaggtaaagcaacttgcttacaatcatatgctattaagtgatatcctatattctgcctatcttatccctattttaggtctgttttaataacctcaccccttgcaaagttgggtcatgtcctgggaatcgcaattccaaggactgcttcctgccagatttccaacttgcctagactgcatctctcctctgacctaaagacctcctagtacctgcttgggcttcctcacaaacacaccaccaaatgaacacagctactgccaattatcctccaa

SEQ ID NO: 405364 - DNA, 499 bp, Homo sapiens
catatcaacggatgccgtggagctcggtcttctgcaggaactaaagagcctgtggtttcgattcccagccggaaactgtcttgggtacaggtcccttacagcgtctggctgtaatggctccggaaaacctggggaagggaagggggcctcctgggctctcacctgacacaactaagggaatctgggttagatggtgaaaggaagagaaggttcagagggcggctgtgcgcctgcgccgggcgcggcggctcacacctgtaatcccagcacgttgggaggccgaggcaggcggatcacgaggtcaggagatcgagaccatcctggctaacacggtgaaaccccgtctctactaaaaatacaaaaaatgagccgggcgtggtggcgggcgcctgtagtcccagctacttgggaggctgaggcaggagaatggcgtgaacccgggaggcggagtttgcagtgagccgagatcgcgccaccgcactccagcctgggcgacaga

SEQ ID NO: 405365 - DNA, 216 bp, Homo sapiens
cattcaacaccctcaacacattccagctacatcaaaagagtctggttcctaccttctggccttaggataatgacagaatgtagtacatcctaagttccagagagttaccaaaaacagagacagcattctggacaaacacaaagattagagaagcaccttaaatctttggccagatggattcgtgagatccttctactacactaggcaagactggga

SEQ ID NO: 405366 - DNA, 412 bp, Homo sapiens
gaagaaggaaccaggcaagggaaggttggggtatattggtttaggctcccctagaagcagactttgagccggaagtgggagtgtaaataagtgtatttgggagaggatcccaagaaacaccatcggaggagtgggaaatgagggggaagaggagcagtcattgaagggtgccgggtaaaacacgcatcttggattttggttgctgagagagtcagtcttttttctcatcttaaaatatctggacaaggaagtggctaggattattgtgggagaaactagctcatcggtggttctgggatttgaacccaggattctcggccagcattccagcaacagggactgatatgttttggctgtgtccccacccaaatctcatcttgaattgtagctcccatcattctctggggctttt

SEQ ID NO: 405367 - DNA, 202 bp, Homo sapiens
caggcctgagccaccacacctggctgaatataagtactttcttaacagatctgagtagtttttaaatctgtgcatgtggatgatagtaggaaacaaataataaaatgttttagtgaataatgtagaaaaatctaaatccacagaacacttggtaaatagccctgttaatataaaaatttaggggaaaaaactggaaagaata

SEQ ID NO: 405368 - DNA, 479 bp, Homo sapiens
agaaaacacagaagggcaccaacacagcataagcacaagtcaggggaggctgtgacatcagatgggcgctgaatgcgtggctgggaggacaggcaaggcccaaaggagtagctctctgttgttactgttgtgctcttcatggataaatttgttctacagcagtttttaagattctattatatgtggagtaccatttatgaggatacaaaatacaaataagaggatgtcctcaagttggatacagatagtgaaacaaaatttacaaataattacacaataacatgacgaagtctatagtggagccaaacaaaaaggactgcaggaacactaaggggtaagctaaaaatcctgcctgagagaattaagaaaggcttctcagaggagataacatttgagctgggtcctcaagaatgaacaggaattctccagtgggaaaggtcactatgaatgcaatgattagaactacttagtaagcgtac

SEQ ID NO: 405369 - DNA, 4787 bp, Homo sapiens
tctcactatagggctcgagcggccgcccgggcaggtctgaccacagtggttccggggagaagcctttccaggacccatgtgtaggcacaactgttttccctgatcaggatacttgcggcactcaacagaggaaagaaattcctaagggaacactgctcagaaagtactgcagcatgtcttcaaatgcctgaggatcaagttggaaaactagaagcaacagaaaacacaataagcgcaatggcggcggccgcggcggagcagcaacagttctacctgctcctgggaaacctgctcagccccgacaatgtggtccggaaacaggcagaggaaacctatgagaatatcccaggccagtcaaagatcacattcctcttacaagccatcagaaatacaacagctgctgaagaggctagacaaatggccgccgttctcctaagacgtctcttgtcctctgcatttgatgaagtctatccagcacttccctctgatgttcagactgccatcaagagtgagctactcatgattattcagatggaaacacaatctagcatgaggaaaaaagtttgtgatattgcggcagaactggccaggaatttaatagatgaggatggcaataaccagtggcccgaaggtttgaagttcctttttgattcagtcagctctcaaaatgtgggactgcgggaagctgcccttcacattttctggaactttcctggaatttttgggaaccagcaacaacactatttagatgtcatcaaacgaatgttagttcagtgtatgcaagatcaggaacacccgtcgatcaggacgttatctgctagagctacagctgcatttatacttgcaaatgagcataatgttgctctgttcaaacattttgcagacttgctaccgggattcctacaggcggtaaatgactcgtgctaccagaatgatgattctgtcctaaaatccctcgttgagattgcagatactgttccaaagtatttgcgtcctcacttggaagcaactctacagctaagtctaaagttgtgtggagacactagcctcaacaatatgcaacgccagcttgcccttgaagtgatcgtcaccctctctgagactgcagctgctatgttaagaaaacataccaatattgttgcacagactattcctcagatgttagcaatgatggttgatttggaagaagatgaggactgggcaaatgcagatgaactagaagatgatgattttgacagcaatgcagttgcaggcgagagtgctctagatcgaatggcttgcggacttggtggaaagctcgttctgccgatgatcaaggaacacattatgcaaatgcttcaaaatcctgactggaaataccggcatgcaggattgatggccttatctgccattggtgaagggtgccaccagcaaatggaaggaattctaaatgagatcgtaaattttgttttactttttctccaggatcctcatccaagagtaaggtatgcagcctgtaatgccgtgggacagatggctacagattttgcacctggtttccaaaagaaatttcatgagaaggtgattgcagctctgctgcagaccatggaagaccaaggcaatcaacgtgtgcaggcccatgcagctgctgccctcattaactttactgaagactgtcccaagtcactacttattccatacttggataatttggtgaaacatctgcattccattatggtactgaagcttcaagagctgattcagaaaggcaccaagttagttttggaacaagttgtgacatccattgcatcagttgccgatactgcagaagaaaaatttgtcccctactatgatttatttatgccatcactgaagcacatcgttgagaatgcggttcaaaaagaactgagacttctgagaggaaaaactattgaatgcattagcctcattggtctggctgttgggaaggaaaaattcatgcaggatgcatcagatgtgatgcagcttttgttaaagacccagacagacttcaatgatatggaagatgatgatcctcagatctcttacatgatctcagcatgggccagaatgtgcaaaatccttggaaaagaatttcagcaataccttccagtggttatggggcctttaatgaagacggcttcaattaagcccgaagtagcccttttagatacccaagacatggagaatatgagtgatgatgatggttgggaatttgtgaaccttggagatcagcaaagctttggtattaaaactgcaggactagaagaaaaatcaactgcttgccagatgttggtttgctatgctaaggagttaaaggaaggctttgtggagtacaccgaacaggttgtcaaactgatggtccctttactgaaattttatttccacgatggtgttcgagtggcagcagcggaatccatgcctcttctcctggagtgtgcaagagtccgtggtcctgagtatctcacacagatgtggcattttatgtgtgatgctctaattaaggccattggtacagaaccagattcagacgtcctctcagaaataatgcattcttttgcaaagtgcattgaagtaatgggagatggatgccttaataatgaacactttgaagaactgggaggtatattgaaagcaaagcttgaagaacattttaaaaatcaagaattacgacaagttaaaagacaagatgaagactatgatgaacaggtcgaagagtcactacaagatgaggatgataatgatgtttatattctgaccaaagtgtcagatattttacactcaatattcagtagctacaaagaaaaggtgttaccatggtttgaacagctgcttccattaattgtcaacctcatttgtccacatagaccatggccagacagacaatggggattatgcatctttgatgatgtcatagaacactgtagtccagcctcatttaaatacgcagaatatttcttaagaccaatgctccaatatgtatgtgacaacagcccagaagtcaggcaagcagctgcatatggcctgggagtcatggcacagtacggtggagataattatcgccctttttgtacagaagcacttcccctgctggtaagagttattcagtctgcggattctaagaccaaagaaaatgtcaatgctacagagaactgcatctcagcagtagggaaaatcatgaagttcaagcctgactgtgtaaacgttgaagaggtccttccacactggttgtcttggcttccactacatgaagataaagaagaagctgttcagactttcaattatctgtgtgacctgattgaaagtaatcatccaattgttcttggcccaaacaataccaatctgcccaaaatatttagtataattgcggaaggagaaatgcacgaggcaattaaacatgaagatccttgtgccaaacgtctggccaatgtcgttcgccaagtacagacttctggaggactgtggactgagtgcatagcacagctcagtcctgagcagcaggccgccattcaggagctcctgaactctgcgtgaagggccttaatgtcacccaccagaaaactaactccaaataaacgcttaccctttcctttaggtttctttgttttgtttttgagcaaaagagatcggtagtgttgtgtgtaggccattcttctggagagccacaagcaggaagagcagcgctgtgttgcagaatggagtttccatggatttctaccagaccactgaaggagttcctggaagccctgcggtagctagcactgaagactatttttctattggtataacccgcccacctgaaggggaaagggaaatcaaattaatttttctcgttagacataaggaaatttaaggaaaaacagctttaagaacagttactcagcgtagatgtgtgttcacacaaattgctctgcattcagtgttcattgtgaattgggagtgtgagtctttctgtagggtagaaagaagcctcctacccagcaaaccagtagacccaaaagttgaaaaaaactgatgacagacaacaagcatgaagatggcatatttgatgtcactttggttctttttcccagaaggcttatacagtgactcagtcgggaagctttccagcttccagcccttgaatgtgaagtgtcattggcatgtctggcagtagtctctcattcactcctcaataaacaacattgaatacaaaagaggcttgtgtaaaaactcagtactgtctggcttggattcatttcatgtttttaatataagaatgatctaatatttttttaaagtaatagctatcagtaatagctgagtgttttttcccctaatattttccttgtgcaattcagacttaagcatcgagtttttaccatcttccactttaagctaagttatgatacctattccattcacaattggtgttctttttaaggtttgcaaatttcagccaattttgtagctaagattgttctgatcagctcaaaaagatttggcttagtgttttcattgcaaattataattgctgtagagccacacacaacttttgaacttttaattataagtgttatggctaaagttatttactgaaaatttcagtaaaatgtgtgaatgtttctttatgtattaacctcatagcagtaaatgacttgctgttgtttaatttttctaaggcatcttaatagacttctgttgaaaacttcagtgttaacatttttatagtttgtactaaatttaaccgtgatataaaaatgaattttatgcatagatcagaattttaaattaaaggttttttctttaaa

SEQ ID NO: 405370 - DNA, 701 bp, Homo sapiens
ccacattgcaggagccttaagtatgtaatggttattatagtttcactgattttcattttgacttagatgtaaatctgttttgaatgtttctagttaacatccatcagaaggaaggtatacatgtgcctgcaggtagaacatttgcataatatagattgctaaattatttagtgaaaaatagtttagtaatatttctctattgtcagcatcttaggaatcttttggctaatgaggcattataaagtgaatcttcagcaccgactttctgtttcatcttttctaggcggtaaatgactcgtgctaccagaatgatgattctgtcctaaaatccctcgttgagattgcagatactgttccaaagtatttgcgtcctcacttggaagcaactctacagctaagtctaaagttgtgtggagacactagcctcaacaatatgcaacgccagcttgcccttgaagtgatcgtcaccctctctgagactgcagctgctatgttaagaaaacataccaatattgttgcacagactagtaagtcaatggtcttcagatagtttatgtgtattgtggccaaatttttggataaatttgctgagggttgtgtgatttctcagattgttgagaatataatgaatatccttttagaatcagatgaatttgggaaaatgcatctcaatacatgcaagcgtggacccccacattgtg

SEQ ID NO: 405371 - DNA, 207 bp, Homo sapiens
tcgcgcacacatcactgctagtggctctccagaagaatggccaatgtcgttcgccaagtacagacttctggaggactgtggactgagtgcatagcacagctcagtcctgagcagcaggccgccattcaggagctcctgaactctgcgtgaagggccttaatgtcacccaccagaaaactaactccaaataaacgcttaccctttcct

SEQ ID NO: 405372 - DNA, 6271 bp, Homo sapiens
  misc_feature (41)..(41): n is a, c, g, or t
cgtacccatatccgcagcaggtctccaaggtgaacagcttntgttaaagacccagacagacttcaatgatatggaagatgatgatcctcagatctcttacatgatctcagcatgggccagaatgtgcaaaatccttggaaaagaatttcagcaataccttccagtggttatggggcctttaatgaagacggcttcaattaagcccgaagtagcccttttagatacccaagacatggagaatatgagtgatgatgatggttgggaatttgtgaaccttggagatcagcaaagctttggtattaaaactgcaggactagaagaaaaatcaactgcttgccagatgttggtttgctatgctaaggagttaaaggaaggctttgtggagtacaccgaacaggttgtcaaactgatggtccctttactgaaattttatttccacgatggtgttcgagtggcagcagcggaatccatgcctcttctcctgtctcccctccctccttctctctcacgcctagcgcaatggcggcggccgcggcggagcagcaacagttctacctgctcctgggaaacctgctcagccccgacaatgtggtccggaaacaggcagaggaaacctatgagaatatcccaggccagtcaaagatcacattcctcttacaagccatcagaaatacaacagctgctgaagaggctagacaaatggccgccgttctcctaagacgtctcttgtcctctgcatttgatgaagtctatccagcacttccctctgatgttcagactgccatcaagagtgagctactcatgattattcagatggaaacacaatctagcatgaggaaaaaagtttgtgatattgcggcagaactggccaggaatttaatagatgaggatggcaataaccagtggcccgaaggtttgaagttcctttttgattcagtcagctctcaaaatgtgggactgcgggaagctgcccttcacattttctggaactttcctggaatttttgggaaccagcaacaacactatttagatgtcatcaaacgaatgttagttcagtgtatgcaagatcaggaacacccgtcgatcaggacgttatctgctagagctacagctgcatttatacttgcaaatgagcataatgttgctctgttcaaacattttgcagacttgctaccgggattcctacaggcggtaaatgactcgtgctaccagaatgatgattctgtcctaaaatccctcgttgagattgcagatactgttccaaagtatttgcgtcctcacttggaagcaactctacagctaagtctaaagttgtgtggagacactagcctcaacaatatgcaacgccagcttgcccttgaagtgatcgtcaccctctctgagactgcagctgctatgttaagaaaacataccaatattgttgcacagactattcctcagatgttagcaatgatggttgatttggaagaagatgaggactgggcaaatgcagatgaactagaagatgatgattttgacagcaatgcagttgcaggcgagagtgctctagatcgaatggcttgcggacttggtggaaagctcgttctgccgatgatcaaggaacacattatgcaaatgcttcaaaatcctgactggaaataccggcatgcaggattgatggccttatctgccattggtgaagggtgccaccagcaaatggaaggaattctaaatgagatcgtaaattttgttttactttttctccaggatcctcatccaagagtaaggtatgcagcctgtaatgccgtgggacagatggctacagattttgcacctggtttccaaaagaaatttcatgagaaggtgattgcagctctgctgcagaccatggaagaccaaggcaatcaacgtgtgcaggcccatgcagctgctgccctcattaactttactgaagactgtcccaagtcactacttattccatacttggataatttggtgaaacatctgcattccattatggtactgaagcttcaagagctgattcagaaaggcaccaagttagttttggaacaagttgtgacatccattgcatcagttgccgatactgcagaagaaaaatttgtcccctactatgatttatttatgccatcactgaagcacatcgttgagaatgcggttcaaaaagaactgagacttctgagaggaaaaactattgaatgcattagcctcattggtctggctgttgggaaggaaaaattcatgcaggatgcatcagatgtgatgcagcttttgttaaagacccagacagacttcaatgatatggaagatgatgatcctcagatctcttacatgatctcagcatgggccagaatgtgcaaaatccttggaaaagaatttcagcaataccttccagtggttatggggcctttaatgaagacggcttcaattaagcccgaagtagcccttttagatacccaagacatggagaatatgagtgatgatgatggttgggaatttgtgaaccttggagatcagcaaagctttggtattaaaactgcaggactagaagaaaaatcaactgcttgccagatgttggtttgctatgctaaggagttaaaggaaggctttgtggagtacaccgaacaggttgtcaaactgatggtccctttactgaaattttatttccacgatggtgttcgagtggcagcagcggaatccatgcctcttctcctggagtgtgcaagagtccgtggtcctgagtatctcacacagatgtggcattttatgtgtgatgctctaattaaggccattggtacagaaccagattcagacgtcctctcagaaataatgcattcttttgcaaagtgcattgaagtaatgggagatggatgccttaataatgaacactttgaagaactgggaggtatattgaaagcaaagcttgaagaacattttaaaaatcaagaattacgacaagttaaaagacaagatgaagactatgatgaacaggtcgaagagtcactacaagatgaggatgataatgatgtttatattctgaccaaagtgtcagatattttacactcaatattcagtagctacaaagaaaaggtgttaccatggtttgaacagctgcttccattaattgtcaacctcatttgtccacatagaccatggccagacagacaatggggattatgcatctttgatgatgtcatagaacactgtagtccagcctcatttaaatacgcagaatatttcttaagaccaatgctccaatatgtatgtgacaacagcccagaagtcaggcaagcagctgcatatggcctgggagtcatggcacagtacggtggagataattatcgccctttttgtacagaagcacttcccctgctggtaagagttattcagtctgcggattctaagaccaaagaaaatgtcaatgctacagagaactgcatctcagcagtagggaaaatcatgaagttcaagcctgactgtgtaaacgttgaagaggtccttccacactggttgtcttggcttccactacatgaagataaagaagaagctgttcagactttcaattatctgtgtgacctgattgaaagtaatcatccaattgttcttggcccaaacaataccaatctgcccaaaatatttagtataattgcggaaggagaaatgcacgaggcaattaaacatgaagatccttgtgccaaacgtctggccaatgtcgttcgccaagtacagacttctggaggactgtggactgagtgcatagcacagctcagtcctgagcagcaggccgccattcaggagctcctgaactctgcgtgaagggccttaatgtcacccaccagaaaactaactccaaataaacgcttaccctttcctttaggtttctttgttttgtttttgagcaaaagagatcggtagtgttgtgtgtaggccattcttctggagagccacaagcaggaagagcagcgctgtgttgcagaatggagtttccatggatttctaccagaccactgaaggagttcctggaagccctgcggtagctagcactgaagactatttttctattggtataacccgcccacctgaaggggaaagggaaatcaaattaatttttctcgttagacataaggaaatttaaggaaaaacagctttaagaacagttactcagcgtagatgtgtgttcacacaaattgctctgcattcagtgttcattgtgaattgggagtgtgagtctttctgtagggtagaaagaagcctcctacccagcaaaccagtagacccaaaagttgaaaaaaactgatgacagacaacaagcatgaagatggcatatttgatgtcactttggttctttttcccagaaggcttatacagtgactcagtcgggaagctttccagcttccagcccttgaatgtgaagtgtcattggcatgtctggcagtagtctctcattcactcctcaataaacaacattgaatacaaaagaggcttgtgtaaaaactcagtactgtctggcttggattcatttcatgtttttaatataagaatgatctaatatttttttaaagtaatagctatcagtaatagctgagtgttttttcccctaatattttccttgtgcaattcagacttaagcatcgagtttttaccatcttccactttaagctaagttatgatacctattccattcacaattggtgttctttttaaggtttgcaaatttcagccaattttgtagctaagattgttctgatcagctcaaaaagatttggcttagtgttttcattgcaaattataattgctgtagagccacacacaacttttgaacttttaattataagtgttatggctaaagttatttactgaaaatttcagtaaaatgtgtgaatgtttctttatgtattaacctcatagcagtaaatgacttgctgttgtttaatttttctaaggcatcttaatagacttctgttgaaaacttcagtgttaacatttttatagtttgtactaaatttaaccgtgatataaaaatgaattttatgcatagatcagaattttaaattaaaggttttttctttaaatgatttgtattactttattaaaactaaatctgaaatggaatagaaaatagaatggattacatacagatggtttccttgttagcagatgcccttcaaatatattttacgtttgcagcacaacaccattgcccggaggcttccgaatctagcaaagcagcatattaaatgactccacctgcgcagtccttgtgttcagtggatgaatacctgtgggctcttgtaatgtgtggtaatatttggagctttatagcctgtattccttgggagaaaaaaatgggaattggagtaaaaagtgtgtcaagacaacccctttctgctttcttatgtagcatctgcaaagccgattcatgtactgatgccaatcagctagagcaatgtaggctttttttaatttaaattattactacactttattactacacttgcagaaaagaaacatgttaaaatcatggcacacctgcagaatttcagatgacagtgtggtcagaagatgttttttgggagaacctagtgtttgctgggcactatgctaagcactttgggagcaagaacctcctaccttccagtttaaacactagtggtattgtcagatgccgttagtatctgagatgtacttacggcagggttctaagagctctgaaagaagcgctctgttagatgcagactggcagcatcctccttgataaaagcagaaaagcaaagaggtaattggagttgaatcaagttaatagggaaggttggtagtaaatgctgttagtgtgacatgattctgaaacccagagctcagaactaactgtgagatgtaccatgaactaacaattctttgaaaggacctgcagaagcatttttaatacctcattctgtctatgcaagatgaaaatccatggagttttttcttggcttttgtaccaaatttaggggtcttgcatgtcagcaagtgatatatattgtttataaatgcaagctatttctggaggggaaaaatgtgtgtggctcttacgttttctgggaattttgtaacaagttacacgcacaagtgttagaaactttggcataactcaatttggagtattttttaaatgctgtatctttaaagaaaagtaaaattgtcttaaatctaattgacacttctgtaatgagaggcaaccttataactctggagttgtagtttgacagaaccatcagtaaagacataagcaaat

SEQ ID NO: 405373 - DNA, 5992 bp, Homo sapiens
attgatgacctcccacaactggagcagccgggaacagctctgaccacagtggttccggggagaagcctttccaggacccatgtgtaggcacaactgttttccctgatcaggatacttgcggcactcaacagaggaaagaaattcctaagggaacactgctcagaaagtactgcagcatgtcttcaaatgcctgaggatcaagttggaaaactagaagcaacagaaaacacaataagcgcaatggcggcggccgcggcggagcagcaacagttctacctgctcctgggaaacctgctcagccccgacaatgtggtccggaaacaggcagaggaaacctatgagaatatcccaggccagtcaaagatcacattcctcttacaagccatcagaaatacaacagctgctgaagaggctagacaaatggccgccgttctcctaagacgtctcttgtcctctgcatttgatgaagtctatccagcacttccctctgatgttcagactgccatcaagagtgagctactcatgattattcagatggaaacacaatctagcatgaggaaaaaagtttgtgatattgcggcagaactggccaggaatttaatagatgaggatggcaataaccagtggcccgaaggtttgaagttcctttttgattcagtcagctctcaaaatgtgggactgcgggaagctgcccttcacattttctggaactttcctggaatttttgggaaccagcaacaacactatttagatgtcatcaaacgaatgttagttcagtgtatgcaagatcaggaacacccgtcgatcaggacgttatctgctagagctacagctgcatttatacttgcaaatgagcataatgttgctctgttcaaacattttgcagacttgctaccgggattcctacaggcggtaaatgactcgtgctaccagaatgatgattctgtcctaaaatccctcgttgagattgcagatactgttccaaagtatttgcgtcctcacttggaagcaactctacagctaagtctaaagttgtgtggagacactagcctcaacaatatgcaacgccagcttgcccttgaagtgatcgtcaccctctctgagactgcagctgctatgttaagaaaacataccaatattgttgcacagactattcctcagatgttagcaatgatggttgatttggaagaagatgaggactgggcaaatgcagatgaactagaagatgatgattttgacagcaatgcagttgcaggcgagagtgctctagatcgaatggcttgcggacttggtggaaagctcgttctgccgatgatcaaggaacacattatgcaaatgcttcaaaatcctgactggaaataccggcatgcaggattgatggccttatctgccattggtgaagggtgccaccagcaaatggaaggaattctaaatgagatcgtaaattttgttttactttttctccaggatcctcatccaagagtaaggtatgcagcctgtaatgccgtgggacagatggctacagattttgcacctggtttccaaaagaaatttcatgagaaggtgattgcagctctgctgcagaccatggaagaccaaggcaatcaacgtgtgcaggcccatgcagctgctgccctcattaactttactgaagactgtcccaagtcactacttattccatacttggataatttggtgaaacatctgcattccattatggtactgaagcttcaagagctgattcagaaaggcaccaagttagttttggaacaagttgtgacatccattgcatcagttgccgatactgcagaagaaaaatttgtcccctactatgatttatttatgccatcactgaagcacatcgttgagaatgcggttcaaaaagaactgagacttctgagaggaaaaactattgaatgcattagcctcattggtctggctgttgggaaggaaaaattcatgcaggatgcatcagatgtgatgcagcttttgttaaagacccagacagacttcaatgatatggaagatgatgatcctcagatctcttacatgatctcagcatgggccagaatgtgcaaaatccttggaaaagaatttcagcaataccttccagtggttatggggcctttaatgaagacggcttcaattaagcccgaagtagcccttttagatacccaagacatggagaatatgagtgatgatgatggttgggaatttgtgaaccttggagatcagcaaagctttggtattaaaactgcaggactagaagaaaaatcaactgcttgccagatgttggtttgctatgctaaggagttaaaggaaggctttgtggagtacaccgaacaggttgtcaaactgatggtccctttactgaaattttatttccacgatggtgttcgagtggcagcagcggaatccatgcctcttctcctggagtgtgcaagagtccgtggtcctgagtatctcacacagatgtggcattttatgtgtgatgctctaattaaggccattggtacagaaccagattcagacgtcctctcagaaataatgcattcttttgcaaagtgcattgaagtaatgggagatggatgccttaataatgaacactttgaagaactgggaggtatattgaaagcaaagcttgaagaacattttaaaaatcaagaattacgacaagttaaaagacaagatgaagactatgatgaacaggtcgaagagtcactacaagatgaggatgataatgatgtttatattctgaccaaagtgtcagatattttacactcaatattcagtagctacaaagaaaaggtgttaccatggtttgaacagctgcttccattaattgtcaacctcatttgtccacatagaccatggccagacagacaatggggattatgcatctttgatgatgtcatagaacactgtagtccagcctcatttaaatacgcagaatatttcttaagaccaatgctccaatatgtatgtgacaacagcccagaagtcaggcaagcagctgcatatggcctgggagtcatggcacagtacggtggagataattatcgccctttttgtacagaagcacttcccctgctggtaagagttattcagtctgcggattctaagaccaaagaaaatgtcaatgctacagagaactgcatctcagcagtagggaaaatcatgaagttcaagcctgactgtgtaaacgttgaagaggtccttccacactggttgtcttggcttccactacatgaagataaagaagaagctgttcagactttcaattatctgtgtgacctgattgaaagtaatcatccaattgttcttggcccaaacaataccaatctgcccaaaatatttagtataattgcggaaggagaaatgcacgaggcaattaaacatgaagatccttgtgccaaacgtctggccaatgtcgttcgccaagtacagacttctggaggactgtggactgagtgcatagcacagctcagtcctgagcagcaggccgccattcaggagctcctgaactctgcgtgaagggccttaatgtcacccaccagaaaactaactccaaataaacgcttaccctttcctttaggtttctttgttttgtttttgagcaaaagagatcggtagtgttgtgtgtaggccattcttctggagagccacaagcaggaagagcagcgctgtgttgcagaatggagtttccatggatttctaccagaccactgaaggagttcctggaagccctgcggtagctagcactgaagactatttttctattggtataacccgcccacctgaaggggaaagggaaatcaaattaatttttctcgttagacataaggaaatttaaggaaaaacagctttaagaacagttactcagcgtagatgtgtgttcacacaaattgctctgcattcagtgttcattgtgaattgggagtgtgagtctttctgtagggtagaaagaagcctcctacccagcaaaccagtagacccaaaagttgaaaaaaactgatgacagacaacaagcatgaagatggcatatttgatgtcactttggttctttttcccagaaggcttatacagtgactcagtcgggaagctttccagcttccagcccttgaatgtgaagtgtcattggcatgtctggcagtagtctctcattcactcctcaataaacaacattgaatacaaaagaggcttgtgtaaaaactcagtactgtctggcttggattcatttcatgtttttaatataagaatgatctaatatttttttaaagtaatagctatcagtaatagctgagtgttttttcccctaatattttccttgtgcaattcagacttaagcatcgagtttttaccatcttccactttaagctaagttatgatacctattccattcacaattggtgttctttttaaggtttgcaaatttcagccaattttgtagctaagattgttctgatcagctcaaaaagatttggcttagtgttttcattgcaaattataattgctgtagagccacacacaacttttgaacttttaattataagtgttatggctaaagttatttactgaaaatttcagtaaaatgtgtgaatgtttctttatgtattaacctcatagcagtaaatgacttgctgttgtttaatttttctaaggcatcttaatagacttctgttgaaaacttcagtgttaacatttttatagtttgtactaaatttaaccgtgatataaaaatgaattttatgcatagatcagaattttaaattaaaggttttttctttaaatgatttgtattactttattaaaactaaatctgaaatggaatagaaaatagaatggattacatacagatggtttccttgttagcagatgcccttcaaatatattttacgtttgcagcacaacaccattgcccggaggcttccgaatctagcaaagcagcatattaaatgactccacctgcgcagtccttgtgttcagtggatgaatacctgtgggctcttgtaatgtgtggtaatatttggagctttatagcctgtattccttgggagaaaaaaatgggaattggagtaaaaagtgtgtcaagacaacccctttctgctttcttatgtagcatctgcaaagccgattcatgtactgatgccaatcagctagagcaatgtaggctttttttaatttaaattattactacactttattactacacttgcagaaaagaaacatgttaaaatcatggcacacctgcagaatttcagatgacagtgtggtcagaagatgttttttgggagaacctagtgtttgctgggcactatgctaagcactttgggagcaagaacctcctaccttccagtttaaacactagtggtattgtcagatgccgttagtatctgagatgtacttacggcagggttctaagagctctgaaagaagcgctctgttagatgcagactggcagcatcctccttgataaaagcagaaaagcaaagaggtaattggagttgaatcaagttaatagggaaggttggtagtaaatgctgttagtgtgacatgattctgaaacccagagctcagaactaactgtgagatgtaccatgaactaacaattctttgaaaggacctgcagaagcatttttaatacctcattctgtctatgcaagatgaaaatccatggagttttttcttggcttttgtaccaaatttaggggtcttgcatgtcagcaagtgatatatattgtttataaatgcaagctatttctggaggggaaaaatgtgtgtggctcttacgttttctgggaattttgtaacaagttacacgcacaagtgttagaaactttggcataactcaatttggagtattttttaaatgctgtatctttaaagaaaagtaaaattgtcttaaatctaattgacacttctgtaatgagaggcaaccttataactctggagttgtagtttgacagaaccatcagtaaagacataagcaaat

SEQ ID NO: 405374 - DNA, 6115 bp, Homo sapiens
attgatgacctcccacaactggagcagccgggaacagctctgaccacagtggttccggggagaagcctttccaggacccatgtgtaggcacaactgttttccctgatcaggatacttgcggcactcaaatactttcccagcaacatctagactgctgtttgaccaaacaacggggctccaacagcctagccaagtgaaacataaaactaaccatcacagtatccttgtcaaaaatcagtctgacaacacatcagaggaaagaaattcctaagggaacactgctcagaaagtactgcagcatgtcttcaaatgcctgaggatcaagttggaaaactagaagcaacagaaaacacaataagcgcaatggcggcggccgcggcggagcagcaacagttctacctgctcctgggaaacctgctcagccccgacaatgtggtccggaaacaggcagaggaaacctatgagaatatcccaggccagtcaaagatcacattcctcttacaagccatcagaaatacaacagctgctgaagaggctagacaaatggccgccgttctcctaagacgtctcttgtcctctgcatttgatgaagtctatccagcacttccctctgatgttcagactgccatcaagagtgagctactcatgattattcagatggaaacacaatctagcatgaggaaaaaagtttgtgatattgcggcagaactggccaggaatttaatagatgaggatggcaataaccagtggcccgaaggtttgaagttcctttttgattcagtcagctctcaaaatgtgggactgcgggaagctgcccttcacattttctggaactttcctggaatttttgggaaccagcaacaacactatttagatgtcatcaaacgaatgttagttcagtgtatgcaagatcaggaacacccgtcgatcaggacgttatctgctagagctacagctgcatttatacttgcaaatgagcataatgttgctctgttcaaacattttgcagacttgctaccgggattcctacaggcggtaaatgactcgtgctaccagaatgatgattctgtcctaaaatccctcgttgagattgcagatactgttccaaagtatttgcgtcctcacttggaagcaactctacagctaagtctaaagttgtgtggagacactagcctcaacaatatgcaacgccagcttgcccttgaagtgatcgtcaccctctctgagactgcagctgctatgttaagaaaacataccaatattgttgcacagactattcctcagatgttagcaatgatggttgatttggaagaagatgaggactgggcaaatgcagatgaactagaagatgatgattttgacagcaatgcagttgcaggcgagagtgctctagatcgaatggcttgcggacttggtggaaagctcgttctgccgatgatcaaggaacacattatgcaaatgcttcaaaatcctgactggaaataccggcatgcaggattgatggccttatctgccattggtgaagggtgccaccagcaaatggaaggaattctaaatgagatcgtaaattttgttttactttttctccaggatcctcatccaagagtaaggtatgcagcctgtaatgccgtgggacagatggctacagattttgcacctggtttccaaaagaaatttcatgagaaggtgattgcagctctgctgcagaccatggaagaccaaggcaatcaacgtgtgcaggcccatgcagctgctgccctcattaactttactgaagactgtcccaagtcactacttattccatacttggataatttggtgaaacatctgcattccattatggtactgaagcttcaagagctgattcagaaaggcaccaagttagttttggaacaagttgtgacatccattgcatcagttgccgatactgcagaagaaaaatttgtcccctactatgatttatttatgccatcactgaagcacatcgttgagaatgcggttcaaaaagaactgagacttctgagaggaaaaactattgaatgcattagcctcattggtctggctgttgggaaggaaaaattcatgcaggatgcatcagatgtgatgcagcttttgttaaagacccagacagacttcaatgatatggaagatgatgatcctcagatctcttacatgatctcagcatgggccagaatgtgcaaaatccttggaaaagaatttcagcaataccttccagtggttatggggcctttaatgaagacggcttcaattaagcccgaagtagcccttttagatacccaagacatggagaatatgagtgatgatgatggttgggaatttgtgaaccttggagatcagcaaagctttggtattaaaactgcaggactagaagaaaaatcaactgcttgccagatgttggtttgctatgctaaggagttaaaggaaggctttgtggagtacaccgaacaggttgtcaaactgatggtccctttactgaaattttatttccacgatggtgttcgagtggcagcagcggaatccatgcctcttctcctggagtgtgcaagagtccgtggtcctgagtatctcacacagatgtggcattttatgtgtgatgctctaattaaggccattggtacagaaccagattcagacgtcctctcagaaataatgcattcttttgcaaagtgcattgaagtaatgggagatggatgccttaataatgaacactttgaagaactgggaggtatattgaaagcaaagcttgaagaacattttaaaaatcaagaattacgacaagttaaaagacaagatgaagactatgatgaacaggtcgaagagtcactacaagatgaggatgataatgatgtttatattctgaccaaagtgtcagatattttacactcaatattcagtagctacaaagaaaaggtgttaccatggtttgaacagctgcttccattaattgtcaacctcatttgtccacatagaccatggccagacagacaatggggattatgcatctttgatgatgtcatagaacactgtagtccagcctcatttaaatacgcagaatatttcttaagaccaatgctccaatatgtatgtgacaacagcccagaagtcaggcaagcagctgcatatggcctgggagtcatggcacagtacggtggagataattatcgccctttttgtacagaagcacttcccctgctggtaagagttattcagtctgcggattctaagaccaaagaaaatgtcaatgctacagagaactgcatctcagcagtagggaaaatcatgaagttcaagcctgactgtgtaaacgttgaagaggtccttccacactggttgtcttggcttccactacatgaagataaagaagaagctgttcagactttcaattatctgtgtgacctgattgaaagtaatcatccaattgttcttggcccaaacaataccaatctgcccaaaatatttagtataattgcggaaggagaaatgcacgaggcaattaaacatgaagatccttgtgccaaacgtctggccaatgtcgttcgccaagtacagacttctggaggactgtggactgagtgcatagcacagctcagtcctgagcagcaggccgccattcaggagctcctgaactctgcgtgaagggccttaatgtcacccaccagaaaactaactccaaataaacgcttaccctttcctttaggtttctttgttttgtttttgagcaaaagagatcggtagtgttgtgtgtaggccattcttctggagagccacaagcaggaagagcagcgctgtgttgcagaatggagtttccatggatttctaccagaccactgaaggagttcctggaagccctgcggtagctagcactgaagactatttttctattggtataacccgcccacctgaaggggaaagggaaatcaaattaatttttctcgttagacataaggaaatttaaggaaaaacagctttaagaacagttactcagcgtagatgtgtgttcacacaaattgctctgcattcagtgttcattgtgaattgggagtgtgagtctttctgtagggtagaaagaagcctcctacccagcaaaccagtagacccaaaagttgaaaaaaactgatgacagacaacaagcatgaagatggcatatttgatgtcactttggttctttttcccagaaggcttatacagtgactcagtcgggaagctttccagcttccagcccttgaatgtgaagtgtcattggcatgtctggcagtagtctctcattcactcctcaataaacaacattgaatacaaaagaggcttgtgtaaaaactcagtactgtctggcttggattcatttcatgtttttaatataagaatgatctaatatttttttaaagtaatagctatcagtaatagctgagtgttttttcccctaatattttccttgtgcaattcagacttaagcatcgagtttttaccatcttccactttaagctaagttatgatacctattccattcacaattggtgttctttttaaggtttgcaaatttcagccaattttgtagctaagattgttctgatcagctcaaaaagatttggcttagtgttttcattgcaaattataattgctgtagagccacacacaacttttgaacttttaattataagtgttatggctaaagttatttactgaaaatttcagtaaaatgtgtgaatgtttctttatgtattaacctcatagcagtaaatgacttgctgttgtttaatttttctaaggcatcttaatagacttctgttgaaaacttcagtgttaacatttttatagtttgtactaaatttaaccgtgatataaaaatgaattttatgcatagatcagaattttaaattaaaggttttttctttaaatgatttgtattactttattaaaactaaatctgaaatggaatagaaaatagaatggattacatacagatggtttccttgttagcagatgcccttcaaatatattttacgtttgcagcacaacaccattgcccggaggcttccgaatctagcaaagcagcatattaaatgactccacctgcgcagtccttgtgttcagtggatgaatacctgtgggctcttgtaatgtgtggtaatatttggagctttatagcctgtattccttgggagaaaaaaatgggaattggagtaaaaagtgtgtcaagacaacccctttctgctttcttatgtagcatctgcaaagccgattcatgtactgatgccaatcagctagagcaatgtaggctttttttaatttaaattattactacactttattactacacttgcagaaaagaaacatgttaaaatcatggcacacctgcagaatttcagatgacagtgtggtcagaagatgttttttgggagaacctagtgtttgctgggcactatgctaagcactttgggagcaagaacctcctaccttccagtttaaacactagtggtattgtcagatgccgttagtatctgagatgtacttacggcagggttctaagagctctgaaagaagcgctctgttagatgcagactggcagcatcctccttgataaaagcagaaaagcaaagaggtaattggagttgaatcaagttaatagggaaggttggtagtaaatgctgttagtgtgacatgattctgaaacccagagctcagaactaactgtgagatgtaccatgaactaacaattctttgaaaggacctgcagaagcatttttaatacctcattctgtctatgcaagatgaaaatccatggagttttttcttggcttttgtaccaaatttaggggtcttgcatgtcagcaagtgatatatattgtttataaatgcaagctatttctggaggggaaaaatgtgtgtggctcttacgttttctgggaattttgtaacaagttacacgcacaagtgttagaaactttggcataactcaatttggagtattttttaaatgctgtatctttaaagaaaagtaaaattgtcttaaatctaattgacacttctgtaatgagaggcaaccttataactctggagttgtagtttgacagaaccatcagtaaagacataagcaaat

SEQ ID NO: 405375 - DNA, 6131 bp, Homo sapiens
tgtaagatacttgctgtaagtagcaaaaagatgggaaggaaagtctacagaccaaatcatatctgaatctccccattctccctctccacaaatattggtttaggaattctccgaagtttgaaggttatgaatggttatcactcaaggattcagaactaagcagaggaaagaaattcctaagggaacactgctcagaaagtactgcagcatgtcttcaaatgcctgaggatcaagttggaaaactagaagcaacagaaaacacaataagccccaggcgtgagtcactggagagcgcgacgggaggaaggggcgccctgagtccacagccctgggggaggtcggagggtctgaaagcgagaagtccgtgagtagaagcgcaatggcggcggccgcggcggagcagcaacagttctacctgctcctgggaaacctgctcagccccgacaatgtggtccggaaacaggcagaggaaacctatgagaatatcccaggccagtcaaagatcacattcctcttacaagccatcagaaatacaacagctgctgaagaggctagacaaatggccgccgttctcctaagacgtctcttgtcctctgcatttgatgaagtctatccagcacttccctctgatgttcagactgccatcaagagtgagctactcatgattattcagatggaaacacaatctagcatgaggaaaaaagtttgtgatattgcggcagaactggccaggaatttaatagatgaggatggcaataaccagtggcccgaaggtttgaagttcctttttgattcagtcagctctcaaaatgtgggactgcgggaagctgcccttcacattttctggaactttcctggaatttttgggaaccagcaacaacactatttagatgtcatcaaacgaatgttagttcagtgtatgcaagatcaggaacacccgtcgatcaggacgttatctgctagagctacagctgcatttatacttgcaaatgagcataatgttgctctgttcaaacattttgcagacttgctaccgggattcctacaggcggtaaatgactcgtgctaccagaatgatgattctgtcctaaaatccctcgttgagattgcagatactgttccaaagtatttgcgtcctcacttggaagcaactctacagctaagtctaaagttgtgtggagacactagcctcaacaatatgcaacgccagcttgcccttgaagtgatcgtcaccctctctgagactgcagctgctatgttaagaaaacataccaatattgttgcacagactattcctcagatgttagcaatgatggttgatttggaagaagatgaggactgggcaaatgcagatgaactagaagatgatgattttgacagcaatgcagttgcaggcgagagtgctctagatcgaatggcttgcggacttggtggaaagctcgttctgccgatgatcaaggaacacattatgcaaatgcttcaaaatcctgactggaaataccggcatgcaggattgatggccttatctgccattggtgaagggtgccaccagcaaatggaaggaattctaaatgagatcgtaaattttgttttactttttctccaggatcctcatccaagagtaaggtatgcagcctgtaatgccgtgggacagatggctacagattttgcacctggtttccaaaagaaatttcatgagaaggtgattgcagctctgctgcagaccatggaagaccaaggcaatcaacgtgtgcaggcccatgcagctgctgccctcattaactttactgaagactgtcccaagtcactacttattccatacttggataatttggtgaaacatctgcattccattatggtactgaagcttcaagagctgattcagaaaggcaccaagttagttttggaacaagttgtgacatccattgcatcagttgccgatactgcagaagaaaaatttgtcccctactatgatttatttatgccatcactgaagcacatcgttgagaatgcggttcaaaaagaactgagacttctgagaggaaaaactattgaatgcattagcctcattggtctggctgttgggaaggaaaaattcatgcaggatgcatcagatgtgatgcagcttttgttaaagacccagacagacttcaatgatatggaagatgatgatcctcagatctcttacatgatctcagcatgggccagaatgtgcaaaatccttggaaaagaatttcagcaataccttccagtggttatggggcctttaatgaagacggcttcaattaagcccgaagtagcccttttagatacccaagacatggagaatatgagtgatgatgatggttgggaatttgtgaaccttggagatcagcaaagctttggtattaaaactgcaggactagaagaaaaatcaactgcttgccagatgttggtttgctatgctaaggagttaaaggaaggctttgtggagtacaccgaacaggttgtcaaactgatggtccctttactgaaattttatttccacgatggtgttcgagtggcagcagcggaatccatgcctcttctcctggagtgtgcaagagtccgtggtcctgagtatctcacacagatgtggcattttatgtgtgatgctctaattaaggccattggtacagaaccagattcagacgtcctctcagaaataatgcattcttttgcaaagtgcattgaagtaatgggagatggatgccttaataatgaacactttgaagaactgggaggtatattgaaagcaaagcttgaagaacattttaaaaatcaagaattacgacaagttaaaagacaagatgaagactatgatgaacaggtcgaagagtcactacaagatgaggatgataatgatgtttatattctgaccaaagtgtcagatattttacactcaatattcagtagctacaaagaaaaggtgttaccatggtttgaacagctgcttccattaattgtcaacctcatttgtccacatagaccatggccagacagacaatggggattatgcatctttgatgatgtcatagaacactgtagtccagcctcatttaaatacgcagaatatttcttaagaccaatgctccaatatgtatgtgacaacagcccagaagtcaggcaagcagctgcatatggcctgggagtcatggcacagtacggtggagataattatcgccctttttgtacagaagcacttcccctgctggtaagagttattcagtctgcggattctaagaccaaagaaaatgtcaatgctacagagaactgcatctcagcagtagggaaaatcatgaagttcaagcctgactgtgtaaacgttgaagaggtccttccacactggttgtcttggcttccactacatgaagataaagaagaagctgttcagactttcaattatctgtgtgacctgattgaaagtaatcatccaattgttcttggcccaaacaataccaatctgcccaaaatatttagtataattgcggaaggagaaatgcacgaggcaattaaacatgaagatccttgtgccaaacgtctggccaatgtcgttcgccaagtacagacttctggaggactgtggactgagtgcatagcacagctcagtcctgagcagcaggccgccattcaggagctcctgaactctgcgtgaagggccttaatgtcacccaccagaaaactaactccaaataaacgcttaccctttcctttaggtttctttgttttgtttttgagcaaaagagatcggtagtgttgtgtgtaggccattcttctggagagccacaagcaggaagagcagcgctgtgttgcagaatggagtttccatggatttctaccagaccactgaaggagttcctggaagccctgcggtagctagcactgaagactatttttctattggtataacccgcccacctgaaggggaaagggaaatcaaattaatttttctcgttagacataaggaaatttaaggaaaaacagctttaagaacagttactcagcgtagatgtgtgttcacacaaattgctctgcattcagtgttcattgtgaattgggagtgtgagtctttctgtagggtagaaagaagcctcctacccagcaaaccagtagacccaaaagttgaaaaaaactgatgacagacaacaagcatgaagatggcatatttgatgtcactttggttctttttcccagaaggcttatacagtgactcagtcgggaagctttccagcttccagcccttgaatgtgaagtgtcattggcatgtctggcagtagtctctcattcactcctcaataaacaacattgaatacaaaagaggcttgtgtaaaaactcagtactgtctggcttggattcatttcatgtttttaatataagaatgatctaatatttttttaaagtaatagctatcagtaatagctgagtgttttttcccctaatattttccttgtgcaattcagacttaagcatcgagtttttaccatcttccactttaagctaagttatgatacctattccattcacaattggtgttctttttaaggtttgcaaatttcagccaattttgtagctaagattgttctgatcagctcaaaaagatttggcttagtgttttcattgcaaattataattgctgtagagccacacacaacttttgaacttttaattataagtgttatggctaaagttatttactgaaaatttcagtaaaatgtgtgaatgtttctttatgtattaacctcatagcagtaaatgacttgctgttgtttaatttttctaaggcatcttaatagacttctgttgaaaacttcagtgttaacatttttatagtttgtactaaatttaaccgtgatataaaaatgaattttatgcatagatcagaattttaaattaaaggttttttctttaaatgatttgtattactttattaaaactaaatctgaaatggaatagaaaatagaatggattacatacagatggtttccttgttagcagatgcccttcaaatatattttacgtttgcagcacaacaccattgcccggaggcttccgaatctagcaaagcagcatattaaatgactccacctgcgcagtccttgtgttcagtggatgaatacctgtgggctcttgtaatgtgtggtaatatttggagctttatagcctgtattccttgggagaaaaaaatgggaattggagtaaaaagtgtgtcaagacaacccctttctgctttcttatgtagcatctgcaaagccgattcatgtactgatgccaatcagctagagcaatgtaggctttttttaatttaaattattactacactttattactacacttgcagaaaagaaacatgttaaaatcatggcacacctgcagaatttcagatgacagtgtggtcagaagatgttttttgggagaacctagtgtttgctgggcactatgctaagcactttgggagcaagaacctcctaccttccagtttaaacactagtggtattgtcagatgccgttagtatctgagatgtacttacggcagggttctaagagctctgaaagaagcgctctgttagatgcagactggcagcatcctccttgataaaagcagaaaagcaaagaggtaattggagttgaatcaagttaatagggaaggttggtagtaaatgctgttagtgtgacatgattctgaaacccagagctcagaactaactgtgagatgtaccatgaactaacaattctttgaaaggacctgcagaagcatttttaatacctcattctgtctatgcaagatgaaaatccatggagttttttcttggcttttgtaccaaatttaggggtcttgcatgtcagcaagtgatatatattgtttataaatgcaagctatttctggaggggaaaaatgtgtgtggctcttacgttttctgggaattttgtaacaagttacacgcacaagtgttagaaactttggcataactcaatttggagtattttttaaatgctgtatctttaaagaaaagtaaaattgtcttaaatctaattgacacttctgtaatgagaggcaaccttataactctggagttgtagtttgacagaaccatcagtaaagacataagcaaat

SEQ ID NO: 405376 - DNA, 6059 bp, Homo sapiens
  misc_feature (41)..(41): n is a, c, g, or t
cgtacccatatccgcagcaggtctccaaggtgaacagcttntgttaaagacccagacagacttcaatgatatggaagatgatgatcctcagatctcttacatgatctcagcatgggccagaatgtgcaaaatccttggaaaagaatttcagcaataccttccagtggttatggggcctttaatgaagacggcttcaattaagcccgaagtagcccttttagatacccaagacatggagaatatgagtgatgatgatggttgggaatttgtgaaccttggagatcagcaaagctttggtattaaaactgcaggactagaagaaaaatcaactgcttgccagatgttggtttgctatgctaaggagttaaaggaaggctttgtggagtacaccgaacaggttgtcaaactgatggtccctttactgaaattttatttccacgatggtgttcgagtggcagcagcggaatccatgcctcttctcctgtctcccctccctccttctctctcacgcctagcgcaatggcggcggccgcggcggagcagcaacagttctacctgctcctgggaaacctgctcagccccgacaatgtggtccggaaacaggcagaggaaacctatgagaatatcccaggccagtcaaagatcacattcctcttacaagccatcagaaatacaacagctgctgaagaggctagacaaatggccgccgttctcctaagacgtctcttgtcctctgcatttgatgaagtctatccagcacttccctctgatgttcagactgccatcaagagtgagctactcatgattattcagatggaaacacaatctagcatgaggaaaaaagtttgtgatattgcggcagaactggccaggaatttaatagatgaggatggcaataaccagtggcccgaaggtttgaagttcctttttgattcagtcagctctcaaaatgtgggactgcgggaagctgcccttcacattttctggaactttcctggaatttttgggaaccagcaacaacactatttagatgtcatcaaacgaatgttagttcagtgtatgcaagatcaggaacacccgtcgatcaggacgttatctgctagagctacagctgcatttatacttgcaaatgagcataatgttgctctgttcaaacattttgcagacttgctaccgggattcctacaggcggtaaatgactcgtgctaccagaatgatgattctgtcctaaaatccctcgttgagattgcagatactgttccaaagtatttgcgtcctcacttggaagcaactctacagctaagtctaaagttgtgtggagacactagcctcaacaatatgcaacgccagcttgcccttgaagtgatcgtcaccctctctgagactgcagctgctatgttaagaaaacataccaatattgttgcacagactattcctcagatgttagcaatgatggttgatttggaagaagatgaggactgggcaaatgcagatgaactagaagatgatgattttgacagcaatgcagttgcaggcgagagtgctctagatcgaatggcttgcggacttggtggaaagctcgttctgccgatgatcaaggaacacattatgcaaatgcttcaaaatcctgactggaaataccggcatgcaggattgatggccttatctgccattggtgaagggtgccaccagcaaatggaaggaattctaaatgagatcgtaaattttgttttactttttctccaggatcctcatccaagagtaaggtatgcagcctgtaatgccgtgggacagatggctacagattttgcacctggtttccaaaagaaatttcatgagaaggtgattgcagctctgctgcagaccatggaagaccaaggcaatcaacgtgtgcaggcccatgcagctgctgccctcattaactttactgaagactgtcccaagtcactacttattccatacttggataatttggtgaaacatctgcattccattatggtactgaagcttcaagagctgattcagaaaggcaccaagttagttttggaacaagttgtgacatccattgcatcagttgccgatactgcagaagaaaaatttgtcccctactatgatttatttatgccatcactgaagcacatcgttgagaatgcggttcaaaaagaactgagacttctgagaggaaaaactattgaatgcattagcctcattggtctggctgttgggaaggaaaaattcatgcaggatgcatcagatgtgatgcagcttttgttaaagacccagacagacttcaatgatatggaagatgatgatcctcagatctcttacatgatctcagcatgggccagaatgtgcaaaatccttggaaaagaatttcagcaataccttccagtggttatggggcctttaatgaagacggcttcaattaagcccgaagtagcccttttagatacccaagacatggagaatatgagtgatgatgatggttgggaatttgtgaaccttggagatcagcaaagctttggtattaaaactgcaggactagaagaaaaatcaactgcttgccagatgttggtttgctatgctaaggagttaaaggaaggctttgtggagtacaccgaacaggttgtcaaactgatggtccctttactgaaattttatttccacgatggtgttcgagtggcagcagcggaatccatgcctcttctcctggagtgtgcaagagtccgtggtcctgagtatctcacacagatgtggcattttatgtgtgatgctctaattaaggccattggtacagaaccagattcagacgtcctctcagaaataatgcattcttttgcaaagtgcattgaagtaatgggagatggatgccttaataatgaacactttgaagaactgggaggtatattgaaagcaaagcttgaagaacattttaaaaatcaagaattacgacaagttaaaagacaagatgaagactatgatgaacaggtcgaagagtcactacaagatgaggatgataatgatgtttatattctgaccaaagtgtcagatattttacactcaatattcagtagctacaaagaaaaggtgttaccatggtttgaacagctgcttccattaattgtcaacctcatttgtccacatagaccatggccagacagacaatggggattatgcatctttgatgatgtcatagaacactgtagtccagcctcatttaaatacgcagaatatttcttaagaccaatgctccaatatgtatgtgacaacagcccagaagtcaggcaagcagctgcatatggcctgggagtcatggcacagtacggtggagataattatcgccctttttgtacagaagcacttcccctgctggtaagagttattcagtctgcggattctaagaccaaagaaaatgtcaatgctacagagaactgcatctcagcagtagggaaaatcatgaagttcaagcctgactgtgtaaacgttgaagaggtccttccacactggttgtcttggcttccactacatgaagataaagaagaagctgttcagactttcaattatctgtgtgacctgattgaaagtaatcatccaattgttcttggcccaaacaataccaatctgcccaaaatatttagtataattgcggaaggagaaatgcacgaggcaattaaacatgaagatccttgtgccaaacgtctggccaatgtcgttcgccaagtacagacttctggaggactgtggactgagtgcatagcacagctcagtcctgagcagcaggccgccattcaggagctcctgaactctgcgtgaagggccttaatgtcacccaccagaaaactaactccaaataaacgcttaccctttcctttaggtttctttgttttgtttttgagcaaaagagatcggtagtgttgtgtgtaggccattcttctggagagccacaagcaggaagagcagcgctgtgttgcagaatggagtttccatggatttctaccagaccactgaaggagttcctggaagccctgcggtagctagcactgaagactatttttctattggtataacccgcccacctgaaggggaaagggaaatcaaattaatttttctcgttagacataaggaaatttaaggaaaaacagctttaagaacagttactcagcgtagatgtgtgttcacacaaattgctctgcattcagtgttcattgtgaattgggagtgtgagtctttctgtagggtagaaagaagcctcctacccagcaaaccagtagacccaaaagttgaaaaaaactgatgacagacaacaagcatgaagatggcatatttgatgtcactttggttctttttcccagaaggcttatacagtgactcagtcgggaagctttccagcttccagcccttgaatgtgaagtgtcattggcatgtctggcagtagtctctcattcactcctcaataaacaacattgaatacaaaagaggcttgtgtaaaaactcagtactgtctggcttggattcatttcatgtttttaatataagaatgatctaatatttttttaaagtaatagctatcagtaatagctgagtgttttttcccctaatattttccttgtgcaattcagacttaagcatcgagtttttaccatcttccactttaagctaagttatgatacctattccattcacaattggtgttctttttaaggtttgcaaatttcagccaattttgtagctaagattgttctgatcagctcaaaaagatttggcttatgcatagatcagaattttaaattaaaggttttttctttaaatgatttgtattactttattaaaactaaatctgaaatggaatagaaaatagaatggattacatacagatggtttccttgttagcagatgcccttcaaatatattttacgtttgcagcacaacaccattgcccggaggcttccgaatctagcaaagcagcatattaaatgactccacctgcgcagtccttgtgttcagtggatgaatacctgtgggctcttgtaatgtgtggtaatatttggagctttatagcctgtattccttgggagaaaaaaatgggaattggagtaaaaagtgtgtcaagacaacccctttctgctttcttatgtagcatctgcaaagccgattcatgtactgatgccaatcagctagagcaatgtaggctttttttaatttaaattattactacactttattactacacttgcagaaaagaaacatgttaaaatcatggcacacctgcagaatttcagatgacagtgtggtcagaagatgttttttgggagaacctagtgtttgctgggcactatgctaagcactttgggagcaagaacctcctaccttccagtttaaacactagtggtattgtcagatgccgttagtatctgagatgtacttacggcagggttctaagagctctgaaagaagcgctctgttagatgcagactggcagcatcctccttgataaaagcagaaaagcaaagaggtaattggagttgaatcaagttaatagggaaggttggtagtaaatgctgttagtgtgacatgattctgaaacccagagctcagaactaactgtgagatgtaccatgaactaacaattctttgaaaggacctgcagaagcatttttaatacctcattctgtctatgcaagatgaaaatccatggagttttttcttggcttttgtaccaaatttaggggtcttgcatgtcagcaagtgatatatattgtttataaatgcaagctatttctggaggggaaaaatgtgtgtggctcttacgttttctgggaattttgtaacaagttacacgcacaagtgttagaaactttggcataactcaatttggagtattttttaaatgctgtatctttaaagaaaagtaaaattgtcttaaatctaattgacacttctgtaatgagaggcaaccttataactctggagttgtagtttgacagaaccatcagtaaagacataagcaaataaatggtcttggtgcaaaaaaaatgataataaataaggggggtgcttac

SEQ ID NO: 405377 - DNA, 4495 bp, Homo sapiens
  misc_feature (41)..(41): n is a, c, g, or t
cgtacccatatccgcagcaggtctccaaggtgaacagcttntgttaaagacccagacagacttcaatgatatggaagatgatgatcctcagatctcttacatgatctcagcatgggccagaatgtgcaaaatccttggaaaagaatttcagcaataccttccagtggttatggggcctttaatgaagacggcttcaattaagcccgaagtagcccttttagatacccaagacatggagaatatgagtgatgatgatggttgggaatttgtgaaccttggagatcagcaaagctttggtattaaaactgcaggactagaagaaaaatcaactgcttgccagatgttggtttgctatgctaaggagttaaaggaaggctttgtggagtacaccgaacaggttgtcaaactgatggtccctttactgaaattttatttccacgatggtgttcgagtggcagcagcggaatccatgcctcttctcctgtctcccctccctccttctctctcacgcctagcgcaatggcggcggccgcggcggagcagcaacagttctacctgctcctgggaaacctgctcagccccgacaatgtggtccggaaacaggcagaggaaacctatgagaatatcccaggccagtcaaagatcacattcctcttacaagccatcagaaatacaacagctgctgaagaggctagacaaatggccgccgttctcctaagacgtctcttgtcctctgcatttgatgaagtctatccagcacttccctctgatgttcagactgccatcaagagtgagctactcatgattattcagatggaaacacaatctagcatgaggaaaaaagtttgtgatattgcggcagaactggccaggaatttaatagatgaggatggcaataaccagtggcccgaaggtttgaagttcctttttgattcagtcagctctcaaaatgtgggactgcgggaagctgcccttcacattttctggaactttcctggaatttttgggaaccagcaacaacactatttagatgtcatcaaacgaatgttagttcagtgtatgcaagatcaggaacacccgtcgatcaggacgttatctgctagagctacagctgcatttatacttgcaaatgagcataatgttgctctgttcaaacattttgcagacttgctaccgggattcctacaggcggtaaatgactcgtgctaccagaatgatgattctgtcctaaaatccctcgttgagattgcagatactgttccaaagtatttgcgtcctcacttggaagcaactctacagctaagtctaaagttgtgtggagacactagcctcaacaatatgcaacgccagcttgcccttgaagtgatcgtcaccctctctgagactgcagctgctatgttaagaaaacataccaatattgttgcacagactattcctcagatgttagcaatgatggttgatttggaagaagatgaggactgggcaaatgcagatgaactagaagatgatgattttgacagcaatgcagttgcaggcgagagtgctctagatcgaatggcttgcggacttggtggaaagctcgttctgccgatgatcaaggaacacattatgcaaatgcttcaaaatcctgactggaaataccggcatgcaggattgatggccttatctgccattggtgaagggtgccaccagcaaatggaaggaattctaaatgagatcgtaaattttgttttactttttctccaggatcctcatccaagagtaaggtatgcagcctgtaatgccgtgggacagatggctacagattttgcacctggtttccaaaagaaatttcatgagaaggtgattgcagctctgctgcagaccatggaagaccaaggcaatcaacgtgtgcaggcccatgcagctgctgccctcattaactttactgaagactgtcccaagtcactacttattccatacttggataatttggtgaaacatctgcattccattatggtactgaagcttcaagagctgattcagaaaggcaccaagttagttttggaacaagttgtgacatccattgcatcagttgccgatactgcagaagaaaaatttgtcccctactatgatttatttatgccatcactgaagcacatcgttgagaatgcggttcaaaaagaactgagacttctgagaggaaaaactattgaatgcattagcctcattggtctggctgttgggaaggaaaaattcatgcaggatgcatcagatgtgatgcagcttttgttaaagacccagacagacttcaatgatatggaagatgatgatcctcagatctcttacatgatctcagcatgggccagaatgtgcaaaatccttggaaaagaatttcagcaataccttccagtggttatggggcctttaatgaagacggcttcaattaagcccgaagtagcccttttagatacccaagacatggagaatatgagtgatgatgatggttgggaatttgtgaaccttggagatcagcaaagctttggtattaaaactgcaggactagaagaaaaatcaactgcttgccagatgttggtttgctatgctaaggagttaaaggaaggctttgtggagtacaccgaacaggttgtcaaactgatggtccctttactgaaattttatttccacgatggtgttcgagtggcagcagcggaatccatgcctcttctcctggagtgtgcaagagtccgtggtcctgagtatctcacacagatgtggcattttatgtgtgatgctctaattaaggccattggtacagaaccagattcagacgtcctctcagaaataatgcattcttttgcaaagtgcattgaagtaatgggagatggatgccttaataatgaacactttgaagaactgggaggtatattgaaagcaaagcttgaagaacattttaaaaatcaagaattacgacaagttaaaagacaagatgaagactatgatgaacaggtcgaagagtcactacaagatgaggatgataatgatgtttatattctgaccaaagtgtcagatattttacactcaatattcagtagctacaaagaaaaggtgttaccatggtttgaacagctgcttccattaattgtcaacctcatttgtccacatagaccatggccagacagacaatggggattatgcatctttgatgatgtcatagaacactgtagtccagcctcatttaaatacgcagaatatttcttaagaccaatgctccaatatgtatgtgacaacagcccagaagtcaggcaagcagctgcatatggcctgggagtcatggcacagtacggtggagataattatcgccctttttgtacagaagcacttcccctgctggtaagagttattcagtctgcggattctaagaccaaagaaaatgtcaatgctacagagaactgcatctcagcagtagggaaaatcatgaagttcaagcctgactgtgtaaacgttgaagaggtccttccacactggttgtcttggcttccactacatgaagataaagaagaagctgttcagactttcaattatctgtgtgacctgattgaaagtaatcatccaattgttcttggcccaaacaataccaatctgcccaaaatatttagtataattgcggaaggagaaatgcacgaggcaattaaacatgaagatccttgtgccaaacgtctggccaatgtcgttcgccaagtacagacttctggaggactgtggactgagtgcatagcacagctcagtcctgagcagcaggccgccattcaggagctcctgaactctgcgtgaagggccttaatgtcacccaccagaaaactaactccaaataaacgcttaccctttcctttaggtttctttgttttgtttttgagcaaaagagatcggtagtgttgtgtgtaggccattcttctggagagccacaagcaggaagagcagcgctgtgttgcagaatggagtttccatggatttctaccagaccactgaaggagttcctggaagccctgcggtagctagcactgaagactatttttctattggtataacccgcccacctgaaggggaaagggaaatcaaattaatttttctcgttagacataaggaaatttaaggaaaaacagctttaagaacagttactcagcgtagatgtgtgttcacacaaattgctctgcattcagtgttcattgtgaattgggagtgtgagtctttctgtagggtagaaagaagcctcctacccagcaaaccagtagacccaaaagttgaaaaaaactgatgacagacaacaagcatgaagatggcatatttgatgtcactttggttctttttcccagaaggcttatacagtgactcagtcgggaagctttccagcttccagcccttgaatgtgaagtgtcattggcatgtctggcagtagtctctcattcactcctcaataaacaacattgaatacaaaagaggcttgtgtaaaaactca

SEQ ID NO: 405378 - DNA, 4687 bp, Homo sapiens
gtgggtgaccgtggcttgtgggttgaccgtggcttgtgggttgaccgtggcttgtgggttgaccgtggcttgtgggttgaccgtggcattggtgaagggtgccaccagcaaatggaaggaattctaaatgagatcgtaaattttgttttactttttctccaggatcctcatccaagagtaaggtatgcagcctgtaatgccgtgggacagatggctacagattttgcacctggtttccaaaagaaatttcatgagaaggtgattgcagctctgctgcagaccatggaagaccaaggcaatcaacgtgtgcaggcccatgcagctgctgccctcattaactttactgaagactgtcccaagtcactacttattccatacttggataatttggtgaaacatctgcattccattatggtactgaagcttcaagagctgattcagaaaggcaccaagttagttttggaacaagttgtgacatccattgcatcagttgccgatactgcagaagaaaaatttgtcccctactatgatttatttatgccatcactgaagcacatcgttgagaatgcggttcaaaaagaactgagacttctgagaggaaaaactattgaatgcattagcctcattggtctggctgttgggaaggaaaaattcatgcaggatgcatcagatgtgatgcagcttttgttaaagacccagacagacttcaatgatatggaagatgatgatcctcagatctcttacatgatctcagcatgggccagaatgtgcaaaatccttggaaaagaatttcagcaataccttccagtggttatggggcctttaatgaagacggcttcaattaagcccgaagtagcccttttagatacccaagacatggagaatatgagtgatgatgatggttgggaatttgtgaaccttggagatcagcaaagctttggtattaaaactgcaggactagaagaaaaatcaactgcttgccagatgttggtttgctatgctaaggagttaaaggaaggctttgtggagtacaccgaacaggttgtcaaactgatggtccctttactgaaattttatttccacgatggtgttcgagtggcagcagcggaatccatgcctcttctcctggagtgtgcaagagtccgtggtcctgagtatctcacacagatgtggcattttatgtgtgatgctctaattaaggccattggtacagaaccagattcagacgtcctctcagaaataatgcattcttttgcaaagtgcattgaagtaatgggagatggatgccttaataatgaacactttgaagaactgggaggtatattgaaagcaaagcttgaagaacattttaaaaatcaagaattacgacaagttaaaagacaagatgaagactatgatgaacaggtcgaagagtcactacaagatgaggatgataatgatgtttatattctgaccaaagtgtcagatattttacactcaatattcagtagctacaaagaaaaggtgttaccatggtttgaacagctgcttccattaattgtcaacctcatttgtccacatagaccatggccagacagacaatggggattatgcatctttgatgatgtcatagaacactgtagtccagcctcatttaaatacgcagaatatttcttaagaccaatgctccaatatgtatgtgacaacagcccagaagtcaggcaagcagctgcatatggcctgggagtcatggcacagtacggtggagataattatcgccctttttgtacagaagcacttcccctgctggtaagagttattcagtctgcggattctaagaccaaagaaaatgtcaatgctacagagaactgcatctcagcagtagggaaaatcatgaagttcaagcctgactgtgtaaacgttgaagaggtccttccacactggttgtcttggcttccactacatgaagataaagaagaagctgttcagactttcaattatctgtgtgacctgattgaaagtaatcatccaattgttcttggcccaaacaataccaatctgcccaaaatatttagtataattgcggaaggagaaatgcacgaggcaattaaacatgaagatccttgtgccaaacgtctggccaatgtcgttcgccaagtacagacttctggaggactgtggactgagtgcatagcacagctcagtcctgagcagcaggccgccattcaggagctcctgaactctgcgtgaagggccttaatgtcacccaccagaaaactaactccaaataaacgcttaccctttcctttaggtttctttgttttgtttttgagcaaaagagatcggtagtgttgtgtgtaggccattcttctggagagccacaagcaggaagagcagcgctgtgttgcagaatggagtttccatggatttctaccagaccactgaaggagttcctggaagccctgcggtagctagcactgaagactatttttctattggtataacccgcccacctgaaggggaaagggaaatcaaattaatttttctcgttagacataaggaaatttaaggaaaaacagctttaagaacagttactcagcgtagatgtgtgttcacacaaattgctctgcattcagtgttcattgtgaattgggagtgtgagtctttctgtagggtagaaagaagcctcctacccagcaaaccagtagacccaaaagttgaaaaaaactgatgacagacaacaagcatgaagatggcatatttgatgtcactttggttctttttcccagaaggcttatacagtgactcagtcgggaagctttccagcttccagcccttgaatgtgaagtgtcattggcatgtctggcagtagtctctcattcactcctcaataaacaacattgaatacaaaagaggcttgtgtaaaaactcagtactgtctggcttggattcatttcatgtttttaatataagaatgatctaatatttttttaaagtaatagctatcagtaatagctgagtgttttttcccctaatattttccttgtgcaattcagacttaagcatcgagtttttaccatcttccactttaagctaagttatgatacctattccattcacaattggtgttctttttaaggtttgcaaatttcagccaattttgtagctaagattgttctgatcagctcaaaaagatttggcttagtgttttcattgcaaattataattgctgtagagccacacacaacttttgaacttttaattataagtgttatggctaaagttatttactgaaaatttcagtaaaatgtgtgaatgtttctttatgtattaacctcatagcagtaaatgacttgctgttgtttaatttttctaaggcatcttaatagacttctgttgaaaacttcagtgttaacatttttatagtttgtactaaatttaaccgtgatataaaaatgaattttatgcatagatcagaattttaaattaaaggttttttctttaaatgatttgtattactttattaaaactaaatctgaaatggaatagaaaatagaatggattacatacagatggtttccttgttagcagatgcccttcaaatatattttacgtttgcagcacaacaccattgcccggaggcttccgaatctagcaaagcagcatattaaatgactccacctgcgcagtccttgtgttcagtggatgaatacctgtgggctcttgtaatgtgtggtaatatttggagctttatagcctgtattccttgggagaaaaaaatgggaattggagtaaaaagtgtgtcaagacaacccctttctgctttcttatgtagcatctgcaaagccgattcatgtactgatgccaatcagctagagcaatgtaggctttttttaatttaaattattactacactttattactacacttgcagaaaagaaacatgttaaaatcatggcacacctgcagaatttcagatgacagtgtggtcagaagatgttttttgggagaacctagtgtttgctgggcactatgctaagcactttgggagcaagaacctcctaccttccagtttaaacactagtggtattgtcagatgccgttagtatctgagatgtacttacggcagggttctaagagctctgaaagaagcgctctgttagatgcagactggcagcatcctccttgataaaagcagaaaagcaaagaggtaattggagttgaatcaagttaatagggaaggttggtagtaaatgctgttagtgtgacatgattctgaaacccagagctcagaactaactgtgagatgtaccatgaactaacaattctttgaaaggacctgcagaagcatttttaatacctcattctgtctatgcaagatgaaaatccatggagttttttcttggcttttgtaccaaatttaggggtcttgcatgtcagcaagtgatatatattgtttataaatgcaagctatttctggaggggaaaaatgtgtgtggctcttacgttttctgggaattttgtaacaagttacacgcacaagtgttagaaactttggcataactcaatttggagtattttttaaatgctgtatctttaaagaaaagtaaaattgtcttaaatctaattgacacttctgtaatgagaggcaaccttataactctggagttgtagtttgacagaaccatcagtaaagacataagcaaat

SEQ ID NO: 405379 - DNA, 4069 bp, Homo sapiens
aaacacaaaactagggctaggtacgaggcccgtgttaattcggccgaggcagatgtgatgcagcttttgttaaagacccagacagacttcaatgatatggaagatgatgatcctcagatctcttacatgatctcagcatgggccagaatgtgcaaaatccttggaaaagaatttcagcaataccttccagtggttatggggcctttaatgaagacggcttcaattaagcccgaagtagcccttttagatacccaagacatggagaatatgagtgatgatgatggttgggaatttgtgaaccttggagatcagcaaagctttggtattaaaactgcaggactagaagaaaaatcaactgcttgccagatgttggtttgctatgctaaggagttaaaggaaggctttgtggagtacaccgaacaggttgtcaaactgatggtccctttactgaaattttatttccacgatggtgttcgagtggcagcagcggaatccatgcctcttctcctggagtgtgcaagagtccgtggtcctgagtatctcacacagatgtggcattttatgtgtgatgctctaattaaggccattggtacagaaccagattcagacgtcctctcagaaataatgcattcttttgcaaagtgcattgaagtaatgggagatggatgccttaataatgaacactttgaagaactgggaggtatattgaaagcaaagcttgaagaacattttaaaaatcaagaattacgacaagttaaaagacaagatgaagactatgatgaacaggtcgaagagtcactacaagatgaggatgataatgatgtttatattctgaccaaagtgtcagatattttacactcaatattcagtagctacaaagaaaaggtgttaccatggtttgaacagctgcttccattaattgtcaacctcatttgtccacatagaccatggccagacagacaatggggattatgcatctttgatgatgtcatagaacactgtagtccagcctcatttaaatacgcagaatatttcttaagaccaatgctccaatatgtatgtgacaacagcccagaagtcaggcaagcagctgcatatggcctgggagtcatggcacagtacggtggagataattatcgccctttttgtacagaagcacttcccctgctggtaagagttattcagtctgcggattctaagaccaaagaaaatgtcaatgctacagagaactgcatctcagcagtagggaaaatcatgaagttcaagcctgactgtgtaaacgttgaagaggtccttccacactggttgtcttggcttccactacatgaagataaagaagaagctgttcagactttcaattatctgtgtgacctgattgaaagtaatcatccaattgttcttggcccaaacaataccaatctgcccaaaatatttagtataattgcggaaggagaaatgcacgaggcaattaaacatgaagatccttgtgccaaacgtctggccaatgtcgttcgccaagtacagacttctggaggactgtggactgagtgcatagcacagctcagtcctgagcagcaggccgccattcaggagctcctgaactctgcgtgaagggccttaatgtcacccaccagaaaactaactccaaataaacgcttaccctttcctttaggtttctttgttttgtttttgagcaaaagagatcggtagtgttgtgtgtaggccattcttctggagagccacaagcaggaagagcagcgctgtgttgcagaatggagtttccatggatttctaccagaccactgaaggagttcctggaagccctgcggtagctagcactgaagactatttttctattggtataacccgcccacctgaaggggaaagggaaatcaaattaatttttctcgttagacataaggaaatttaaggaaaaacagctttaagaacagttactcagcgtagatgtgtgttcacacaaattgctctgcattcagtgttcattgtgaattgggagtgtgagtctttctgtagggtagaaagaagcctcctacccagcaaaccagtagacccaaaagttgaaaaaaactgatgacagacaacaagcatgaagatggcatatttgatgtcactttggttctttttcccagaaggcttatacagtgactcagtcgggaagctttccagcttccagcccttgaatgtgaagtgtcattggcatgtctggcagtagtctctcattcactcctcaataaacaacattgaatacaaaagaggcttgtgtaaaaactcagtactgtctggcttggattcatttcatgtttttaatataagaatgatctaatatttttttaaagtaatagctatcagtaatagctgagtgttttttcccctaatattttccttgtgcaattcagacttaagcatcgagtttttaccatcttccactttaagctaagttatgatacctattccattcacaattggtgttctttttaaggtttgcaaatttcagccaattttgtagctaagattgttctgatcagctcaaaaagatttggcttagtgttttcattgcaaattataattgctgtagagccacacacaacttttgaacttttaattataagtgttatggctaaagttatttactgaaaatttcagtaaaatgtgtgaatgtttctttatgtattaacctcatagcagtaaatgacttgctgttgtttaatttttctaaggcatcttaatagacttctgttgaaaacttcagtgttaacatttttatagtttgtactaaatttaaccgtgatataaaaatgaattttatgcatagatcagaattttaaattaaaggttttttctttaaatgatttgtattactttattaaaactaaatctgaaatggaatagaaaatagaatggattacatacagatggtttccttgttagcagatgcccttcaaatatattttacgtttgcagcacaacaccattgcccggaggcttccgaatctagcaaagcagcatattaaatgactccacctgcgcagtccttgtgttcagtggatgaatacctgtgggctcttgtaatgtgtggtaatatttggagctttatagcctgtattccttgggagaaaaaaatgggaattggagtaaaaagtgtgtcaagacaacccctttctgctttcttatgtagcatctgcaaagccgattcatgtactgatgccaatcagctagagcaatgtaggctttttttaatttaaattattactacactttattactacacttgcagaaaagaaacatgttaaaatcatggcacacctgcagaatttcagatgacagtgtggtcagaagatgttttttgggagaacctagtgtttgctgggcactatgctaagcactttgggagcaagaacctcctaccttccagtttaaacactagtggtattgtcagatgccgttagtatctgagatgtacttacggcagggttctaagagctctgaaagaagcgctctgttagatgcagactggcagcatcctccttgataaaagcagaaaagcaaagaggtaattggagttgaatcaagttaatagggaaggttggtagtaaatgctgttagtgtgacatgattctgaaacccagagctcagaactaactgtgagatgtaccatgaactaacaattctttgaaaggacctgcagaagcatttttaatacctcattctgtctatgcaagatgaaaatccatggagttttttcttggcttttgtaccaaatttaggggtcttgcatgtcagcaagtgatatatattgtttataaatgcaagctatttctggaggggaaaaatgtgtgtggctcttacgttttctgggaattttgtaacaagttacacgcacaagtgttagaaactttggcataactcaatttggagtattttttaaatgctgtatctttaaagaaaagtaaaattgtcttaaatctaattgacacttctgtaatgagaggcaaccttataactctggagttgtagtttgacagaaccatcagtaaagacataagcaaat

SEQ ID NO: 405380 - DNA, 3932 bp, Homo sapiens
  misc_feature (17)..(17): n is a, c, g, or t
  misc_feature (37)..(37): n is a, c, g, or t
tacggcgccccccggtngcgacgcgacggcgccgcgnccggggcggcgcgtgcccgccaggcgggccacgcacgctccgcggccggggcccagcgcgacggctcctacgcccgcgtgcccgcgaaccagactgggcaccggcgctgcgacggcgggcccgggaccgggggatcagcaaagctttggtattaaaactgcaggactagaagaaaaatcaactgcttgccagatgttggtttgctatgctaaggagttaaaggaaggctttgtggagtacaccgaacaggttgtcaaactgatggtccctttactgaaattttatttccacgatggtgttcgagtggcagcagcggaatccatgcctcttctcctggagtgtgcaagagtccgtggtcctgagtatctcacacagatgtggcattttatgtgtgatgctctaattaaggccattggtacagaaccagattcagacgtcctctcagaaataatgcattcttttgcaaagtgcattgaagtaatgggagatggatgccttaataatgaacactttgaagaactgggaggtatattgaaagcaaagcttgaagaacattttaaaaatcaagaattacgacaagttaaaagacaagatgaagactatgatgaacaggtcgaagagtcactacaagatgaggatgataatgatgtttatattctgaccaaagtgtcagatattttacactcaatattcagtagctacaaagaaaaggtgttaccatggtttgaacagctgcttccattaattgtcaacctcatttgtccacatagaccatggccagacagacaatggggattatgcatctttgatgatgtcatagaacactgtagtccagcctcatttaaatacgcagaatatttcttaagaccaatgctccaatatgtatgtgacaacagcccagaagtcaggcaagcagctgcatatggcctgggagtcatggcacagtacggtggagataattatcgccctttttgtacagaagcacttcccctgctggtaagagttattcagtctgcggattctaagaccaaagaaaatgtcaatgctacagagaactgcatctcagcagtagggaaaatcatgaagttcaagcctgactgtgtaaacgttgaagaggtccttccacactggttgtcttggcttccactacatgaagataaagaagaagctgttcagactttcaattatctgtgtgacctgattgaaagtaatcatccaattgttcttggcccaaacaataccaatctgcccaaaatatttagtataattgcggaaggagaaatgcacgaggcaattaaacatgaagatccttgtgccaaacgtctggccaatgtcgttcgccaagtacagacttctggaggactgtggactgagtgcatagcacagctcagtcctgagcagcaggccgccattcaggagctcctgaactctgcgtgaagggccttaatgtcacccaccagaaaactaactccaaataaacgcttaccctttcctttaggtttctttgttttgtttttgagcaaaagagatcggtagtgttgtgtgtaggccattcttctggagagccacaagcaggaagagcagcgctgtgttgcagaatggagtttccatggatttctaccagaccactgaaggagttcctggaagccctgcggtagctagcactgaagactatttttctattggtataacccgcccacctgaaggggaaagggaaatcaaattaatttttctcgttagacataaggaaatttaaggaaaaacagctttaagaacagttactcagcgtagatgtgtgttcacacaaattgctctgcattcagtgttcattgtgaattgggagtgtgagtctttctgtagggtagaaagaagcctcctacccagcaaaccagtagacccaaaagttgaaaaaaactgatgacagacaacaagcatgaagatggcatatttgatgtcactttggttctttttcccagaaggcttatacagtgactcagtcgggaagctttccagcttccagcccttgaatgtgaagtgtcattggcatgtctggcagtagtctctcattcactcctcaataaacaacattgaatacaaaagaggcttgtgtaaaaactcagtactgtctggcttggattcatttcatgtttttaatataagaatgatctaatatttttttaaagtaatagctatcagtaatagctgagtgttttttcccctaatattttccttgtgcaattcagacttaagcatcgagtttttaccatcttccactttaagctaagttatgatacctattccattcacaattggtgttctttttaaggtttgcaaatttcagccaattttgtagctaagattgttctgatcagctcaaaaagatttggcttagtgttttcattgcaaattataattgctgtagagccacacacaacttttgaacttttaattataagtgttatggctaaagttatttactgaaaatttcagtaaaatgtgtgaatgtttctttatgtattaacctcatagcagtaaatgacttgctgttgtttaatttttctaaggcatcttaatagacttctgttgaaaacttcagtgttaacatttttatagtttgtactaaatttaaccgtgatataaaaatgaattttatgcatagatcagaattttaaattaaaggttttttctttaaatgatttgtattactttattaaaactaaatctgaaatggaatagaaaatagaatggattacatacagatggtttccttgttagcagatgcccttcaaatatattttacgtttgcagcacaacaccattgcccggaggcttccgaatctagcaaagcagcatattaaatgactccacctgcgcagtccttgtgttcagtggatgaatacctgtgggctcttgtaatgtgtggtaatatttggagctttatagcctgtattccttgggagaaaaaaatgggaattggagtaaaaagtgtgtcaagacaacccctttctgctttcttatgtagcatctgcaaagccgattcatgtactgatgccaatcagctagagcaatgtaggctttttttaatttaaattattactacactttattactacacttgcagaaaagaaacatgttaaaatcatggcacacctgcagaatttcagatgacagtgtggtcagaagatgttttttgggagaacctagtgtttgctgggcactatgctaagcactttgggagcaagaacctcctaccttccagtttaaacactagtggtattgtcagatgccgttagtatctgagatgtacttacggcagggttctaagagctctgaaagaagcgctctgttagatgcagactggcagcatcctccttgataaaagcagaaaagcaaagaggtaattggagttgaatcaagttaatagggaaggttggtagtaaatgctgttagtgtgacatgattctgaaacccagagctcagaactaactgtgagatgtaccatgaactaacaattctttgaaaggacctgcagaagcatttttaatacctcattctgtctatgcaagatgaaaatccatggagttttttcttggcttttgtaccaaatttaggggtcttgcatgtcagcaagtgatatatattgtttataaatgcaagctatttctggaggggaaaaatgtgtgtggctcttacgttttctgggaattttgtaacaagttacacgcacaagtgttagaaactttggcataactcaatttggagtattttttaaatgctgtatctttaaagaaaagtaaaattgtcttaaatctaattgacacttctgtaatgagaggcaaccttataactctggagttgtagtttgacagaaccatcagtaaagacataagcaaat

SEQ ID NO: 405381 - DNA, 5876 bp, Homo sapiens
  misc_feature (41)..(41): n is a, c, g, or t
cgtacccatatccgcagcaggtctccaaggtgaacagcttntgttaaagacccagacagacttcaatgatatggaagatgatgatcctcagatctcttacatgatctcagcatgggccagaatgtgcaaaatccttggaaaagaatttcagcaataccttccagtggttatggggcctttaatgaagacggcttcaattaagcccgaagtagcccttttagatacccaagacatggagaatatgagtgatgatgatggttgggaatttgtgaaccttggagatcagcaaagctttggtattaaaactgcaggactagaagaaaaatcaactgcttgccagatgttggtttgctatgctaaggagttaaaggaaggctttgtggagtacaccgaacaggttgtcaaactgatggtccctttactgaaattttatttccacgatggtgttcgagtggcagcagcggaatccatgcctcttctcctgtctcccctccctccttctctctcacgcctagcgcaatggcggcggccgcggcggagcagcaacagttctacctgctcctgggaaacctgctcagccccgacaatgtggtccggaaacaggcagaggaaacctatgagaatatcccaggccagtcaaagatcacattcctcttacaagccatcagaaatacaacagctgctgaagaggctagacaaatggccgccgttctcctaagacgtctcttgtcctctgcatttgatgaagtctatccagcacttccctctgatgttcagactgccatcaagagtgagctactcatgattattcagatggaaacacaatctagcatgaggaaaaaagtttgtgatattgcggcagaactggccaggaatttaatagatgaggatggcaataaccagtggcccgaaggtttgaagttcctttttgattcagtcagctctcaaaatgtgggactgcgggaagctgcccttcacattttctggaactttcctggaatttttgggaaccagcaacaacactatttagatgtcatcaaacgaatgttagttcagtgtatgcaagatcaggaacacccgtcgatcaggacgttatctgctagagctacagctgcatttatacttgcaaatgagcataatgttgctctgttcaaacattttgcagacttgctaccgggattcctacaggcggtaaatgactcgtgctaccagaatgatgattctgtcctaaaatccctcgttgagattgcagatactgttccaaagtatttgcgtcctcacttggaagcaactctacagctaagtctaaagttgtgtggagacactagcctcaacaatatgcaacgccagcttgcccttgaagtgatcgtcaccctctctgagactgcagctgctatgttaagaaaacataccaatattgttgcacagactattcctcagatgttagcaatgatggttgatttggaagaagatgaggactgggcaaatgcagatgaactagaagatgatgattttgacagcaatgcagttgcaggcgagagtgctctagatcgaatggcttgcggacttggtggaaagctcgttctgccgatgatcaaggaacacattatgcaaatgcttcaaaatcctgactggaaataccggcatgcaggattgatggccttatctgccattggtgaagggtgccaccagcaaatggaaggaattctaaatgagatcgtaaattttgttttactttttctccaggatcctcatccaagagtaaggtatgcagcctgtaatgccgtgggacagatggctacagattttgcacctggtttccaaaagaaatttcatgagaaggtgattgcagctctgctgcagaccatggaagaccaaggcaatcaacgtgtgcaggcccatgcagctgctgccctcattaactttactgaagactgtcccaagtcactacttattccatacttggataatttggtgaaacatctgcattccattatggtactgaagcttcaagagctgattcagaaaggcaccaagttagttttggaacaagttgtgacatccattgcatcagttgccgatactgcagaagaaaaatttgtcccctactatgatttatttatgccatcactgaagcacatcgttgagaatgcggttcaaaaagaactgagacttctgagaggaaaaactattgaatgcattagcctcattggtctggctgttgggaaggaaaaattcatgcaggatgcatcagatgtgatgcagcttttgttaaagacccagacagacttcaatgatatggaagatgatgatcctcagatctcttacatgatctcagcatgggccagaatgtgcaaaatccttggaaaagaatttcagcaataccttccagtggttatggggcctttaatgaagacggcttcaattaagcccgaagtagcccttttagatacccaagacatggagaatatgagtgatgatgatggttgggaatttgtgaaccttggagatcagcaaagctttggtattaaaactgcaggactagaagaaaaatcaactgcttgccagatgttggtttgctatgctaaggagttaaaggaaggctttgtggagtacaccgaacaggttgtcaaactgatggtccctttactgaaattttatttccacgatggtgttcgagtggcagcagcggaatccatgcctcttctcctggagtgtgcaagagtccgtggtcctgagtatctcacacagatgtggcattttatgtgtgatgctctaattaaggccattggtacagaaccagattcagacgtcctctcagaaataatgcattcttttgcaaagtgcattgaagtaatgggagatggatgccttaataatgaacactttgaagaactgggaggtatattgaaagcaaagcttgaagaacattttaaaaatcaagaattacgacaagttaaaagacaagatgaagactatgatgaacaggtcgaagagtcactacaagatgaggatgataatgatgtttatattctgaccaaagtgtcagatattttacactcaatattcagtagctacaaagaaaaggtgttaccatggtttgaacagctgcttccattaattgtcaacctcattagataaagaagaagctgttcagactttcaattatctgtgtgacctgattgaaagtaatcatccaattgttcttggcccaaacaataccaatctgcccaaaatatttagtataattgcggaaggagaaatgcacgaggcaattaaacatgaagatccttgtgccaaacgtctggccaatgtcgttcgccaagtacagacttctggaggactgtggactgagtgcatagcacagctcagtcctgagcagcaggccgccattcaggagctcctgaactctgcgtgaagggccttaatgtcacccaccagaaaactaactccaaataaacgcttaccctttcctttaggtttctttgttttgtttttgagcaaaagagatcggtagtgttgtgtgtaggccattcttctggagagccacaagcaggaagagcagcgctgtgttgcagaatggagtttccatggatttctaccagaccactgaaggagttcctggaagccctgcggtagctagcactgaagactatttttctattggtataacccgcccacctgaaggggaaagggaaatcaaattaatttttctcgttagacataaggaaatttaaggaaaaacagctttaagaacagttactcagcgtagatgtgtgttcacacaaattgctctgcattcagtgttcattgtgaattgggagtgtgagtctttctgtagggtagaaagaagcctcctacccagcaaaccagtagacccaaaagttgaaaaaaactgatgacagacaacaagcatgaagatggcatatttgatgtcactttggttctttttcccagaaggcttatacagtgactcagtcgggaagctttccagcttccagcccttgaatgtgaagtgtcattggcatgtctggcagtagtctctcattcactcctcaataaacaacattgaatacaaaagaggcttgtgtaaaaactcagtactgtctggcttggattcatttcatgtttttaatataagaatgatctaatatttttttaaagtaatagctatcagtaatagctgagtgttttttcccctaatattttccttgtgcaattcagacttaagcatcgagtttttaccatcttccactttaagctaagttatgatacctattccattcacaattggtgttctttttaaggtttgcaaatttcagccaattttgtagctaagattgttctgatcagctcaaaaagatttggcttagtgttttcattgcaaattataattgctgtagagccacacacaacttttgaacttttaattataagtgttatggctaaagttatttactgaaaatttcagtaaaatgtgtgaatgtttctttatgtattaacctcatagcagtaaatgacttgctgttgtttaatttttctaaggcatcttaatagacttctgttgaaaacttcagtgttaacatttttatagtttgtactaaatttaaccgtgatataaaaatgaattttatgcatagatcagaattttaaattaaaggttttttctttaaatgatttgtattactttattaaaactaaatctgaaatggaatagaaaatagaatggattacatacagatggtttccttgttagcagatgcccttcaaatatattttacgtttgcagcacaacaccattgcccggaggcttccgaatctagcaaagcagcatattaaatgactccacctgcgcagtccttgtgttcagtggatgaatacctgtgggctcttgtaatgtgtggtaatatttggagctttatagcctgtattccttgggagaaaaaaatgggaattggagtaaaaagtgtgtcaagacaacccctttctgctttcttatgtagcatctgcaaagccgattcatgtactgatgccaatcagctagagcaatgtaggctttttttaatttaaattattactacactttattactacacttgcagaaaagaaacatgttaaaatcatggcacacctgcagaatttcagatgacagtgtggtcagaagatgttttttgggagaacctagtgtttgctgggcactatgctaagcactttgggagcaagaacctcctaccttccagtttaaacactagtggtattgtcagatgccgttagtatctgagatgtacttacggcagggttctaagagctctgaaagaagcgctctgttagatgcagactggcagcatcctccttgataaaagcagaaaagcaaagaggtaattggagttgaatcaagttaatagggaaggttggtagtaaatgctgttagtgtgacatgattctgaaacccagagctcagaactaactgtgagatgtaccatgaactaacaattctttgaaaggacctgcagaagcatttttaatacctcattctgtctatgcaagatgaaaatccatggagttttttcttggcttttgtaccaaatttaggggtcttgcatgtcagcaagtgatatatattgtttataaatgcaagctatttctggaggggaaaaatgtgtgtggctcttacgttttctgggaattttgtaacaagttacacgcacaagtgttagaaactttggcataactcaatttggagtattttttaaatgctgtatctttaaagaaaagtaaaattgtcttaaatctaattgacacttctgtaatgagaggcaaccttataactctggagttgtagtttgacagaaccatcagtaaagacataagcaaat

SEQ ID NO: 405382 - DNA, 3938 bp, Homo sapiens
  misc_feature (41)..(41): n is a, c, g, or t
cgtacccatatccgcagcaggtctccaaggtgaacagcttntgttaaagacccagacagacttcaatgatatggaagatgatgatcctcagatctcttacatgatctcagcatgggccagaatgtgcaaaatccttggaaaagaatttcagcaataccttccagtggttatggggcctttaatgaagacggcttcaattaagcccgaagtagcccttttagatacccaagacatggagaatatgagtgatgatgatggttgggaatttgtgaaccttggagatcagcaaagctttggtattaaaactgcaggactagaagaaaaatcaactgcttgccagatgttggtttgctatgctaaggagttaaaggaaggctttgtggagtacaccgaacaggttgtcaaactgatggtccctttactgaaattttatttccacgatggtgttcgagtggcagcagcggaatccatgcctcttctcctgtctcccctccctccttctctctcacgcctagcgcaatggcggcggccgcggcggagcagcaacagttctacctgctcctgggaaacctgctcagccccgacaatgtggtccggaaacaggcagaggaaacctatgagaatatcccaggccagtcaaagatcacattcctcttacaagccatcagaaatacaacagctgctgaagaggctagacaaatggccgccgttctcctaagacgtctcttgtcctctgcatttgatgaagtctatccagcacttccctctgatgttcagactgccatcaagagtgagctactcatgattattcagatggaaacacaatctagcatgaggaaaaaagtttgtgatattgcggcagaactggccaggaatttaatagatgaggatggcaataaccagtggcccgaaggtttgaagttcctttttgattcagtcagctctcaaaatgtgggactgcgggaagctgcccttcacattttctggaactttcctggaatttttgggaaccagcaacaacactatttagatgtcatcaaacgaatgttagttcagtgtatgcaagatcaggaacacccgtcgatcaggacgttatctgctagagctacagctgcatttatacttgcaaatgagcataatgttgctctgttcaaacattttgcagacttgctaccgggattcctacaggcggtaaatgactcgtgctaccagaatgatgattctgtcctaaaatccctcgttgagattgcagatactgttccaaagtatttgcgtcctcacttggaagcaactctacagctaagtctaaagttgtgtggagacactagcctcaacaatatgcaacgccagcttgcccttgaagtgatcgtcaccctctctgagactgcagctgctatgttaagaaaacataccaatattgttgcacagactattcctcagatgttagcaatgatggttgatttggaagaagatgaggactgggcaaatgcagatgaactagaagatgatgattttgacagcaatgcagttgcaggcgagagtgctctagatcgaatggcttgcggacttggtggaaagctcgttctgccgatgatcaaggaacacattatgcaaatgcttcaaaatcctgactggaaataccggcatgcaggattgatggccttatctgccattggtgaagggtgccaccagcaaatggaaggaattctaaatgagatcgtaaattttgttttactttttctccaggatcctcatccaagagtaaggtatgcagcctgtaatgccgtgggacagatggctacagattttgcacctggtttccaaaagaaatttcatgagaaggtgattgcagctctgctgcagaccatggaagaccaaggcaatcaacgtgtgcaggcccatgcagctgctgccctcattaactttactgaagactgtcccaagtcactacttattccatacttggataatttggtgaaacatctgcattccattatggtactgaagcttcaagagctgattcagaaaggcaccaagttagttttggaacaagttgtgacatccattgcatcagttgccgatactgcagaagaaaaatttgtcccctactatgatttatttatgccatcactgaagcacatcgttgagaatgcggttcaaaaagaactgagacttctgagaggaaaaactattgaatgcattagcctcattggtctggctgttgggaaggaaaaattcatgcaggatgcatcagatgtgatgcagcttttgttaaagacccagacagacttcaatgatatggaagatgatgatcctcagatctcttacatgatctcagcatgggccagaatgtgcaaaatccttggaaaagaatttcagcaataccttccagtggttatggggcctttaatgaagacggcttcaattaagcccgaagtagcccttttagatacccaagacatggagaatatgagtgatgatgatggttgggaatttgtgaaccttggagatcagcaaagctttggtattaaaactgcaggactagaagaaaaatcaactgcttgccagatgttggtttgctatgctaaggagttaaaggaaggctttgtggagtacaccgaacaggttgtcaaactgatggtccctttactgaaattttatttccacgatggtgttcgagtggcagcagcggaatccatgcctcttctcctggagtgtgcaagagtccgtggtcctgagtatctcacacagatgtggcattttatgtgtgatgctctaattaaggccattggtacagaaccagattcagacgtcctctcagaaataatgcattcttttgcaaagtgcattgaagtaatgggagatggatgccttaataatgaacactttgaagaactgggaggtatattgaaagcaaagcttgaagaacattttaaaaatcaagaattacgacaagttaaaagacaagatgaagactatgatgaacaggtcgaagagtcactacaagatgaggatgataatgatgtttatattctgaccaaagtgtcagatattttacactcaatattcagtagctacaaagaaaaggtgttaccatggtttgaacagctgcttccattaattgtcaacctcatttgtccacatagaccatggccagacagacaatggggattatgcatctttgatgatgtcatagaacactgtagtccagcctcatttaaatacgcagaatatttcttaagaccaatgctccaatatgtatgtgacaacagcccagaagtcaggcaagcagctgcatatggcctgggagtcatggcacagtacggtggagataattatcgccctttttgtacagaagcacttcccctgctggtaagagttattcagtctgcggattctaagaccaaagaaaatgtcaatgctacagagaactgcatctcagcagtagggaaaatcatgaagttcaagcctgactgtgtaaacgttgaagaggtccttccacactggttgtcttggcttccactacatgaagataaagaagaagctgttcagactttcaattatctgtgtgacctgattgaaagtaatcatccaattgttcttggcccaaacaataccaatctgcccaaaatatttagtataattgcggaaggagaaatgcacgaggcaattaaacatgaagatccttgtgccaaacgtctggccaatgtcgttcgccaagtacagacttctggaggactgtggactgagtgcatagcacagctcagtcctgagcagcaggccgccattcaggagctcctgaactctgcgtgaagggccttaatgtcacccaccagaaaactaactccaaataaacgcttaccctttcctccaaaaaaaaaacagaacacaaacaaagcaaagcacaagggcagaaaacccacggagccccacaaaaa

SEQ ID NO: 405383 - DNA, 3097 bp, Homo sapiens
ttcggcgtattaaatgaggctgactacagtgttctatgacatcatcagagatgcataatccccattgtctgtctgcccatggtctatgtggacaaatgaggttgacaattaatagcagctgcatatggcctgggagtcatggcacagtacggtggagataattatcgccctttttgtacagaagcacttcccctgctggtaagagttattcagtctgcggattctaagaccaaagaaaatgtcaatgctacagagaactgcatctcagcagtagggaaaatcatgaagttcaagcctgactgtgtaaacgttgaagaggtccttccacactggttgtcttggcttccactacatgaagataaagaagaagctgttcagactttcaattatctgtgtgacctgattgaaagtaatcatccaattgttcttggcccaaacaataccaatctgcccaaaatatttagtataattgcggaaggagaaatgcacgaggcaattaaacatgaagatccttgtgccaaacgtctggccaatgtcgttcgccaagtacagacttctggaggactgtggactgagtgcatagcacagctcagtcctgagcagcaggccgccattcaggagctcctgaactctgcgtgaagggccttaatgtcacccaccagaaaactaactccaaataaacgcttaccctttcctttaggtttctttgttttgtttttgagcaaaagagatcggtagtgttgtgtgtaggccattcttctggagagccacaagcaggaagagcagcgctgtgttgcagaatggagtttccatggatttctaccagaccactgaaggagttcctggaagccctgcggtagctagcactgaagactatttttctattggtataacccgcccacctgaaggggaaagggaaatcaaattaatttttctcgttagacataaggaaatttaaggaaaaacagctttaagaacagttactcagcgtagatgtgtgttcacacaaattgctctgcattcagtgttcattgtgaattgggagtgtgagtctttctgtagggtagaaagaagcctcctacccagcaaaccagtagacccaaaagttgaaaaaaactgatgacagacaacaagcatgaagatggcatatttgatgtcactttggttctttttcccagaaggcttatacagtgactcagtcgggaagctttccagcttccagcccttgaatgtgaagtgtcattggcatgtctggcagtagtctctcattcactcctcaataaacaacattgaatacaaaagaggcttgtgtaaaaactcagtactgtctggcttggattcatttcatgtttttaatataagaatgatctaatatttttttaaagtaatagctatcagtaatagctgagtgttttttcccctaatattttccttgtgcaattcagacttaagcatcgagtttttaccatcttccactttaagctaagttatgatacctattccattcacaattggtgttctttttaaggtttgcaaatttcagccaattttgtagctaagattgttctgatcagctcaaaaagatttggcttagtgttttcattgcaaattataattgctgtagagccacacacaacttttgaacttttaattataagtgttatggctaaagttatttactgaaaatttcagtaaaatgtgtgaatgtttctttatgtattaacctcatagcagtaaatgacttgctgttgtttaatttttctaaggcatcttaatagacttctgttgaaaacttcagtgttaacatttttatagtttgtactaaatttaaccgtgatataaaaatgaattttatgcatagatcagaattttaaattaaaggttttttctttaaatgatttgtattactttattaaaactaaatctgaaatggaatagaaaatagaatggattacatacagatggtttccttgttagcagatgcccttcaaatatattttacgtttgcagcacaacaccattgcccggaggcttccgaatctagcaaagcagcatattaaatgactccacctgcgcagtccttgtgttcagtggatgaatacctgtgggctcttgtaatgtgtggtaatatttggagctttatagcctgtattccttgggagaaaaaaatgggaattggagtaaaaagtgtgtcaagacaacccctttctgctttcttatgtagcatctgcaaagccgattcatgtactgatgccaatcagctagagcaatgtaggctttttttaatttaaattattactacactttattactacacttgcagaaaagaaacatgttaaaatcatggcacacctgcagaatttcagatgacagtgtggtcagaagatgttttttgggagaacctagtgtttgctgggcactatgctaagcactttgggagcaagaacctcctaccttccagtttaaacactagtggtattgtcagatgccgttagtatctgagatgtacttacggcagggttctaagagctctgaaagaagcgctctgttagatgcagactggcagcatcctccttgataaaagcagaaaagcaaagaggtaattggagttgaatcaagttaatagggaaggttggtagtaaatgctgttagtgtgacatgattctgaaacccagagctcagaactaactgtgagatgtaccatgaactaacaattctttgaaaggacctgcagaagcatttttaatacctcattctgtctatgcaagatgaaaatccatggagttttttcttggcttttgtaccaaatttaggggtcttgcatgtcagcaagtgatatatattgtttataaatgcaagctatttctggaggggaaaaatgtgtgtggctcttacgttttctgggaattttgtaacaagttacacgcacaagtgttagaaactttggcataactcaatttggagtattttttaaatgctgtatctttaaagaaaagtaaaattgtcttaaatctaattgacacttctgtaatgagaggcaaccttataactctggagttgtagtttgacagaaccatcagtaaagacataagcaaat

SEQ ID NO: 405384 - DNA, 4005 bp, Homo sapiens
  misc_feature (41)..(41): n is a, c, g, or t
cgtacccatatccgcagcaggtctccaaggtgaacagcttntgttaaagacccagacagacttcaatgatatggaagatgatgatcctcagatctcttacatgatctcagcatgggccagaatgtgcaaaatccttggaaaagaatttcagcaataccttccagtggttatggggcctttaatgaagacggcttcaattaagcccgaagtagcccttttagatacccaagacatggagaatatgagtgatgatgatggttgggaatttgtgaaccttggagatcagcaaagctttggtattaaaactgcaggactagaagaaaaatcaactgcttgccagatgttggtttgctatgctaaggagttaaaggaaggctttgtggagtacaccgaacaggttgtcaaactgatggtccctttactgaaattttatttccacgatggtgttcgagtggcagcagcggaatccatgcctcttctcctgtctcccctccctccttctctctcacgcctagcgcaatggcggcggccgcggcggagcagcaacagttctacctgctcctgggaaacctgctcagccccgacaatgtggtccggaaacaggcagaggaaacctatgagaatatcccaggccagtcaaagatcacattcctcttacaagccatcagaaatacaacagctgctgaagaggctagacaaatggccgccgttctcctaagacgtctcttgtcctctgcatttgatgaagtctatccagcacttccctctgatgttcagactgccatcaagagtgagctactcatgattattcagatggaaacacaatctagcatgaggaaaaaagtttgtgatattgcggcagaactggccaggaatttaatagatgaggatggcaataaccagtggcccgaaggtttgaagttcctttttgattcagtcagctctcaaaatgtgggactgcgggaagctgcccttcacattttctggaactttcctggaatttttgggaaccagcaacaacactatttagatgtcatcaaacgaatgttagttcagtgtatgcaagatcaggaacacccgtcgatcaggacgttatctgctagagctacagctgcatttatacttgcaaatgagcataatgttgctctgttcaaacattttgcagacttgctaccgggattcctacaggcggtaaatgactcgtgctaccagaatgatgattctgtcctaaaatccctcgttgagattgcagatactgttccaaagtatttgcgtcctcacttggaagcaactctacagctaagtctaaagttgtgtggagacactagcctcaacaatatgcaacgccagcttgcccttgaagtgatcgtcaccctctctgagactgcagctgctatgttaagaaaacataccaatattgttgcacagactattcctcagatgttagcaatgatggttgatttggaagaagatgaggactgggcaaatgcagatgaactagaagatgatgattttgacagcaatgcagttgcaggcgagagtgctctagatcgaatggcttgcggacttggtggaaagctcgttctgccgatgatcaaggaacacattatgcaaatgcttcaaaatcctgactggaaataccggcatgcaggattgatggccttatctgccattggtgaagggtgccaccagcaaatggaaggaattctaaatgagatcgtaaattttgttttactttttctccaggatcctcatccaagagtaaggtatgcagcctgtaatgccgtgggacagatggctacagattttgcacctggtttccaaaagaaatttcatgagaaggtgattgcagctctgctgcagaccatggaagaccaaggcaatcaacgtgtgcaggcccatgcagctgctgccctcattaactttactgaagactgtcccaagtcactacttattccatacttggataatttggtgaaacatctgcattccattatggtactgaagcttcaagagctgattcagaaaggcaccaagttagttttggaacaagttgtgacatccattgcatcagttgccgatactgcagaagaaaaatttgtcccctactatgatttatttatgccatcactgaagcacatcgttgagaatgcggttcaaaaagaactgagacttctgagaggaaaaactattgaatgcattagcctcattggtctggctgttgggaaggaaaaattcatgcaggatgcatcagatgtgatgcagcttttgttaaagacccagacagacttcaatgatatggaagatgatgatcctcagatctcttacatgatctcagcatgggccagaatgtgcaaaatccttggaaaagaatttcagcaataccttccagtggttatggggcctttaatgaagacggcttcaattaagcccgaagtagcccttttagatacccaagacatggagaatatgagtgatgatgatggttgggaatttgtgaaccttggagatcagcaaagctttggtattaaaactgcaggactagaagaaaaatcaactgcttgccagatgttggtttgctatgctaaggagttaaaggaaggctttgtggagtacaccgaacaggttgtcaaactgatggtccctttactgaaattttatttccacgatggtgttcgagtggcagcagcggaatccatgcctcttctcctggagtgtgcaagagtccgtggtcctgagtatctcacacagatgtggcattttatgtgtgatgctctaattaaggccattggtacagaaccagattcagacgtcctctcagaaataatgcattcttttgcaaagtgcattgaagtaatgggagatggatgccttaataatgaacactttgaagaactgggaggtatattgaaagcaaagcttgaagaacattttaaaaatcaagaattacgacaagttaaaagacaagatgaagactatgatgaacaggtcgaagagtcactacaagatgaggatgataatgatgtttatattctgaccaaagtgtcagatattttacactcaatattcagtagctacaaagaaaaggtgttaccatggtttgaacagctgcttccattaattgtcaacctcatttgtccacatagaccatggccagacagacaatggggattatgcatctttgatgatgtcatagaacactgtagtccagcctcatttaaatacgcagaatatttcttaagaccaatgctccaatatgtatgtgacaacagcccagaagtcaggcaagcagctgcatatggcctgggagtcatggcacagtacggtggagataattatcgccctttttgtacagaagcacttcccctgctggtaagagttattcagtctgcggattctaagaccaaagaaaatgtcaatgctacagagaactgcatctcagcagtagggaaaatcatgaagttcaagcctgactgtgtaaacgttgaagaggtccttccacactggttgtcttggcttccactacatgaagataaagaagaagctgttcagactttcaattatctgtgtgacctgattgaaagtaatcatccaattgttcttggcccaaacaataccaatctgcccaaaatatttagtataattgcggaaggagaaatgcacgaggcaattaaacatgaagatccttgtgccaaacgtctggccaatgtcgttcgccaagtacagggtaagctgatttggttgaattggggagggggagataaaacctttttttctttgtagtcctctatgagaagaaactagaaatctaatgagctaaggaattttatttttatattttcatagtctcttgtctccaagcctcaaatggattatacttaatgtaatccatccgtatgtacttattatttattagaattaaaaccttcatcttaggacattttgagcttaccagttggtgcttaacacaagcttatgtgtagtttttctgcctatcttaagaaa

SEQ ID NO: 405385 - DNA, 2944 bp, Homo sapiens
tagtgtcagatatgtacactcaatattcagtagctacaaagaaaaggtgttaccatggtttgaacagactacaagatgaggatgataatgatgtttatattctgaccaaagtgtcagatattttacactcaatattcagtagctacaaagaaaaggtgttaccatggtttgaacagctgcttccattaattgtcaacctcattagataaagaagaagctgttcagactttcaattatctgtgtgacctgattgaaagtaatcatccaattgttcttggcccaaacaataccaatctgcccaaaatatttagtataattgcggaaggagaaatgcacgaggcaattaaacatgaagatccttgtgccaaacgtctggccaatgtcgttcgccaagtacagacttctggaggactgtggactgagtgcatagcacagctcagtcctgagcagcaggccgccattcaggagctcctgaactctgcgtgaagggccttaatgtcacccaccagaaaactaactccaaataaacgcttaccctttcctttaggtttctttgttttgtttttgagcaaaagagatcggtagtgttgtgtgtaggccattcttctggagagccacaagcaggaagagcagcgctgtgttgcagaatggagtttccatggatttctaccagaccactgaaggagttcctggaagccctgcggtagctagcactgaagactatttttctattggtataacccgcccacctgaaggggaaagggaaatcaaattaatttttctcgttagacataaggaaatttaaggaaaaacagctttaagaacagttactcagcgtagatgtgtgttcacacaaattgctctgcattcagtgttcattgtgaattgggagtgtgagtctttctgtagggtagaaagaagcctcctacccagcaaaccagtagacccaaaagttgaaaaaaactgatgacagacaacaagcatgaagatggcatatttgatgtcactttggttctttttcccagaaggcttatacagtgactcagtcgggaagctttccagcttccagcccttgaatgtgaagtgtcattggcatgtctggcagtagtctctcattcactcctcaataaacaacattgaatacaaaagaggcttgtgtaaaaactcagtactgtctggcttggattcatttcatgtttttaatataagaatgatctaatatttttttaaagtaatagctatcagtaatagctgagtgttttttcccctaatattttccttgtgcaattcagacttaagcatcgagtttttaccatcttccactttaagctaagttatgatacctattccattcacaattggtgttctttttaaggtttgcaaatttcagccaattttgtagctaagattgttctgatcagctcaaaaagatttggcttagtgttttcattgcaaattataattgctgtagagccacacacaacttttgaacttttaattataagtgttatggctaaagttatttactgaaaatttcagtaaaatgtgtgaatgtttctttatgtattaacctcatagcagtaaatgacttgctgttgtttaatttttctaaggcatcttaatagacttctgttgaaaacttcagtgttaacatttttatagtttgtactaaatttaaccgtgatataaaaatgaattttatgcatagatcagaattttaaattaaaggttttttctttaaatgatttgtattactttattaaaactaaatctgaaatggaatagaaaatagaatggattacatacagatggtttccttgttagcagatgcccttcaaatatattttacgtttgcagcacaacaccattgcccggaggcttccgaatctagcaaagcagcatattaaatgactccacctgcgcagtccttgtgttcagtggatgaatacctgtgggctcttgtaatgtgtggtaatatttggagctttatagcctgtattccttgggagaaaaaaatgggaattggagtaaaaagtgtgtcaagacaacccctttctgctttcttatgtagcatctgcaaagccgattcatgtactgatgccaatcagctagagcaatgtaggctttttttaatttaaattattactacactttattactacacttgcagaaaagaaacatgttaaaatcatggcacacctgcagaatttcagatgacagtgtggtcagaagatgttttttgggagaacctagtgtttgctgggcactatgctaagcactttgggagcaagaacctcctaccttccagtttaaacactagtggtattgtcagatgccgttagtatctgagatgtacttacggcagggttctaagagctctgaaagaagcgctctgttagatgcagactggcagcatcctccttgataaaagcagaaaagcaaagaggtaattggagttgaatcaagttaatagggaaggttggtagtaaatgctgttagtgtgacatgattctgaaacccagagctcagaactaactgtgagatgtaccatgaactaacaattctttgaaaggacctgcagaagcatttttaatacctcattctgtctatgcaagatgaaaatccatggagttttttcttggcttttgtaccaaatttaggggtcttgcatgtcagcaagtgatatatattgtttataaatgcaagctatttctggaggggaaaaatgtgtgtggctcttacgttttctgggaattttgtaacaagttacacgcacaagtgttagaaactttggcataactcaatttggagtattttttaaatgctgtatctttaaagaaaagtaaaattgtcttaaatctaattgacacttctgtaatgagaggcaaccttataactctggagttgtagtttgacagaaccatcagtaaagacataagcaaat

SEQ ID NO: 405386 - DNA, 3642 bp, Homo sapiens
  misc_feature (41)..(41): n is a, c, g, or t
cgtacccatatccgcagcaggtctccaaggtgaacagcttntgttaaagacccagacagacttcaatgatatggaagatgatgatcctcagatctcttacatgatctcagcatgggccagaatgtgcaaaatccttggaaaagaatttcagcaataccttccagtggttatggggcctttaatgaagacggcttcaattaagcccgaagtagcccttttagatacccaagacatggagaatatgagtgatgatgatggttgggaatttgtgaaccttggagatcagcaaagctttggtattaaaactgcaggactagaagaaaaatcaactgcttgccagatgttggtttgctatgctaaggagttaaaggaaggctttgtggagtacaccgaacaggttgtcaaactgatggtccctttactgaaattttatttccacgatggtgttcgagtggcagcagcggaatccatgcctcttctcctgtctcccctccctccttctctctcacgcctagcgcaatggcggcggccgcggcggagcagcaacagttctacctgctcctgggaaacctgctcagccccgacaatgtggtccggaaacaggcagaggaaacctatgagaatatcccaggccagtcaaagatcacattcctcttacaagccatcagaaatacaacagctgctgaagaggctagacaaatggccgccgttctcctaagacgtctcttgtcctctgcatttgatgaagtctatccagcacttccctctgatgttcagactgccatcaagagtgagctactcatgattattcagatggaaacacaatctagcatgaggaaaaaagtttgtgatattgcggcagaactggccaggaatttaatagatgaggatggcaataaccagtggcccgaaggtttgaagttcctttttgattcagtcagctctcaaaatgtgggactgcgggaagctgcccttcacattttctggaactttcctggaatttttgggaaccagcaacaacactatttagatgtcatcaaacgaatgttagttcagtgtatgcaagatcaggaacacccgtcgatcaggacgttatctgctagagctacagctgcatttatacttgcaaatgagcataatgttgctctgttcaaacattttgcagacttgctaccgggattcctacaggcggtaaatgactcgtgctaccagaatgatgattctgtcctaaaatccctcgttgagattgcagatactgttccaaagtatttgcgtcctcacttggaagcaactctacagctaagtctaaagttgtgtggagacactagcctcaacaatatgcaacgccagcttgcccttgaagtgatcgtcaccctctctgagactgcagctgctatgttaagaaaacataccaatattgttgcacagactattcctcagatgttagcaatgatggttgatttggaagaagatgaggactgggcaaatgcagatgaactagaagatgatgattttgacagcaatgcagttgcaggcgagagtgctctagatcgaatggcttgcggacttggtggaaagctcgttctgccgatgatcaaggaacacattatgcaaatgcttcaaaatcctgactggaaataccggcatgcaggattgatggccttatctgccattggtgaagggtgccaccagcaaatggaaggaattctaaatgagatcgtaaattttgttttactttttctccaggatcctcatccaagagtaaggtatgcagcctgtaatgccgtgggacagatggctacagattttgcacctggtttccaaaagaaatttcatgagaaggtgattgcagctctgctgcagaccatggaagaccaaggcaatcaacgtgtgcaggcccatgcagctgctgccctcattaactttactgaagactgtcccaagtcactacttattccatacttggataatttggtgaaacatctgcattccattatggtactgaagcttcaagagctgattcagaaaggcaccaagttagttttggaacaagttgtgacatccattgcatcagttgccgatactgcagaagaaaaatttgtcccctactatgatttatttatgccatcactgaagcacatcgttgagaatgcggttcaaaaagaactgagacttctgagaggaaaaactattgaatgcattagcctcattggtctggctgttgggaaggaaaaattcatgcaggatgcatcagatgtgatgcagcttttgttaaagacccagacagacttcaatgatatggaagatgatgatcctcagatctcttacatgatctcagcatgggccagaatgtgcaaaatccttggaaaagaatttcagcaataccttccagtggttatggggcctttaatgaagacggcttcaattaagcccgaagtagcccttttagatacccaagacatggagaatatgagtgatgatgatggttgggaatttgtgaaccttggagatcagcaaagctttggtattaaaactgcaggactagaagaaaaatcaactgcttgccagatgttggtttgctatgctaaggagttaaaggaaggctttgtggagtacaccgaacaggttgtcaaactgatggtccctttactgaaattttatttccacgatggtgttcgagtggcagcagcggaatccatgcctcttctcctggagtgtgcaagagtccgtggtcctgagtatctcacacagatgtggcattttatgtgtgatgctctaattaaggccattggtacagaaccagattcagacgtcctctcagaaataatgcattcttttgcaaagtgcattgaagtaatgggagatggatgccttaataatgaacactttgaagaactgggaggtatattgaaagcaaagcttgaagaacattttaaaaatcaagaattacgacaagttaaaagacaagatgaagactatgatgaacaggtcgaagagtcactacaagatgaggatgataatgatgtttatattctgaccaaagtgtcagatattttacactcaatattcagtagctacaaagaaaaggtgttaccatggtttgaacagctgcttccattaattgtcaacctcatttgtccacatagaccatggccagacagacaatggggattatgcatctttgatgatgtcatagaacactgtagtccagcctcatttaaatacgcagaatatttcttaagaccaatgctccaatatgtatgtgacaacagcccagaagtcaggcaagcagctgcatatggcctgggagtcatggcacagtacggtgtcgctatatagcgacaccgtacagttgtaaattcgagaatacccgccaatctccctcaggtttaataattcgttagaataattcacacaatataggaaaacactttacttacatttagcaatgcatcgtaaaggatacaactcaggaacagctaagtggaagagatgcaccgagaaaagtatgccctgggtgggggtagaaggtggaggaagatatagagtttccatgccttctcctggttggcaccctcctaacaccaattttttcaccacctatgaagctgtccatgccctattagttaggggggtcttgcg

SEQ ID NO: 405387 - DNA, 2596 bp, Homo sapiens
cttccaaatgagcatttcgtcctaagtctgtgaaaatgtttctttccctagacttctggaggactgtggactgagtgcatagcacagctcagtcctgagcagcaggccgccattcaggagctcctgaactctgcgtgaagggccttaatgtcacccaccagaaaactaactccaaataaacgcttaccctttcctttaggtttctttgttttgtttttgagcaaaagagatcggtagtgttgtgtgtaggccattcttctggagagccacaagcaggaagagcagcgctgtgttgcagaatggagtttccatggatttctaccagaccactgaaggagttcctggaagccctgcggtagctagcactgaagactatttttctattggtataacccgcccacctgaaggggaaagggaaatcaaattaatttttctcgttagacataaggaaatttaaggaaaaacagctttaagaacagttactcagcgtagatgtgtgttcacacaaattgctctgcattcagtgttcattgtgaattgggagtgtgagtctttctgtagggtagaaagaagcctcctacccagcaaaccagtagacccaaaagttgaaaaaaactgatgacagacaacaagcatgaagatggcatatttgatgtcactttggttctttttcccagaaggcttatacagtgactcagtcgggaagctttccagcttccagcccttgaatgtgaagtgtcattggcatgtctggcagtagtctctcattcactcctcaataaacaacattgaatacaaaagaggcttgtgtaaaaactcagtactgtctggcttggattcatttcatgtttttaatataagaatgatctaatatttttttaaagtaatagctatcagtaatagctgagtgttttttcccctaatattttccttgtgcaattcagacttaagcatcgagtttttaccatcttccactttaagctaagttatgatacctattccattcacaattggtgttctttttaaggtttgcaaatttcagccaattttgtagctaagattgttctgatcagctcaaaaagatttggcttagtgttttcattgcaaattataattgctgtagagccacacacaacttttgaacttttaattataagtgttatggctaaagttatttactgaaaatttcagtaaaatgtgtgaatgtttctttatgtattaacctcatagcagtaaatgacttgctgttgtttaatttttctaaggcatcttaatagacttctgttgaaaacttcagtgttaacatttttatagtttgtactaaatttaaccgtgatataaaaatgaattttatgcatagatcagaattttaaattaaaggttttttctttaaatgatttgtattactttattaaaactaaatctgaaatggaatagaaaatagaatggattacatacagatggtttccttgttagcagatgcccttcaaatatattttacgtttgcagcacaacaccattgcccggaggcttccgaatctagcaaagcagcatattaaatgactccacctgcgcagtccttgtgttcagtggatgaatacctgtgggctcttgtaatgtgtggtaatatttggagctttatagcctgtattccttgggagaaaaaaatgggaattggagtaaaaagtgtgtcaagacaacccctttctgctttcttatgtagcatctgcaaagccgattcatgtactgatgccaatcagctagagcaatgtaggctttttttaatttaaattattactacactttattactacacttgcagaaaagaaacatgttaaaatcatggcacacctgcagaatttcagatgacagtgtggtcagaagatgttttttgggagaacctagtgtttgctgggcactatgctaagcactttgggagcaagaacctcctaccttccagtttaaacactagtggtattgtcagatgccgttagtatctgagatgtacttacggcagggttctaagagctctgaaagaagcgctctgttagatgcagactggcagcatcctccttgataaaagcagaaaagcaaagaggtaattggagttgaatcaagttaatagggaaggttggtagtaaatgctgttagtgtgacatgattctgaaacccagagctcagaactaactgtgagatgtaccatgaactaacaattctttgaaaggacctgcagaagcatttttaatacctcattctgtctatgcaagatgaaaatccatggagttttttcttggcttttgtaccaaatttaggggtcttgcatgtcagcaagtgatatatattgtttataaatgcaagctatttctggaggggaaaaatgtgtgtggctcttacgttttctgggaattttgtaacaagttacacgcacaagtgttagaaactttggcataactcaatttggagtattttttaaatgctgtatctttaaagaaaagtaaaattgtcttaaatctaattgacacttctgtaatgagaggcaaccttataactctggagttgtagtttgacagaaccatcagtaaagacataagcaaat

SEQ ID NO: 405388 - DNA, 3025 bp, Homo sapiens
  misc_feature (41)..(41): n is a, c, g, or t
cgtacccatatccgcagcaggtctccaaggtgaacagcttntgttaaagacccagacagacttcaatgatatggaagatgatgatcctcagatctcttacatgatctcagcatgggccagaatgtgcaaaatccttggaaaagaatttcagcaataccttccagtggttatggggcctttaatgaagacggcttcaattaagcccgaagtagcccttttagatacccaagacatggagaatatgagtgatgatgatggttgggaatttgtgaaccttggagatcagcaaagctttggtattaaaactgcaggactagaagaaaaatcaactgcttgccagatgttggtttgctatgctaaggagttaaaggaaggctttgtggagtacaccgaacaggttgtcaaactgatggtccctttactgaaattttatttccacgatggtgttcgagtggcagcagcggaatccatgcctcttctcctgtctcccctccctccttctctctcacgcctagcgcaatggcggcggccgcggcggagcagcaacagttctacctgctcctgggaaacctgctcagccccgacaatgtggtccggaaacaggcagaggaaacctatgagaatatcccaggccagtcaaagatcacattcctcttacaagccatcagaaatacaacagctgctgaagaggctagacaaatggccgccgttctcctaagacgtctcttgtcctctgcatttgatgaagtctatccagcacttccctctgatgttcagactgccatcaagagtgagctactcatgattattcagatggaaacacaatctagcatgaggaaaaaagtttgtgatattgcggcagaactggccaggaatttaatagatgaggatggcaataaccagtggcccgaaggtttgaagttcctttttgattcagtcagctctcaaaatgtgggactgcgggaagctgcccttcacattttctggaactttcctggaatttttgggaaccagcaacaacactatttagatgtcatcaaacgaatgttagttcagtgtatgcaagatcaggaacacccgtcgatcaggacgttatctgctagagctacagctgcatttatacttgcaaatgagcataatgttgctctgttcaaacattttgcagacttgctaccgggattcctacaggcggtaaatgactcgtgctaccagaatgatgattctgtcctaaaatccctcgttgagattgcagatactgttccaaagtatttgcgtcctcacttggaagcaactctacagctaagtctaaagttgtgtggagacactagcctcaacaatatgcaacgccagcttgcccttgaagtgatcgtcaccctctctgagactgcagctgctatgttaagaaaacataccaatattgttgcacagactattcctcagatgttagcaatgatggttgatttggaagaagatgaggactgggcaaatgcagatgaactagaagatgatgattttgacagcaatgcagttgcaggcgagagtgctctagatcgaatggcttgcggacttggtggaaagctcgttctgccgatgatcaaggaacacattatgcaaatgcttcaaaatcctgactggaaataccggcatgcaggattgatggccttatctgccattggtgaagggtgccaccagcaaatggaaggaattctaaatgagatcgtaaattttgttttactttttctccaggatcctcatccaagagtaaggtatgcagcctgtaatgccgtgggacagatggctacagattttgcacctggtttccaaaagaaatttcatgagaaggtgattgcagctctgctgcagaccatggaagaccaaggcaatcaacgtgtgcaggcccatgcagctgctgccctcattaactttactgaagactgtcccaagtcactacttattccatacttggataatttggtgaaacatctgcattccattatggtactgaagcttcaagagctgattcagaaaggcaccaagttagttttggaacaagttgtgacatccattgcatcagttgccgatactgcagaagaaaaatttgtcccctactatgatttatttatgccatcactgaagcacatcgttgagaatgcggttcaaaaagaactgagacttctgagaggaaaaactattgaatgcattagcctcattggtctggctgttgggaaggaaaaattcatgcaggatgcatcagatgtgatgcagcttttgttaaagacccagacagacttcaatgatatggaagatgatgatcctcagatctcttacatgatctcagcatgggccagaatgtgcaaaatccttggaaaagaatttcagcaataccttccagtggttatggggcctttaatgaagacggcttcaattaagcccgaagtagcccttttagatacccaagacatggagaatatgagtgatgatgatggttgggaatttgtgaaccttggagatcagcaaagctttggtattaaaactgcaggactagaagaaaaatcaactgcttgccagatgttggtttgctatgctaaggagttaaaggaaggctttgtggagtacaccgaacaggttgtcaaactgatggtccctttactgaaattttatttccacgatggtgttcgagtggcagcagcggaatccatgcctcttctcctggagtgtgcaagagtccgtggtcctgagtatctcacacagatgtggcattttatgtgtgatgctctaattaaggccattggtacagaaccagattcagacgtcctctcagaaataatgcattcttttgcaaagtgcattgaagtaatgggagatggatgccttaataatgaacactttgaagaactgggaggtatattgaaagcaaagcttgaagaacattttaaaaatcaagaattacgacaagttaaaagaatttatactgttaaaaagatatataaagttcgtataaacaggcttgagaccactttgatgt

SEQ ID NO: 405389 - DNA, 2025 bp, Homo sapiens
  misc_feature (41)..(41): n is a, c, g, or t
cgtacccatatccgcagcaggtctccaaggtgaacagcttntgttaaagacccagacagacttcaatgatatggaagatgatgatcctcagatctcttacatgatctcagcatgggccagaatgtgcaaaatccttggaaaagaatttcagcaataccttccagtggttatggggcctttaatgaagacggcttcaattaagcccgaagtagcccttttagatacccaagacatggagaatatgagtgatgatgatggttgggaatttgtgaaccttggagatcagcaaagctttggtattaaaactgcaggactagaagaaaaatcaactgcttgccagatgttggtttgctatgctaaggagttaaaggaaggctttgtggagtacaccgaacaggttgtcaaactgatggtccctttactgaaattttatttccacgatggtgttcgagtggcagcagcggaatccatgcctcttctcctgtctcccctccctccttctctctcacgcctagcgcaatggcggcggccgcggcggagcagcaacagttctacctgctcctgggaaacctgctcagccccgacaatgtggtccggaaacaggcagaggaaacctatgagaatatcccaggccagtcaaagatcacattcctcttacaagccatcagaaatacaacagctgctgaagaggctagacaaatggccgccgttctcctaagacgtctcttgtcctctgcatttgatgaagtctatccagcacttccctctgatgttcagactgccatcaagagtgagctactcatgattattcagatggaaacacaatctagcatgaggaaaaaagtttgtgatattgcggcagaactggccaggaatttaatagatgaggatggcaataaccagtggcccgaaggtttgaagttcctttttgattcagtcagctctcaaaatgtgggactgcgggaagctgcccttcacattttctggaactttcctggaatttttgggaaccagcaacaacactatttagatgtcatcaaacgaatgttagttcagtgtatgcaagatcaggaacacccgtcgatcaggacgttatctgctagagctacagctgcatttatacttgcaaatgagcataatgttgctctgttcaaacattttgcagacttgctaccgggattcctacaggcggtaaatgactcgtgctaccagaatgatgattctgtcctaaaatccctcgttgagattgcagatactgttccaaagtatttgcgtcctcacttggaagcaactctacagctaagtctaaagttgtgtggagacactagcctcaacaatatgcaacgccagcttgcccttgaagtgatcgtcaccctctctgagactgcagctgctatgttaagaaaacataccaatattgttgcacagactattcctcagatgttagcaatgatggttgatttggaagaagatgaggactgggcaaatgcagatgaactagaagatgatgattttgacagcaatgcagttgcaggcgagagtgctctagatcgaatggcttgcggacttggtggaaagctcgttctgccgatgatcaaggaacacattatgcaaatgcttcaaaatcctgactggaaataccggcatgcaggattgatggccttatctgccattggtgaagggtgccaccagcaaatggaaggaattctaaatgagatcgtaaattttgttttactttttctccaggatcctcatccaagagtaaggtatgcagcctgtaatgccgtgggacagatggctacagattttgcacctggtttccaaaagaaatttcatgagaaggtgcttggccgagaggaactgtgatctttttctcgttcaacatggtgctgtcgtgttggagaagtcacatttctaatacaaggagtgagctgagagctccgttctttcatgagatgaatctcgtgatctgtcacttgaccttcgtctatctcttgatctctcatgtccctccacctagcacca

SEQ ID NO: 405390 - DNA, 1963 bp, Homo sapiens
ttgaatacaaaagaggagtgaatgagagactactgccagacatgccaatgacacttcacattcaagggctggaagtagtctctcattcactcctcaataaacaacattgaatacaaaagaggcttgtgtaaaaactcagtactgtctggcttggattcatttcatgtttttaatataagaatgatctaatatttttttaaagtaatagctatcagtaatagctgagtgttttttcccctaatattttccttgtgcaattcagacttaagcatcgagtttttaccatcttccactttaagctaagttatgatacctattccattcacaattggtgttctttttaaggtttgcaaatttcagccaattttgtagctaagattgttctgatcagctcaaaaagatttggcttagtgttttcattgcaaattataattgctgtagagccacacacaacttttgaacttttaattataagtgttatggctaaagttatttactgaaaatttcagtaaaatgtgtgaatgtttctttatgtattaacctcatagcagtaaatgacttgctgttgtttaatttttctaaggcatcttaatagacttctgttgaaaacttcagtgttaacatttttatagtttgtactaaatttaaccgtgatataaaaatgaattttatgcatagatcagaattttaaattaaaggttttttctttaaatgatttgtattactttattaaaactaaatctgaaatggaatagaaaatagaatggattacatacagatggtttccttgttagcagatgcccttcaaatatattttacgtttgcagcacaacaccattgcccggaggcttccgaatctagcaaagcagcatattaaatgactccacctgcgcagtccttgtgttcagtggatgaatacctgtgggctcttgtaatgtgtggtaatatttggagctttatagcctgtattccttgggagaaaaaaatgggaattggagtaaaaagtgtgtcaagacaacccctttctgctttcttatgtagcatctgcaaagccgattcatgtactgatgccaatcagctagagcaatgtaggctttttttaatttaaattattactacactttattactacacttgcagaaaagaaacatgttaaaatcatggcacacctgcagaatttcagatgacagtgtggtcagaagatgttttttgggagaacctagtgtttgctgggcactatgctaagcactttgggagcaagaacctcctaccttccagtttaaacactagtggtattgtcagatgccgttagtatctgagatgtacttacggcagggttctaagagctctgaaagaagcgctctgttagatgcagactggcagcatcctccttgataaaagcagaaaagcaaagaggtaattggagttgaatcaagttaatagggaaggttggtagtaaatgctgttagtgtgacatgattctgaaacccagagctcagaactaactgtgagatgtaccatgaactaacaattctttgaaaggacctgcagaagcatttttaatacctcattctgtctatgcaagatgaaaatccatggagttttttcttggcttttgtaccaaatttaggggtcttgcatgtcagcaagtgatatatattgtttataaatgcaagctatttctggaggggaaaaatgtgtgtggctcttacgttttctgggaattttgtaacaagttacacgcacaagtgttagaaactttggcataactcaatttggagtattttttaaatgctgtatctttaaagaaaagtaaaattgtcttaaatctaattgacacttctgtaatgagaggcaaccttataactctggagttgtagtttgacagaaccatcagtaaagacataagcaaataaatggtcttggtgcaaaaaaaatgataataaataaggggggtgcttac

SEQ ID NO: 405391 - DNA, 165 bp, Homo sapiens
agcagctgcatatggcctgggagtcatggcacagtacggtggagataattatcgccctttttgtacaggtacgtttgcttattccgttacgtgcatttcattccagacatcctgtgaatccctactttactctctttaccacactcccaaacattatttgcctat

SEQ ID NO: 405392 - DNA, 403 bp, Homo sapiens
caggaggtatgtcttttctatttttatacatgctttatatttaacacaagctcttgggtatcttagataaacagaagttgcctagcactccttttagtgcattgaaccctttaacatttaagcaaaataataaacagtcttttgaggttccttaacaatgaaacgtgttcgagtggcagcagcggaatccatgcctcttctcctggagtgtgcaagagtccgtggtcctgagtatctcacacagatgtggcattttatgtgtgatgctctaattaaggccattggtacagaaccagattcagacgtcctctcagaaataatgcattcttttgcaaaggtgaatatttttctcttaaaaaatatgtataaggttgtatgttcatttattagtcttgctaaaagt

SEQ ID NO: 405393 - DNA, 6320 bp, Homo sapiens
  misc_feature (41)..(41): n is a, c, g, or t
cgtacccatatccgcagcaggtctccaaggtgaacagcttntgttaaagacccagacagacttcaatgatatggaagatgatgatcctcagatctcttacatgatctcagcatgggccagaatgtgcaaaatccttggaaaagaatttcagcaataccttccagtggttatggggcctttaatgaagacggcttcaattaagcccgaagtagcccttttagatacccaagacatggagaatatgagtgatgatgatggttgggaatttgtgaaccttggagatcagcaaagctttggtattaaaactgcaggactagaagaaaaatcaactgcttgccagatgttggtttgctatgctaaggagttaaaggaaggctttgtggagtacaccgaacaggttgtcaaactgatggtccctttactgaaattttatttccacgatggtgttcgagtggcagcagcggaatccatgcctcttctcctgtctcccctccctccttctctctcacgcctagcgcaatggcggcggccgcggcggagcagcaacagttctacctgctcctgggaaacctgctcagccccgacaatgtggtccggaaacaggcagaggaaacctatgagaatatcccaggccagtcaaagatcacattcctcttacaagccatcagaaatacaacagctgctgaagaggctagacaaatggccgccgttctcctaagacgtctcttgtcctctgcatttgatgaagtctatccagcacttccctctgatgttcagactgccatcaagagtgagctactcatgattattcagatggaaacacaatctagcatgaggaaaaaagtttgtgatattgcggcagaactggccaggaatttaatagatgaggatggcaataaccagtggcccgaaggtttgaagttcctttttgattcagtcagctctcaaaatgtgggactgcgggaagctgcccttcacattttctggaactttcctggaatttttgggaaccagcaacaacactatttagatgtcatcaaacgaatgttagttcagtgtatgcaagatcaggaacacccgtcgatcaggacgttatctgctagagctacagctgcatttatacttgcaaatgagcataatgttgctctgttcaaacattttgcagacttgctaccgggattcctacaggcggtaaatgactcgtgctaccagaatgatgattctgtcctaaaatccctcgttgagattgcagatactgttccaaagtatttgcgtcctcacttggaagcaactctacagctaagtctaaagttgtgtggagacactagcctcaacaatatgcaacgccagcttgcccttgaagtgatcgtcaccctctctgagactgcagctgctatgttaagaaaacataccaatattgttgcacagactattcctcagatgttagcaatgatggttgatttggaagaagatgaggactgggcaaatgcagatgaactagaagatgatgattttgacagcaatgcagttgcaggcgagagtgctctagatcgaatggcttgcggacttggtggaaagctcgttctgccgatgatcaaggaacacattatgcaaatgcttcaaaatcctgactggaaataccggcatgcaggattgatggccttatctgccattggtgaagggtgccaccagcaaatggaaggaattctaaatgagatcgtaaattttgttttactttttctccaggatcctcatccaagagtaaggtatgcagcctgtaatgccgtgggacagatggctacagattttgcacctggtttccaaaagaaatttcatgagaaggtgattgcagctctgctgcagaccatggaagaccaaggcaatcaacgtgtgcaggcccatgcagctgctgccctcattaactttactgaagactgtcccaagtcactacttattccatacttggataatttggtgaaacatctgcattccattatggtactgaagcttcaagagctgattcagaaaggcaccaagttagttttggaacaagttgtgacatccattgcatcagttgccgatactgcagaagaaaaatttgtcccctactatgatttatttatgccatcactgaagcacatcgttgagaatgcggttcaaaaagaactgagacttctgagaggaaaaactattgaatgcattagcctcattggtctggctgttgggaaggaaaaattcatgcaggatgcatcagatgtgatgcagcttttgttaaagacccagacagacttcaatgatatggaagatgatgatcctcagatctcttacatgatctcagcatgggccagaatgtgcaaaatccttggaaaagaatttcagcaataccttccagtggttatggggcctttaatgaagacggcttcaattaagcccgaagtagcccttttagatacccaagacatggagaatatgagtgatgatgatggttgggaatttgtgaaccttggagatcagcaaagctttggtattaaaactgcaggactagaagaaaaatcaactgcttgccagatgttggtttgctatgctaaggagttaaaggaaggctttgtggagtacaccgaacaggttgtcaaactgatggtccctttactgaaattttatttccacgatggtgttcgagtggcagcagcggaatccatgcctcttctcctggagtgtgcaagagtccgtggtcctgagtatctcacacagatgtggcattttatgtgtgatgctctaattaaggccattggtacagaaccagattcagacgtcctctcagaaataatgcattcttttgcaaagtgcattgaagtaatgggagatggatgccttaataatgaacactttgaagaactgggaggtatattgaaagcaaagcttgaagaacattttaaaaatcaagaattacgacaagttaaaagacaagatgaagactatgatgaacaggtcgaagagtcactacaagatgaggatgataatgatgtttatattctgaccaaagtgtcagatattttacactcaatattcagtagctacaaagaaaaggtgttaccatggtttgaacagctgcttccattaattgtcaacctcatttgtccacatagaccatggccagacagacaatggggattatgcatctttgatgatgtcatagaacactgtagtccagcctcatttaaatacgcagaatatttcttaagaccaatgctccaatatgtatgtgacaacagcccagaagtcaggcaagcagctgcatatggcctgggagtcatggcacagtacggtggagataattatcgccctttttgtacagaagcacttcccctgctggtaagagttattcagtctgcggattctaagaccaaagaaaatgtcaatgctacagagaactgcatctcagcagtagggaaaatcatgaagttcaagcctgactgtgtaaacgttgaagaggtccttccacactggttgtcttggcttccactacatgaagataaagaagaagctgttcagactttcaattatctgtgtgacctgattgaaagtaatcatccaattgttcttggcccaaacaataccaatctgcccaaaatatttagtataattgcggaaggagaaatgcacgaggcaattaaacatgaagatccttgtgccaaacgtctggccaatgtcgttcgccaagtacagacttctggaggactgtggactgagtgcatagcacagctcagtcctgagcagcaggccgccattcaggagctcctgaactctgcgtgaagggccttaatgtcacccaccagaaaactaactccaaataaacgcttaccctttcctttaggtttctttgttttgtttttgagcaaaagagatcggtagtgttgtgtgtaggccattcttctggagagccacaagcaggaagagcagcgctgtgttgcagaatggagtttccatggatttctaccagaccactgaaggagttcctggaagccctgcggtagctagcactgaagactatttttctattggtataacccgcccacctgaaggggaaagggaaatcaaattaatttttctcgttagacataaggaaatttaaggaaaaacagctttaagaacagttactcagcgtagatgtgtgttcacacaaattgctctgcattcagtgttcattgtgaattgggagtgtgagtctttctgtagggtagaaagaagcctcctacccagcaaaccagtagacccaaaagttgaaaaaaactgatgacagacaacaagcatgaagatggcatatttgatgtcactttggttctttttcccagaaggcttatacagtgactcagtcgggaagctttccagcttccagcccttgaatgtgaagtgtcattggcatgtctggcagtagtctctcattcactcctcaataaacaacattgaatacaaaagaggcttgtgtaaaaactcagtactgtctggcttggattcatttcatgtttttaatataagaatgatctaatatttttttaaagtaatagctatcagtaatagctgagtgttttttcccctaatattttccttgtgcaattcagacttaagcatcgagtttttaccatcttccactttaagctaagttatgatacctattccattcacaattggtgttctttttaaggtttgcaaatttcagccaattttgtagctaagattgttctgatcagctcaaaaagatttggcttagtgttttcattgcaaattataattgctgtagagccacacacaacttttgaacttttaattataagtgttatggctaaagttatttactgaaaatttcagtaaaatgtgtgaatgtttctttatgtattaacctcatagcagtaaatgacttgctgttgtttaatttttctaaggcatcttaatagacttctgttgaaaacttcagtgttaacatttttatagtttgtactaaatttaaccgtgatataaaaatgaattttatgcatagatcagaattttaaattaaaggttttttctttaaatgatttgtattactttattaaaactaaatctgaaatggaatagaaaatagaatggattacatacagatggtttccttgttagcagatgcccttcaaatatattttacgtttgcagcacaacaccattgcccggaggcttccgaatctagcaaagcagcatattaaatgactccacctgcgcagtccttgtgttcagtggatgaatacctgtgggctcttgtaatgtgtggtaatatttggagctttatagcctgtattccttgggagaaaaaaatgggaattggagtaaaaagtgtgtcaagacaacccctttctgctttcttatgtagcatctgcaaagccgattcatgtactgatgccaatcagctagagcaatgtaggctttttttaatttaaattattactacactttattactacacttgcagaaaagaaacatgttaaaatcatggcacacctgcagaatttcagatgacagtgtggtcagaagatgttttttgggagaacctagtgtttgctgggcactatgctaagcactttgggagcaagaacctcctaccttccagtttaaacactagtggtattgtcagatgccgttagtatctgagatgtacttacggcagggttctaagagctctgaaagaagcgctctgttagatgcagactggcagcatcctccttgataaaagcagaaaagcaaagaggtaattggagttgaatcaagttaatagggaaggttggtagtaaatgctgttagtgtgacatgattctgaaacccagagctcagaactaactgtgagatgtaccatgaactaacaattctttgaaaggacctgcagaagcatttttaatacctcattctgtctatgcaagatgaaaatccatggagttttttcttggcttttgtaccaaatttaggggtcttgcatgtcagcaagtgatatatattgtttataaatgcaagctatttctggaggggaaaaatgtgtgtggctcttacgttttctgggaattttgtaacaagttacacgcacaagtgttagaaactttggcataactcaatttggagtattttttaaatgctgtatctttaaagaaaagtaaaattgtcttaaatctaattgacacttctgtaatgagaggcaaccttataactctggagttgtagtttgacagaaccatcagtaaagacataagcaaataaatggtcttggtgcaaaaaaaatgataataaataaggggggtgcttac

SEQ ID NO: 405394 - DNA, 6096 bp, Homo sapiens
tctcactatagggctcgagcggccgcccgggcaggtctgaccacagtggttccggggagaagcctttccaggacccatgtgtaggcacaactgttttccctgatcaggatacttgcggcactcaacagaggaaagaaattcctaagggaacactgctcagaaagtactgcagcatgtcttcaaatgcctgaggatcaagttggaaaactagaagcaacagaaaacacaataagccccaggcgtgagtcactggagagcgcgacgggaggaaggggcgccctgagtccacagccctgggggaggtcggagggtctgaaagcgagaagtccgtgagtagaagcgcaatggcggcggccgcggcggagcagcaacagttctacctgctcctgggaaacctgctcagccccgacaatgtggtccggaaacaggcagaggaaacctatgagaatatcccaggccagtcaaagatcacattcctcttacaagccatcagaaatacaacagctgctgaagaggctagacaaatggccgccgttctcctaagacgtctcttgtcctctgcatttgatgaagtctatccagcacttccctctgatgttcagactgccatcaagagtgagctactcatgattattcagatggaaacacaatctagcatgaggaaaaaagtttgtgatattgcggcagaactggccaggaatttaatagatgaggatggcaataaccagtggcccgaaggtttgaagttcctttttgattcagtcagctctcaaaatgtgggactgcgggaagctgcccttcacattttctggaactttcctggaatttttgggaaccagcaacaacactatttagatgtcatcaaacgaatgttagttcagtgtatgcaagatcaggaacacccgtcgatcaggacgttatctgctagagctacagctgcatttatacttgcaaatgagcataatgttgctctgttcaaacattttgcagacttgctaccgggattcctacaggcggtaaatgactcgtgctaccagaatgatgattctgtcctaaaatccctcgttgagattgcagatactgttccaaagtatttgcgtcctcacttggaagcaactctacagctaagtctaaagttgtgtggagacactagcctcaacaatatgcaacgccagcttgcccttgaagtgatcgtcaccctctctgagactgcagctgctatgttaagaaaacataccaatattgttgcacagactattcctcagatgttagcaatgatggttgatttggaagaagatgaggactgggcaaatgcagatgaactagaagatgatgattttgacagcaatgcagttgcaggcgagagtgctctagatcgaatggcttgcggacttggtggaaagctcgttctgccgatgatcaaggaacacattatgcaaatgcttcaaaatcctgactggaaataccggcatgcaggattgatggccttatctgccattggtgaagggtgccaccagcaaatggaaggaattctaaatgagatcgtaaattttgttttactttttctccaggatcctcatccaagagtaaggtatgcagcctgtaatgccgtgggacagatggctacagattttgcacctggtttccaaaagaaatttcatgagaaggtgattgcagctctgctgcagaccatggaagaccaaggcaatcaacgtgtgcaggcccatgcagctgctgccctcattaactttactgaagactgtcccaagtcactacttattccatacttggataatttggtgaaacatctgcattccattatggtactgaagcttcaagagctgattcagaaaggcaccaagttagttttggaacaagttgtgacatccattgcatcagttgccgatactgcagaagaaaaatttgtcccctactatgatttatttatgccatcactgaagcacatcgttgagaatgcggttcaaaaagaactgagacttctgagaggaaaaactattgaatgcattagcctcattggtctggctgttgggaaggaaaaattcatgcaggatgcatcagatgtgatgcagcttttgttaaagacccagacagacttcaatgatatggaagatgatgatcctcagatctcttacatgatctcagcatgggccagaatgtgcaaaatccttggaaaagaatttcagcaataccttccagtggttatggggcctttaatgaagacggcttcaattaagcccgaagtagcccttttagatacccaagacatggagaatatgagtgatgatgatggttgggaatttgtgaaccttggagatcagcaaagctttggtattaaaactgcaggactagaagaaaaatcaactgcttgccagatgttggtttgctatgctaaggagttaaaggaaggctttgtggagtacaccgaacaggttgtcaaactgatggtccctttactgaaattttatttccacgatggtgttcgagtggcagcagcggaatccatgcctcttctcctggagtgtgcaagagtccgtggtcctgagtatctcacacagatgtggcattttatgtgtgatgctctaattaaggccattggtacagaaccagattcagacgtcctctcagaaataatgcattcttttgcaaagtgcattgaagtaatgggagatggatgccttaataatgaacactttgaagaactgggaggtatattgaaagcaaagcttgaagaacattttaaaaatcaagaattacgacaagttaaaagacaagatgaagactatgatgaacaggtcgaagagtcactacaagatgaggatgataatgatgtttatattctgaccaaagtgtcagatattttacactcaatattcagtagctacaaagaaaaggtgttaccatggtttgaacagctgcttccattaattgtcaacctcatttgtccacatagaccatggccagacagacaatggggattatgcatctttgatgatgtcatagaacactgtagtccagcctcatttaaatacgcagaatatttcttaagaccaatgctccaatatgtatgtgacaacagcccagaagtcaggcaagcagctgcatatggcctgggagtcatggcacagtacggtggagataattatcgccctttttgtacagaagcacttcccctgctggtaagagttattcagtctgcggattctaagaccaaagaaaatgtcaatgctacagagaactgcatctcagcagtagggaaaatcatgaagttcaagcctgactgtgtaaacgttgaagaggtccttccacactggttgtcttggcttccactacatgaagataaagaagaagctgttcagactttcaattatctgtgtgacctgattgaaagtaatcatccaattgttcttggcccaaacaataccaatctgcccaaaatatttagtataattgcggaaggagaaatgcacgaggcaattaaacatgaagatccttgtgccaaacgtctggccaatgtcgttcgccaagtacagacttctggaggactgtggactgagtgcatagcacagctcagtcctgagcagcaggccgccattcaggagctcctgaactctgcgtgaagggccttaatgtcacccaccagaaaactaactccaaataaacgcttaccctttcctttaggtttctttgttttgtttttgagcaaaagagatcggtagtgttgtgtgtaggccattcttctggagagccacaagcaggaagagcagcgctgtgttgcagaatggagtttccatggatttctaccagaccactgaaggagttcctggaagccctgcggtagctagcactgaagactatttttctattggtataacccgcccacctgaaggggaaagggaaatcaaattaatttttctcgttagacataaggaaatttaaggaaaaacagctttaagaacagttactcagcgtagatgtgtgttcacacaaattgctctgcattcagtgttcattgtgaattgggagtgtgagtctttctgtagggtagaaagaagcctcctacccagcaaaccagtagacccaaaagttgaaaaaaactgatgacagacaacaagcatgaagatggcatatttgatgtcactttggttctttttcccagaaggcttatacagtgactcagtcgggaagctttccagcttccagcccttgaatgtgaagtgtcattggcatgtctggcagtagtctctcattcactcctcaataaacaacattgaatacaaaagaggcttgtgtaaaaactcagtactgtctggcttggattcatttcatgtttttaatataagaatgatctaatatttttttaaagtaatagctatcagtaatagctgagtgttttttcccctaatattttccttgtgcaattcagacttaagcatcgagtttttaccatcttccactttaagctaagttatgatacctattccattcacaattggtgttctttttaaggtttgcaaatttcagccaattttgtagctaagattgttctgatcagctcaaaaagatttggcttagtgttttcattgcaaattataattgctgtagagccacacacaacttttgaacttttaattataagtgttatggctaaagttatttactgaaaatttcagtaaaatgtgtgaatgtttctttatgtattaacctcatagcagtaaatgacttgctgttgtttaatttttctaaggcatcttaatagacttctgttgaaaacttcagtgttaacatttttatagtttgtactaaatttaaccgtgatataaaaatgaattttatgcatagatcagaattttaaattaaaggttttttctttaaatgatttgtattactttattaaaactaaatctgaaatggaatagaaaatagaatggattacatacagatggtttccttgttagcagatgcccttcaaatatattttacgtttgcagcacaacaccattgcccggaggcttccgaatctagcaaagcagcatattaaatgactccacctgcgcagtccttgtgttcagtggatgaatacctgtgggctcttgtaatgtgtggtaatatttggagctttatagcctgtattccttgggagaaaaaaatgggaattggagtaaaaagtgtgtcaagacaacccctttctgctttcttatgtagcatctgcaaagccgattcatgtactgatgccaatcagctagagcaatgtaggctttttttaatttaaattattactacactttattactacacttgcagaaaagaaacatgttaaaatcatggcacacctgcagaatttcagatgacagtgtggtcagaagatgttttttgggagaacctagtgtttgctgggcactatgctaagcactttgggagcaagaacctcctaccttccagtttaaacactagtggtattgtcagatgccgttagtatctgagatgtacttacggcagggttctaagagctctgaaagaagcgctctgttagatgcagactggcagcatcctccttgataaaagcagaaaagcaaagaggtaattggagttgaatcaagttaatagggaaggttggtagtaaatgctgttagtgtgacatgattctgaaacccagagctcagaactaactgtgagatgtaccatgaactaacaattctttgaaaggacctgcagaagcatttttaatacctcattctgtctatgcaagatgaaaatccatggagttttttcttggcttttgtaccaaatttaggggtcttgcatgtcagcaagtgatatatattgtttataaatgcaagctatttctggaggggaaaaatgtgtgtggctcttacgttttctgggaattttgtaacaagttacacgcacaagtgttagaaactttggcataactcaatttggagtattttttaaatgctgtatctttaaagaaaagtaaaattgtcttaaatctaattgacacttctgtaatgagaggcaaccttataactctggagttgtagtttgacagaaccatcagtaaagacataagcaaat

SEQ ID NO: 405395 - DNA, 5915 bp, Homo sapiens
  misc_feature (41)..(41): n is a, c, g, or t
cgtacccatatccgcagcaggtctccaaggtgaacagcttntgttaaagacccagacagacttcaatgatatggaagatgatgatcctcagatctcttacatgatctcagcatgggccagaatgtgcaaaatccttggaaaagaatttcagcaataccttccagtggttatggggcctttaatgaagacggcttcaattaagcccgaagtagcccttttagatacccaagacatggagaatatgagtgatgatgatggttgggaatttgtgaaccttggagatcagcaaagctttggtattaaaactgcaggactagaagaaaaatcaactgcttgccagatgttggtttgctatgctaaggagttaaaggaaggctttgtggagtacaccgaacaggttgtcaaactgatggtccctttactgaaattttatttccacgatggtgttcgagtggcagcagcggaatccatgcctcttctcctgtctcccctccctccttctctctcacgcctagcgcaatggcggcggccgcggcggagcagcaacagttctacctgctcctgggaaacctgctcagccccgacaatgtggtccggaaacaggcagaggaaacctatgagaatatcccaggccagtcaaagatcacattcctcttacaagccatcagaaatacaacagctgctgaagaggctagacaaatggccgccgttctcctaagacgtctcttgtcctctgcatttgatgaagtctatccagcacttccctctgatgttcagactgccatcaagagtgagctactcatgattattcagatggaaacacaatctagcatgaggaaaaaagtttgtgatattgcggcagaactggccaggaatttaatagatgaggatggcaataaccagtggcccgaaggtttgaagttcctttttgattcagtcagctctcaaaatgtgggactgcgggaagctgcccttcacattttctggaactttcctggaatttttgggaaccagcaacaacactatttagatgtcatcaaacgaatgttagttcagtgtatgcaagatcaggaacacccgtcgatcaggacgttatctgctagagctacagctgcatttatacttgcaaatgagcataatgttgctctgttcaaacattttgcagacttgctaccgggattcctacaggcggtaaatgactcgtgctaccagaatgatgattctgtcctaaaatccctcgttgagattgcagatactgttccaaagtatttgcgtcctcacttggaagcaactctacagctaagtctaaagttgtgtggagacactagcctcaacaatatgcaacgccagcttgcccttgaagtgatcgtcaccctctctgagactgcagctgctatgttaagaaaacataccaatattgttgcacagactattcctcagatgttagcaatgatggttgatttggaagaagatgaggactgggcaaatgcagatgaactagaagatgatgattttgacagcaatgcagttgcaggcgagagtgctctagatcgaatggcttgcggacttggtggaaagctcgttctgccgatgatcaaggaacacattatgcaaatgcttcaaaatcctgactggaaataccggcatgcaggattgatggccttatctgccattggtgaagggtgccaccagcaaatggaaggaattctaaatgagatcgtaaattttgttttactttttctccaggatcctcatccaagagtaaggtatgcagcctgtaatgccgtgggacagatggctacagattttgcacctggtttccaaaagaaatttcatgagaaggtgattgcagctctgctgcagaccatggaagaccaaggcaatcaacgtgtgcaggcccatgcagctgctgccctcattaactttactgaagactgtcccaagtcactacttattccatacttggataatttggtgaaacatctgcattccattatggtactgaagcttcaagagctgattcagaaaggcaccaagttagttttggaacaagttgtgacatccattgcatcagttgccgatactgcagaagaaaaatttgtcccctactatgatttatttatgccatcactgaagcacatcgttgagaatgcggttcaaaaagaactgagacttctgagaggaaaaactattgaatgcattagcctcattggtctggctgttgggaaggaaaaattcatgcaggatgcatcagatgtgatgcagcttttgttaaagacccagacagacttcaatgatatggaagatgatgatcctcagatctcttacatgatctcagcatgggccagaatgtgcaaaatccttggaaaagaatttcagcaataccttccagtggttatggggcctttaatgaagacggcttcaattaagcccgaagtagcccttttagatacccaagacatggagaatatgagtgatgatgatggttgggaatttgtgaaccttggagatcagcaaagctttggtattaaaactgcaggactagaagaaaaatcaactgcttgccagatgttggtttgctatgctaaggagttaaaggaaggctttgtggagtacaccgaacaggttgtcaaactgatggtccctttactgaaattttatttccacgatggtgttcgagtggcagcagcggaatccatgcctcttctcctggagtgtgcaagagtccgtggtcctgagtatctcacacagatgtggcattttatgtgtgatgctctaattaaggccattggtacagaaccagattcagacgtcctctcagaaataatgcattcttttgcaaagtgcattgaagtaatgggagatggatgccttaataatgaacactttgaagaactgggaggtatattgaaagcaaagcttgaagaacattttaaaaatcaagaattacgacaagttaaaagacaagatgaagactatgatgaacaggtcgaagagtcactacaagatgaggatgataatgatgtttatattctgaccaaagtgtcagatattttacactcaatattcagtagctacaaagaaaaggtgttaccatggtttgaacagctgcttccattaattgtcaacctcatttgtccacatagaccatggccagacagacaatggggattatgcatctttgatgatgtcatagaacactgtagtccagcctcatttaaatacgcagaatatttcttaagaccaatgctccaatatgtatgtgacaacagcccagaagtcaggcaagcagctgcatatggcctgggagtcatggcacagtacggtggagataattatcgccctttttgtacagaagcacttcccctgctggtaagagttattcagtctgcggattctaagaccaaagaaaatgtcaatgctacagagaactgcatctcagcagtagggaaaatcatgaagttcaagcctgactgtgtaaacgttgaagaggtccttccacactggttgtcttggcttccactacatgaagataaagaagaagctgttcagactttcaattatctgtgtgacctgattgaaagtaatcatccaattgttcttggcccaaacaataccaatctgcccaaaatatttagtataattgcggaaggagaaatgcacgaggcaattaaacatgaagatccttgtgccaaacgtctggccaatgtcgttcgccaagtacagacttctggaggactgtggactgagtgcatagcacagctcagtcctgagcagcaggccgccattcaggagctcctgaactctgcgtgaagggccttaatgtcacccaccagaaaactaactccaaataaacgcttaccctttcctttaggtttctttgttttgtttttgagcaaaagagatcggtagtgttgtgtgtaggccattcttctggagagccacaagcaggaagagcagcgctgtgttgcagaatggagtttccatggatttctaccagaccactgaaggagttcctggaagccctgcggtagctagcactgaagactatttttctattggtataacccgcccacctgaaggggaaagggaaatcaaattaatttttctcgttagacataaggaaatttaaggaaaaacagctttaagaacagttactcagcgtagatgtgtgttcacacaaattgctctgcattcagtgttcattgtgaattgggagtgtgagtctttctgtagggtagaaagaagcctcctacccagcaaaccagtagacccaaaagttgaaaaaaactgatgacagacaacaagcatgaagatggcatatttgatgtcactttggttctttttcccagaaggcttatacagtgactcagtcgggaagctttccagcttccagcccttgaatgtgaagtgtcattggcatgtctggcagtagtctctcattcactcctcaataaacaacattgaatacaaaagaggcttgtgtaaaaactcagtactgtctggcttggattcatttcatgtttttaatataagaatgatctaatatttttttaaagtaatagctatcagtaatagctgagtgttttttcccctaatattttccttgtgcaattcagacttaagcatcgagtttttaccatcttccactttaagctaagttatgatacctattccattcacaattggtgttctgaaatggaatagaaaatagaatggattacatacagatggtttccttgttagcagatgcccttcaaatatattttacgtttgcagcacaacaccattgcccggaggcttccgaatctagcaaagcagcatattaaatgactccacctgcgcagtccttgtgttcagtggatgaatacctgtgggctcttgtaatgtgtggtaatatttggagctttatagcctgtattccttgggagaaaaaaatgggaattggagtaaaaagtgtgtcaagacaacccctttctgctttcttatgtagcatctgcaaagccgattcatgtactgatgccaatcagctagagcaatgtaggctttttttaatttaaattattactacactttattactacacttgcagaaaagaaacatgttaaaatcatggcacacctgcagaatttcagatgacagtgtggtcagaagatgttttttgggagaacctagtgtttgctgggcactatgctaagcactttgggagcaagaacctcctaccttccagtttaaacactagtggtattgtcagatgccgttagtatctgagatgtacttacggcagggttctaagagctctgaaagaagcgctctgttagatgcagactggcagcatcctccttgataaaagcagaaaagcaaagaggtaattggagttgaatcaagttaatagggaaggttggtagtaaatgctgttagtgtgacatgattctgaaacccagagctcagaactaactgtgagatgtaccatgaactaacaattctttgaaaggacctgcagaagcatttttaatacctcattctgtctatgcaagatgaaaatccatggagttttttcttggcttttgtaccaaatttaggggtcttgcatgtcagcaagtgatatatattgtttataaatgcaagctatttctggaggggaaaaatgtgtgtggctcttacgttttctgggaattttgtaacaagttacacgcacaagtgttagaaactttggcataactcaatttggagtattttttaaatgctgtatctttaaagaaaagtaaaattgtcttaaatctaattgacacttctgtaatgagaggcaaccttataactctggagttgtagtttgacagaaccatcagtaaagacataagcaaataaatggtcttggtgcaaaaaaaatgataataaataaggggggtgcttac

SEQ ID NO: 405396 - DNA, 6217 bp, Homo sapiens
  misc_feature (41)..(41): n is a, c, g, or t
cgtacccatatccgcagcaggtctccaaggtgaacagcttntgttaaagacccagacagacttcaatgatatggaagatgatgatcctcagatctcttacatgatctcagcatgggccagaatgtgcaaaatccttggaaaagaatttcagcaataccttccagtggttatggggcctttaatgaagacggcttcaattaagcccgaagtagcccttttagatacccaagacatggagaatatgagtgatgatgatggttgggaatttgtgaaccttggagatcagcaaagctttggtattaaaactgcaggactagaagaaaaatcaactgcttgccagatgttggtttgctatgctaaggagttaaaggaaggctttgtggagtacaccgaacaggttgtcaaactgatggtccctttactgaaattttatttccacgatggtgttcgagtggcagcagcggaatccatgcctcttctcctgtctcccctccctccttctctctcacgcctagcgcaatggcggcggccgcggcggagcagcaacagttctacctgctcctgggaaacctgctcagccccgacaatgtggtccggaaacaggcagaggaaacctatgagaatatcccaggccagtcaaagatcacattcctcttacaagccatcagaaatacaacagctgctgaagaggctagacaaatggccgccgttctcctaagacgtctcttgtcctctgcatttgatgaagtctatccagcacttccctctgatgttcagactgccatcaagagtgagctactcatgattattcagatggaaacacaatctagcatgaggaaaaaagtttgtgatattgcggcagaactggccaggaatttaatagatgaggatggcaataaccagtggcccgaaggtttgaagttcctttttgattcagtcagctctcaaaatgtgggactgcgggaagctgcccttcacattttctggaactttcctggaatttttgggaaccagcaacaacactatttagatgtcatcaaacgaatgttagttcagtgtatgcaagatcaggaacacccgtcgatcaggacgttatctgctagagctacagctgcatttatacttgcaaatgagcataatgttgctctgttcaaacattttgcagacttgctaccgggattcctacaggcggtaaatgactcgtgctaccagaatgatgattctgtcctaaaatccctcgttgagattgcagatactgttccaaagtatttgcgtcctcacttggaagcaactctacagctaagtctaaagttgtgtggagacactagcctcaacaatatgcaacgccagcttgcccttgaagtgatcgtcaccctctctgagactgcagctgctatgttaagaaaacataccaatattgttgcacagactattcctcagatgttagcaatgatggttgatttggaagaagatgaggactgggcaaatgcagatgaactagaagatgatgattttgacagcaatgcagttgcaggcgagagtgctctagatcgaatggcttgcggacttggtggaaagctcgttctgccgatgatcaaggaacacattatgcaaatgcttcaaaatcctgactggaaataccggcatgcaggattgatggccttatctgccattggtgaagggtgccaccagcaaatggaaggaattctaaatgagatcgtaaattttgttttactttttctccaggatcctcatccaagagtaaggtatgcagcctgtaatgccgtgggacagatggctacagattttgcacctggtttccaaaagaaatttcatgagaaggtgattgcagctctgctgcagaccatggaagaccaaggcaatcaacgtgtgcaggcccatgcagctgctgccctcattaactttactgaagactgtcccaagtcactacttattccatacttggataatttggtgaaacatctgcattccattatggtactgaagcttcaagagctgattcagaaaggcaccaagttagttttggaacaagttgtgacatccattgcatcagttgccgatactgcagaagaaaaatttgtcccctactatgatttatttatgccatcactgaagcacatcgttgagaatgcggttcaaaaagaactgagacttctgagaggaaaaactattgaatgcattagcctcattggtctggctgttgggaaggaaaaattcatgcaggatgcatcagatgtgatgcagcttttgttaaagacccagacagacttcaatgatatggaagatgatgatcctcagatctcttacatgatctcagcatgggccagaatgtgcaaaatccttggaaaagaatttcagcaataccttccagtggttatggggcctttaatgaagacggcttcaattaagcccgaagtagcccttttagatacccaagacatggagaatatgagtgatgatgatggttgggaatttgtgaaccttggagatcagcaaagctttggtattaaaactgcaggactagaagaaaaatcaactgcttgccagatgttggtttgctatgctaaggagttaaaggaaggctttgtggagtacaccgaacaggttgtcaaactgatggtccctttactgaaattttatttccacgatggtgttcgagtggcagcagcggaatccatgcctcttctcctggagtgtgcaagagtccgtggtcctgagtatctcacacagatgtggcattttatgtgtgatgctctaattaaggccattggtacagaaccagattcagacgtcctctcagaaataatgcattcttttgcaaagtgcattgaagtaatgggagatggatgccttaataatgaacactttgaagaactgggaggtatattgaaagcaaagcttgaagaacattttaaaaatcaagaattacgacaagttaaaagacaagatgaagactatgatgaacaggtcgaagagtcactacaagatgaggatgataatgatgtttatattctgaccaaagtgtcagatattttacactcaatattcagtagctacaaagaaaaggtgttaccatggtttgaacagctgcttccattaattgtcaacctcatttgtccacatagaccatggccagacagacaatggggattatgcatctttgatgatgtcatagaacactgtagtccagcctcatttaaatacgcagaatatttcttaagaccaatgctccaatatgtatgtgacaacagcccagaagtcaggcaagcagctgcatatggcctgggagtcatggcacagtacggtggagataattatcgccctttttgtacagaagcacttcccctgctggtaagagttattcagtctgcggattctaagaccaaagaaaatgtcaatgctacagagaactgcatctcagcagtagggaaaatcatgaagttcaagcctgactgtgtaaacgttgaagaggtccttccacactggttgtcttggcttccactacatgaagataaagaagaagctgttcagactttcaattatctgtgtgacctgattgaaagtaatcatccaattgttcttggcccaaacaataccaatctgcccaaaatatttagtataattgcggaaggagaaatgcacgaggcaattaaacatgaagatccttgtgccaaacgtctggccaatgtcgttcgccaagtacagacttctggaggactgtggactgagtgcatagcacagctcagtcctgagcagcaggccgccattcaggagctcctgaactctgcgtgaagggccttaatgtcacccaccagaaaactaactccaaataaacgcttaccctttcctttaggtttctttgttttgtttttgaaggaagagcagcgctgtgttgcagaatggagtttccatggatttctaccagaccactgaaggagttcctggaagccctgcggtagctagcactgaagactatttttctattggtataacccgcccacctgaaggggaaagggaaatcaaattaatttttctcgttagacataaggaaatttaaggaaaaacagctttaagaacagttactcagcgtagatgtgtgttcacacaaattgctctgcattcagtgttcattgtgaattgggagtgtgagtctttctgtagggtagaaagaagcctcctacccagcaaaccagtagacccaaaagttgaaaaaaactgatgacagacaacaagcatgaagatggcatatttgatgtcactttggttctttttcccagaaggcttatacagtgactcagtcgggaagctttccagcttccagcccttgaatgtgaagtgtcattggcatgtctggcagtagtctctcattcactcctcaataaacaacattgaatacaaaagaggcttgtgtaaaaactcagtactgtctggcttggattcatttcatgtttttaatataagaatgatctaatatttttttaaagtaatagctatcagtaatagctgagtgttttttcccctaatattttccttgtgcaattcagacttaagcatcgagtttttaccatcttccactttaagctaagttatgatacctattccattcacaattggtgttctttttaaggtttgcaaatttcagccaattttgtagctaagattgttctgatcagctcaaaaagatttggcttagtgttttcattgcaaattataattgctgtagagccacacacaacttttgaacttttaattataagtgttatggctaaagttatttactgaaaatttcagtaaaatgtgtgaatgtttctttatgtattaacctcatagcagtaaatgacttgctgttgtttaatttttctaaggcatcttaatagacttctgttgaaaacttcagtgttaacatttttatagtttgtactaaatttaaccgtgatataaaaatgaattttatgcatagatcagaattttaaattaaaggttttttctttaaatgatttgtattactttattaaaactaaatctgaaatggaatagaaaatagaatggattacatacagatggtttccttgttagcagatgcccttcaaatatattttacgtttgcagcacaacaccattgcccggaggcttccgaatctagcaaagcagcatattaaatgactccacctgcgcagtccttgtgttcagtggatgaatacctgtgggctcttgtaatgtgtggtaatatttggagctttatagcctgtattccttgggagaaaaaaatgggaattggagtaaaaagtgtgtcaagacaacccctttctgctttcttatgtagcatctgcaaagccgattcatgtactgatgccaatcagctagagcaatgtaggctttttttaatttaaattattactacactttattactacacttgcagaaaagaaacatgttaaaatcatggcacacctgcagaatttcagatgacagtgtggtcagaagatgttttttgggagaacctagtgtttgctgggcactatgctaagcactttgggagcaagaacctcctaccttccagtttaaacactagtggtattgtcagatgccgttagtatctgagatgtacttacggcagggttctaagagctctgaaagaagcgctctgttagatgcagactggcagcatcctccttgataaaagcagaaaagcaaagaggtaattggagttgaatcaagttaatagggaaggttggtagtaaatgctgttagtgtgacatgattctgaaacccagagctcagaactaactgtgagatgtaccatgaactaacaattctttgaaaggacctgcagaagcatttttaatacctcattctgtctatgcaagatgaaaatccatggagttttttcttggcttttgtaccaaatttaggggtcttgcatgtcagcaagtgatatatattgtttataaatgcaagctatttctggaggggaaaaatgtgtgtggctcttacgttttctgggaattttgtaacaagttacacgcacaagtgttagaaactttggcataactcaatttggagtattttttaaatgctgtatctttaaagaaaagtaaaattgtcttaaatctaattgacacttctgtaatgagaggcaaccttataactctggagttgtagtttgacagaaccatcagtaaagacataagcaaat

SEQ ID NO: 405397 - DNA, 5366 bp, Homo sapiens
ccacattgcaggagccttaagtatgtaatggttattatagtttcactgattttcattttgacttagatgtaaatctgttttgaatgtttctagttaacatccatcagaaggaaggtatacatgtgcctgcaggtagaacatttgcataatatagattgctaaattatttagtgaaaaatagtttagtaatatttctctattgtcagcatcttaggaatcttttggctaatgaggcattataaagtgaatcttcagcaccgactttctgtttcatcttttctaggcggtaaatgactcgtgctaccagaatgatgattctgtcctaaaatccctcgttgagattgcagatactgttccaaagtatttgcgtcctcacttggaagcaactctacagctaagtctaaagttgtgtggagacactagcctcaacaatatgcaacgccagcttgcccttgaagtgatcgtcaccctctctgagactgcagctgctatgttaagaaaacataccaatattgttgcacagactattcctcagatgttagcaatgatggttgatttggaagaagatgaggactgggcaaatgcagatgaactagaagatgatgattttgacagcaatgcagttgcaggcgagagtgctctagatcgaatggcttgcggacttggtggaaagctcgttctgccgatgatcaaggaacacattatgcaaatgcttcaaaatcctgactggaaataccggcatgcaggattgatggccttatctgccattggtgaagggtgccaccagcaaatggaaggaattctaaatgagatcgtaaattttgttttactttttctccaggatcctcatccaagagtaaggtatgcagcctgtaatgccgtgggacagatggctacagattttgcacctggtttccaaaagaaatttcatgagaaggtgattgcagctctgctgcagaccatggaagaccaaggcaatcaacgtgtgcaggcccatgcagctgctgccctcattaactttactgaagactgtcccaagtcactacttattccatacttggataatttggtgaaacatctgcattccattatggtactgaagcttcaagagctgattcagaaaggcaccaagttagttttggaacaagttgtgacatccattgcatcagttgccgatactgcagaagaaaaatttgtcccctactatgatttatttatgccatcactgaagcacatcgttgagaatgcggttcaaaaagaactgagacttctgagaggaaaaactattgaatgcattagcctcattggtctggctgttgggaaggaaaaattcatgcaggatgcatcagatgtgatgcagcttttgttaaagacccagacagacttcaatgatatggaagatgatgatcctcagatctcttacatgatctcagcatgggccagaatgtgcaaaatccttggaaaagaatttcagcaataccttccagtggttatggggcctttaatgaagacggcttcaattaagcccgaagtagcccttttagatacccaagacatggagaatatgagtgatgatgatggttgggaatttgtgaaccttggagatcagcaaagctttggtattaaaactgcaggactagaagaaaaatcaactgcttgccagatgttggtttgctatgctaaggagttaaaggaaggctttgtggagtacaccgaacaggttgtcaaactgatggtccctttactgaaattttatttccacgatggtgttcgagtggcagcagcggaatccatgcctcttctcctggagtgtgcaagagtccgtggtcctgagtatctcacacagatgtggcattttatgtgtgatgctctaattaaggccattggtacagaaccagattcagacgtcctctcagaaataatgcattcttttgcaaagtgcattgaagtaatgggagatggatgccttaataatgaacactttgaagaactgggaggtatattgaaagcaaagcttgaagaacattttaaaaatcaagaattacgacaagttaaaagacaagatgaagactatgatgaacaggtcgaagagtcactacaagatgaggatgataatgatgtttatattctgaccaaagtgtcagatattttacactcaatattcagtagctacaaagaaaaggtgttaccatggtttgaacagctgcttccattaattgtcaacctcatttgtccacatagaccatggccagacagacaatggggattatgcatctttgatgatgtcatagaacactgtagtccagcctcatttaaatacgcagaatatttcttaagaccaatgctccaatatgtatgtgacaacagcccagaagtcaggcaagcagctgcatatggcctgggagtcatggcacagtacggtggagataattatcgccctttttgtacagaagcacttcccctgctggtaagagttattcagtctgcggattctaagaccaaagaaaatgtcaatgctacagagaactgcatctcagcagtagggaaaatcatgaagttcaagcctgactgtgtaaacgttgaagaggtccttccacactggttgtcttggcttccactacatgaagataaagaagaagctgttcagactttcaattatctgtgtgacctgattgaaagtaatcatccaattgttcttggcccaaacaataccaatctgcccaaaatatttagtataattgcggaaggagaaatgcacgaggcaattaaacatgaagatccttgtgccaaacgtctggccaatgtcgttcgccaagtacagacttctggaggactgtggactgagtgcatagcacagctcagtcctgagcagcaggccgccattcaggagctcctgaactctgcgtgaagggccttaatgtcacccaccagaaaactaactccaaataaacgcttaccctttcctttaggtttctttgttttgtttttgagcaaaagagatcggtagtgttgtgtgtaggccattcttctggagagccacaagcaggaagagcagcgctgtgttgcagaatggagtttccatggatttctaccagaccactgaaggagttcctggaagccctgcggtagctagcactgaagactatttttctattggtataacccgcccacctgaaggggaaagggaaatcaaattaatttttctcgttagacataaggaaatttaaggaaaaacagctttaagaacagttactcagcgtagatgtgtgttcacacaaattgctctgcattcagtgttcattgtgaattgggagtgtgagtctttctgtagggtagaaagaagcctcctacccagcaaaccagtagacccaaaagttgaaaaaaactgatgacagacaacaagcatgaagatggcatatttgatgtcactttggttctttttcccagaaggcttatacagtgactcagtcgggaagctttccagcttccagcccttgaatgtgaagtgtcattggcatgtctggcagtagtctctcattcactcctcaataaacaacattgaatacaaaagaggcttgtgtaaaaactcagtactgtctggcttggattcatttcatgtttttaatataagaatgatctaatatttttttaaagtaatagctatcagtaatagctgagtgttttttcccctaatattttccttgtgcaattcagacttaagcatcgagtttttaccatcttccactttaagctaagttatgatacctattccattcacaattggtgttctttttaaggtttgcaaatttcagccaattttgtagctaagattgttctgatcagctcaaaaagatttggcttagtgttttcattgcaaattataattgctgtagagccacacacaacttttgaacttttaattataagtgttatggctaaagttatttactgaaaatttcagtaaaatgtgtgaatgtttctttatgtattaacctcatagcagtaaatgacttgctgttgtttaatttttctaaggcatcttaatagacttctgttgaaaacttcagtgttaacatttttatagtttgtactaaatttaaccgtgatataaaaatgaattttatgcatagatcagaattttaaattaaaggttttttctttaaatgatttgtattactttattaaaactaaatctgaaatggaatagaaaatagaatggattacatacagatggtttccttgttagcagatgcccttcaaatatattttacgtttgcagcacaacaccattgcccggaggcttccgaatctagcaaagcagcatattaaatgactccacctgcgcagtccttgtgttcagtggatgaatacctgtgggctcttgtaatgtgtggtaatatttggagctttatagcctgtattccttgggagaaaaaaatgggaattggagtaaaaagtgtgtcaagacaacccctttctgctttcttatgtagcatctgcaaagccgattcatgtactgatgccaatcagctagagcaatgtaggctttttttaatttaaattattactacactttattactacacttgcagaaaagaaacatgttaaaatcatggcacacctgcagaatttcagatgacagtgtggtcagaagatgttttttgggagaacctagtgtttgctgggcactatgctaagcactttgggagcaagaacctcctaccttccagtttaaacactagtggtattgtcagatgccgttagtatctgagatgtacttacggcagggttctaagagctctgaaagaagcgctctgttagatgcagactggcagcatcctccttgataaaagcagaaaagcaaagaggtaattggagttgaatcaagttaatagggaaggttggtagtaaatgctgttagtgtgacatgattctgaaacccagagctcagaactaactgtgagatgtaccatgaactaacaattctttgaaaggacctgcagaagcatttttaatacctcattctgtctatgcaagatgaaaatccatggagttttttcttggcttttgtaccaaatttaggggtcttgcatgtcagcaagtgatatatattgtttataaatgcaagctatttctggaggggaaaaatgtgtgtggctcttacgttttctgggaattttgtaacaagttacacgcacaagtgttagaaactttggcataactcaatttggagtattttttaaatgctgtatctttaaagaaaagtaaaattgtcttaaatctaattgacacttctgtaatgagaggcaaccttataactctggagttgtagtttgacagaaccatcagtaaagacataagcaaat

SEQ ID NO: 405398 - DNA, 4906 bp, Homo sapiens
aaggctaggtgcgaggctgggtttaatcggccgaggagaaaacataccaatattgttgcacagactattcctcagatgttagcaatgatggttgatttggaagaagatgaggactgggcaaatgcagatgaactagaagatgatgattttgacagcaatgcagttgcaggcgagagtgctctagatcgaatggcttgcggacttggtggaaagctcgttctgccgatgatcaaggaacacattatgcaaatgcttcaaaatcctgactggaaataccggcatgcaggattgatggccttatctgccattggtgaagggtgccaccagcaaatggaaggaattctaaatgagatcgtaaattttgttttactttttctccaggatcctcatccaagagtaaggtatgcagcctgtaatgccgtgggacagatggctacagattttgcacctggtttccaaaagaaatttcatgagaaggtgattgcagctctgctgcagaccatggaagaccaaggcaatcaacgtgtgcaggcccatgcagctgctgccctcattaactttactgaagactgtcccaagtcactacttattccatacttggataatttggtgaaacatctgcattccattatggtactgaagcttcaagagctgattcagaaaggcaccaagttagttttggaacaagttgtgacatccattgcatcagttgccgatactgcagaagaaaaatttgtcccctactatgatttatttatgccatcactgaagcacatcgttgagaatgcggttcaaaaagaactgagacttctgagaggaaaaactattgaatgcattagcctcattggtctggctgttgggaaggaaaaattcatgcaggatgcatcagatgtgatgcagcttttgttaaagacccagacagacttcaatgatatggaagatgatgatcctcagatctcttacatgatctcagcatgggccagaatgtgcaaaatccttggaaaagaatttcagcaataccttccagtggttatggggcctttaatgaagacggcttcaattaagcccgaagtagcccttttagatacccaagacatggagaatatgagtgatgatgatggttgggaatttgtgaaccttggagatcagcaaagctttggtattaaaactgcaggactagaagaaaaatcaactgcttgccagatgttggtttgctatgctaaggagttaaaggaaggctttgtggagtacaccgaacaggttgtcaaactgatggtccctttactgaaattttatttccacgatggtgttcgagtggcagcagcggaatccatgcctcttctcctggagtgtgcaagagtccgtggtcctgagtatctcacacagatgtggcattttatgtgtgatgctctaattaaggccattggtacagaaccagattcagacgtcctctcagaaataatgcattcttttgcaaagtgcattgaagtaatgggagatggatgccttaataatgaacactttgaagaactgggaggtatattgaaagcaaagcttgaagaacattttaaaaatcaagaattacgacaagttaaaagacaagatgaagactatgatgaacaggtcgaagagtcactacaagatgaggatgataatgatgtttatattctgaccaaagtgtcagatattttacactcaatattcagtagctacaaagaaaaggtgttaccatggtttgaacagctgcttccattaattgtcaacctcatttgtccacatagaccatggccagacagacaatggggattatgcatctttgatgatgtcatagaacactgtagtccagcctcatttaaatacgcagaatatttcttaagaccaatgctccaatatgtatgtgacaacagcccagaagtcaggcaagcagctgcatatggcctgggagtcatggcacagtacggtggagataattatcgccctttttgtacagaagcacttcccctgctggtaagagttattcagtctgcggattctaagaccaaagaaaatgtcaatgctacagagaactgcatctcagcagtagggaaaatcatgaagttcaagcctgactgtgtaaacgttgaagaggtccttccacactggttgtcttggcttccactacatgaagataaagaagaagctgttcagactttcaattatctgtgtgacctgattgaaagtaatcatccaattgttcttggcccaaacaataccaatctgcccaaaatatttagtataattgcggaaggagaaatgcacgaggcaattaaacatgaagatccttgtgccaaacgtctggccaatgtcgttcgccaagtacagacttctggaggactgtggactgagtgcatagcacagctcagtcctgagcagcaggccgccattcaggagctcctgaactctgcgtgaagggccttaatgtcacccaccagaaaactaactccaaataaacgcttaccctttcctttaggtttctttgttttgtttttgagcaaaagagatcggtagtgttgtgtgtaggccattcttctggagagccacaagcaggaagagcagcgctgtgttgcagaatggagtttccatggatttctaccagaccactgaaggagttcctggaagccctgcggtagctagcactgaagactatttttctattggtataacccgcccacctgaaggggaaagggaaatcaaattaatttttctcgttagacataaggaaatttaaggaaaaacagctttaagaacagttactcagcgtagatgtgtgttcacacaaattgctctgcattcagtgttcattgtgaattgggagtgtgagtctttctgtagggtagaaagaagcctcctacccagcaaaccagtagacccaaaagttgaaaaaaactgatgacagacaacaagcatgaagatggcatatttgatgtcactttggttctttttcccagaaggcttatacagtgactcagtcgggaagctttccagcttccagcccttgaatgtgaagtgtcattggcatgtctggcagtagtctctcattcactcctcaataaacaacattgaatacaaaagaggcttgtgtaaaaactcagtactgtctggcttggattcatttcatgtttttaatataagaatgatctaatatttttttaaagtaatagctatcagtaatagctgagtgttttttcccctaatattttccttgtgcaattcagacttaagcatcgagtttttaccatcttccactttaagctaagttatgatacctattccattcacaattggtgttctttttaaggtttgcaaatttcagccaattttgtagctaagattgttctgatcagctcaaaaagatttggcttagtgttttcattgcaaattataattgctgtagagccacacacaacttttgaacttttaattataagtgttatggctaaagttatttactgaaaatttcagtaaaatgtgtgaatgtttctttatgtattaacctcatagcagtaaatgacttgctgttgtttaatttttctaaggcatcttaatagacttctgttgaaaacttcagtgttaacatttttatagtttgtactaaatttaaccgtgatataaaaatgaattttatgcatagatcagaattttaaattaaaggttttttctttaaatgatttgtattactttattaaaactaaatctgaaatggaatagaaaatagaatggattacatacagatggtttccttgttagcagatgcccttcaaatatattttacgtttgcagcacaacaccattgcccggaggcttccgaatctagcaaagcagcatattaaatgactccacctgcgcagtccttgtgttcagtggatgaatacctgtgggctcttgtaatgtgtggtaatatttggagctttatagcctgtattccttgggagaaaaaaatgggaattggagtaaaaagtgtgtcaagacaacccctttctgctttcttatgtagcatctgcaaagccgattcatgtactgatgccaatcagctagagcaatgtaggctttttttaatttaaattattactacactttattactacacttgcagaaaagaaacatgttaaaatcatggcacacctgcagaatttcagatgacagtgtggtcagaagatgttttttgggagaacctagtgtttgctgggcactatgctaagcactttgggagcaagaacctcctaccttccagtttaaacactagtggtattgtcagatgccgttagtatctgagatgtacttacggcagggttctaagagctctgaaagaagcgctctgttagatgcagactggcagcatcctccttgataaaagcagaaaagcaaagaggtaattggagttgaatcaagttaatagggaaggttggtagtaaatgctgttagtgtgacatgattctgaaacccagagctcagaactaactgtgagatgtaccatgaactaacaattctttgaaaggacctgcagaagcatttttaatacctcattctgtctatgcaagatgaaaatccatggagttttttcttggcttttgtaccaaatttaggggtcttgcatgtcagcaagtgatatatattgtttataaatgcaagctatttctggaggggaaaaatgtgtgtggctcttacgttttctgggaattttgtaacaagttacacgcacaagtgttagaaactttggcataactcaatttggagtattttttaaatgctgtatctttaaagaaaagtaaaattgtcttaaatctaattgacacttctgtaatgagaggcaaccttataactctggagttgtagtttgacagaaccatcagtaaagacataagcaaat

SEQ ID NO: 405399 - DNA, 6127 bp, Homo sapiens
  misc_feature (41)..(41): n is a, c, g, or t
cgtacccatatccgcagcaggtctccaaggtgaacagcttntgttaaagacccagacagacttcaatgatatggaagatgatgatcctcagatctcttacatgatctcagcatgggccagaatgtgcaaaatccttggaaaagaatttcagcaataccttccagtggttatggggcctttaatgaagacggcttcaattaagcccgaagtagcccttttagatacccaagacatggagaatatgagtgatgatgatggttgggaatttgtgaaccttggagatcagcaaagctttggtattaaaactgcaggactagaagaaaaatcaactgcttgccagatgttggtttgctatgctaaggagttaaaggaaggctttgtggagtacaccgaacaggttgtcaaactgatggtccctttactgaaattttatttccacgatggtgttcgagtggcagcagcggaatccatgcctcttctcctgtctcccctccctccttctctctcacgcctagcgcaatggcggcggccgcggcggagcagcaacagttctacctgctcctgggaaacctgctcagccccgacaatgtggtccggaaacaggcagaggaaacctatgagaatatcccaggccagtcaaagatcacattcctcttacaagccatcagaaatacaacagctgctgaagaggctagacaaatggccgccgttctcctaagacgtctcttgtcctctgcatttgatgaagtctatccagcacttccctctgatgttcagactgccatcaagagtgagctactcatgattattcagatggaaacacaatctagcatgaggaaaaaagtttgtgatattgcggcagaactggccaggaatttaatagatgaggatggcaataaccagtggcccgaaggtttgaagttcctttttgattcagtcagctctcaaaatgtgggactgcgggaagctgcccttcacattttctggaactttcctggaatttttgggaaccagcaacaacactatttagatgtcatcaaacgaatgttagttcagtgtatgcaagatcaggaacacccgtcgatcaggacgttatctgctagagctacagctgcatttatacttgcaaatgagcataatgttgctctgttcaaacattttgcagacttgctaccgggattcctacaggcggtaaatgactcgtgctaccagaatgatgattctgtcctaaaatccctcgttgagattgcagatactgttccaaagtatttgcgtcctcacttggaagcaactctacagctaagtctaaagttgtgtggagacactagcctcaacaatatgcaacgccagcttgcccttgaagtgatcgtcaccctctctgagactgcagctgctatgttaagaaaacataccaatattgttgcacagactattcctcagatgttagcaatgatggttgatttggaagaagatgaggactgggcaaatgcagatgaactagaagatgatgattttgacagcaatgcagttgcaggcgagagtgctctagatcgaatggcttgcggacttggtggaaagctcgttctgccgatgatcaaggaacacattatgcaaatgcttcaaaatcctgactggaaataccggcatgcaggattgatggccttatctgccattggtgaagggtgccaccagcaaatggaaggaattctaaatgagatcgtaaattttgttttactttttctccaggatcctcatccaagagtaaggtatgcagcctgtaatgccgtgggacagatggctacagattttgcacctggtttccaaaagaaatttcatgagaaggtgattgcagctctgctgcagaccatggaagaccaaggcaatcaacgtgtgcaggcccatgcagctgctgccctcattaactttactgaagactgtcccaagtcactacttattccatacttggataatttggtgaaacatctgcattccattatggtactgaagcttcaagagctgattcagaaaggcaccaagttagttttggaacaagttgtgacatccattgcatcagttgccgatactgcagaagaaaaatttgtcccctactatgatttatttatgccatcactgaagcacatcgttgagaatgcggttcaaaaagaactgagacttctgagaggaaaaactattgaatgcattagcctcattggtctggctgttgggaaggaaaaattcatgcaggatgcatcagatgtgatgcagcttttgttaaagacccagacagacttcaatgatatggaagatgatgatcctcagatctcttacatgatctcagcatgggccagaatgtgcaaaatccttggaaaagaatttcagcaataccttccagtggttatggggcctttaatgaagacggcttcaattaagcccgaagtagcccttttagatacccaagacatggagaatatgagtgatgatgatggttgggaatttgtgaaccttggagatcagcaaagctttggtattaaaactgcaggactagaagaaaaatcaactgcttgccagatgttggtttgctatgctaaggagttaaaggaaggctttgtggagtacaccgaacaggttgtcaaactgatggtccctttactgaaattttatttccacgatggtgttcgagtggcagcagcggaatccatgcctcttctcctggagtgtgcaagagtccgtggtcctgagtatctcacacagatgtggcattttatgtgtgatgctctaattaaggccattggtacagaaccagattcagacgtcctctcagaaataatgcattcttttgcaaagtgcattgaagtaatgggagatggatgccttaataatgaacactttgaagaactgggaggtatattgaaagcaaagcttgaagaacattttaaaaatcaagaattacgacaagttaaaagacaagatgaagactatgatgaacaggtcgaagagtcactacaagatgaggatgataatgatgtttatattctgaccaaagtgtcagatattttacactcaatattcagtagctacaaagaaaaggtgttaccatggtttgaacagctgcttccattaattgtcaacctcatttgtccacatagaccatggccagacagacaatggggattatgcatctttgatgatgtcatagaacactgtagtccagcctcatttaaatacgcagaatatttcttaagaccaatgctccaatatgtatgtgacaacagcccagaagtcaggcaagcagctgcatatggcctgggagtcatggcacagtacggtggagataattatcgccctttttgtacagaagcacttcccctgctggtaagagttattcagtctgcggattctaagaccaaagaaaatgtcaatgctacagagaactgcatctcagcagtagggaaaatcatgaagttcaagcctgactgtgtaaacgttgaagaggtccttccacactggttgtcttggcttccactacatgaagataaagaagaagctgttcagactttcaattatctgtgtgacctgattgaaagtaatcatccaattgttcttggcccaaacaataccaatctgcccaaaatatttagtataattgcggaaggagaaatgcacgaggcaattaaacatgaagatccttgtgccaaacgtctggccaatgtcgttcgccaagtacagttaggtttctttgttttgtttttgagcaaaagagatcggtagtgttgtgtgtaggccattcttctggagagccacaagcaggaagagcagcgctgtgttgcagaatggagtttccatggatttctaccagaccactgaaggagttcctggaagccctgcggtagctagcactgaagactatttttctattggtataacccgcccacctgaaggggaaagggaaatcaaattaatttttctcgttagacataaggaaatttaaggaaaaacagctttaagaacagttactcagcgtagatgtgtgttcacacaaattgctctgcattcagtgttcattgtgaattgggagtgtgagtctttctgtagggtagaaagaagcctcctacccagcaaaccagtagacccaaaagttgaaaaaaactgatgacagacaacaagcatgaagatggcatatttgatgtcactttggttctttttcccagaaggcttatacagtgactcagtcgggaagctttccagcttccagcccttgaatgtgaagtgtcattggcatgtctggcagtagtctctcattcactcctcaataaacaacattgaatacaaaagaggcttgtgtaaaaactcagtactgtctggcttggattcatttcatgtttttaatataagaatgatctaatatttttttaaagtaatagctatcagtaatagctgagtgttttttcccctaatattttccttgtgcaattcagacttaagcatcgagtttttaccatcttccactttaagctaagttatgatacctattccattcacaattggtgttctttttaaggtttgcaaatttcagccaattttgtagctaagattgttctgatcagctcaaaaagatttggcttagtgttttcattgcaaattataattgctgtagagccacacacaacttttgaacttttaattataagtgttatggctaaagttatttactgaaaatttcagtaaaatgtgtgaatgtttctttatgtattaacctcatagcagtaaatgacttgctgttgtttaatttttctaaggcatcttaatagacttctgttgaaaacttcagtgttaacatttttatagtttgtactaaatttaaccgtgatataaaaatgaattttatgcatagatcagaattttaaattaaaggttttttctttaaatgatttgtattactttattaaaactaaatctgaaatggaatagaaaatagaatggattacatacagatggtttccttgttagcagatgcccttcaaatatattttacgtttgcagcacaacaccattgcccggaggcttccgaatctagcaaagcagcatattaaatgactccacctgcgcagtccttgtgttcagtggatgaatacctgtgggctcttgtaatgtgtggtaatatttggagctttatagcctgtattccttgggagaaaaaaatgggaattggagtaaaaagtgtgtcaagacaacccctttctgctttcttatgtagcatctgcaaagccgattcatgtactgatgccaatcagctagagcaatgtaggctttttttaatttaaattattactacactttattactacacttgcagaaaagaaacatgttaaaatcatggcacacctgcagaatttcagatgacagtgtggtcagaagatgttttttgggagaacctagtgtttgctgggcactatgctaagcactttgggagcaagaacctcctaccttccagtttaaacactagtggtattgtcagatgccgttagtatctgagatgtacttacggcagggttctaagagctctgaaagaagcgctctgttagatgcagactggcagcatcctccttgataaaagcagaaaagcaaagaggtaattggagttgaatcaagttaatagggaaggttggtagtaaatgctgttagtgtgacatgattctgaaacccagagctcagaactaactgtgagatgtaccatgaactaacaattctttgaaaggacctgcagaagcatttttaatacctcattctgtctatgcaagatgaaaatccatggagttttttcttggcttttgtaccaaatttaggggtcttgcatgtcagcaagtgatatatattgtttataaatgcaagctatttctggaggggaaaaatgtgtgtggctcttacgttttctgggaattttgtaacaagttacacgcacaagtgttagaaactttggcataactcaatttggagtattttttaaatgctgtatctttaaagaaaagtaaaattgtcttaaatctaattgacacttctgtaatgagaggcaaccttataactctggagttgtagtttgacagaaccatcagtaaagacataagcaaat

SEQ ID NO: 405400 - DNA, 3579 bp, Homo sapiens
  misc_feature (22)..(22): n is a, c, g, or t
aaactagctaggtacgaggcgngtgtgcaagagtccgtggtcctgagtatctcacacagatgtggcattttatgtgtgatgctctaattaaggccattggtacagaaccagattcagacgtcctctcagaaataatgcattcttttgcaaagtgcattgaagtaatgggagatggatgccttaataatgaacactttgaagaactgggaggtatattgaaagcaaagcttgaagaacattttaaaaatcaagaattacgacaagttaaaagacaagatgaagactatgatgaacaggtcgaagagtcactacaagatgaggatgataatgatgtttatattctgaccaaagtgtcagatattttacactcaatattcagtagctacaaagaaaaggtgttaccatggtttgaacagctgcttccattaattgtcaacctcatttgtccacatagaccatggccagacagacaatggggattatgcatctttgatgatgtcatagaacactgtagtccagcctcatttaaatacgcagaatatttcttaagaccaatgctccaatatgtatgtgacaacagcccagaagtcaggcaagcagctgcatatggcctgggagtcatggcacagtacggtggagataattatcgccctttttgtacagaagcacttcccctgctggtaagagttattcagtctgcggattctaagaccaaagaaaatgtcaatgctacagagaactgcatctcagcagtagggaaaatcatgaagttcaagcctgactgtgtaaacgttgaagaggtccttccacactggttgtcttggcttccactacatgaagataaagaagaagctgttcagactttcaattatctgtgtgacctgattgaaagtaatcatccaattgttcttggcccaaacaataccaatctgcccaaaatatttagtataattgcggaaggagaaatgcacgaggcaattaaacatgaagatccttgtgccaaacgtctggccaatgtcgttcgccaagtacagacttctggaggactgtggactgagtgcatagcacagctcagtcctgagcagcaggccgccattcaggagctcctgaactctgcgtgaagggccttaatgtcacccaccagaaaactaactccaaataaacgcttaccctttcctttaggtttctttgttttgtttttgagcaaaagagatcggtagtgttgtgtgtaggccattcttctggagagccacaagcaggaagagcagcgctgtgttgcagaatggagtttccatggatttctaccagaccactgaaggagttcctggaagccctgcggtagctagcactgaagactatttttctattggtataacccgcccacctgaaggggaaagggaaatcaaattaatttttctcgttagacataaggaaatttaaggaaaaacagctttaagaacagttactcagcgtagatgtgtgttcacacaaattgctctgcattcagtgttcattgtgaattgggagtgtgagtctttctgtagggtagaaagaagcctcctacccagcaaaccagtagacccaaaagttgaaaaaaactgatgacagacaacaagcatgaagatggcatatttgatgtcactttggttctttttcccagaaggcttatacagtgactcagtcgggaagctttccagcttccagcccttgaatgtgaagtgtcattggcatgtctggcagtagtctctcattcactcctcaataaacaacattgaatacaaaagaggcttgtgtaaaaactcagtactgtctggcttggattcatttcatgtttttaatataagaatgatctaatatttttttaaagtaatagctatcagtaatagctgagtgttttttcccctaatattttccttgtgcaattcagacttaagcatcgagtttttaccatcttccactttaagctaagttatgatacctattccattcacaattggtgttctttttaaggtttgcaaatttcagccaattttgtagctaagattgttctgatcagctcaaaaagatttggcttagtgttttcattgcaaattataattgctgtagagccacacacaacttttgaacttttaattataagtgttatggctaaagttatttactgaaaatttcagtaaaatgtgtgaatgtttctttatgtattaacctcatagcagtaaatgacttgctgttgtttaatttttctaaggcatcttaatagacttctgttgaaaacttcagtgttaacatttttatagtttgtactaaatttaaccgtgatataaaaatgaattttatgcatagatcagaattttaaattaaaggttttttctttaaatgatttgtattactttattaaaactaaatctgaaatggaatagaaaatagaatggattacatacagatggtttccttgttagcagatgcccttcaaatatattttacgtttgcagcacaacaccattgcccggaggcttccgaatctagcaaagcagcatattaaatgactccacctgcgcagtccttgtgttcagtggatgaatacctgtgggctcttgtaatgtgtggtaatatttggagctttatagcctgtattccttgggagaaaaaaatgggaattggagtaaaaagtgtgtcaagacaacccctttctgctttcttatgtagcatctgcaaagccgattcatgtactgatgccaatcagctagagcaatgtaggctttttttaatttaaattattactacactttattactacacttgcagaaaagaaacatgttaaaatcatggcacacctgcagaatttcagatgacagtgtggtcagaagatgttttttgggagaacctagtgtttgctgggcactatgctaagcactttgggagcaagaacctcctaccttccagtttaaacactagtggtattgtcagatgccgttagtatctgagatgtacttacggcagggttctaagagctctgaaagaagcgctctgttagatgcagactggcagcatcctccttgataaaagcagaaaagcaaagaggtaattggagttgaatcaagttaatagggaaggttggtagtaaatgctgttagtgtgacatgattctgaaacccagagctcagaactaactgtgagatgtaccatgaactaacaattctttgaaaggacctgcagaagcatttttaatacctcattctgtctatgcaagatgaaaatccatggagttttttcttggcttttgtaccaaatttaggggtcttgcatgtcagcaagtgatatatattgtttataaatgcaagctatttctggaggggaaaaatgtgtgtggctcttacgttttctgggaattttgtaacaagttacacgcacaagtgttagaaactttggcataactcaatttggagtattttttaaatgctgtatctttaaagaaaagtaaaattgtcttaaatctaattgacacttctgtaatgagaggcaaccttataactctggagttgtagtttgacagaaccatcagtaaagacataagcaaat

SEQ ID NO: 405401 - DNA, 3870 bp, Homo sapiens
  misc_feature (41)..(41): n is a, c, g, or t
cgtacccatatccgcagcaggtctccaaggtgaacagcttntgttaaagacccagacagacttcaatgatatggaagatgatgatcctcagatctcttacatgatctcagcatgggccagaatgtgcaaaatccttggaaaagaatttcagcaataccttccagtggttatggggcctttaatgaagacggcttcaattaagcccgaagtagcccttttagatacccaagacatggagaatatgagtgatgatgatggttgggaatttgtgaaccttggagatcagcaaagctttggtattaaaactgcaggactagaagaaaaatcaactgcttgccagatgttggtttgctatgctaaggagttaaaggaaggctttgtggagtacaccgaacaggttgtcaaactgatggtccctttactgaaattttatttccacgatggtgttcgagtggcagcagcggaatccatgcctcttctcctgtctcccctccctccttctctctcacgcctagcgcaatggcggcggccgcggcggagcagcaacagttctacctgctcctgggaaacctgctcagccccgacaatgtggtccggaaacaggcagaggaaacctatgagaatatcccaggccagtcaaagatcacattcctcttacaagccatcagaaatacaacagctgctgaagaggctagacaaatggccgccgttctcctaagacgtctcttgtcctctgcatttgatgaagtctatccagcacttccctctgatgttcagactgccatcaagagtgagctactcatgattattcagatggaaacacaatctagcatgaggaaaaaagtttgtgatattgcggcagaactggccaggaatttaatagatgaggatggcaataaccagtggcccgaaggtttgaagttcctttttgattcagtcagctctcaaaatgtgggactgcgggaagctgcccttcacattttctggaactttcctggaatttttgggaaccagcaacaacactatttagatgtcatcaaacgaatgttagttcagtgtatgcaagatcaggaacacccgtcgatcaggacgttatctgctagagctacagctgcatttatacttgcaaatgagcataatgttgctctgttcaaacattttgcagacttgctaccgggattcctacaggcggtaaatgactcgtgctaccagaatgatgattctgtcctaaaatccctcgttgagattgcagatactgttccaaagtatttgcgtcctcacttggaagcaactctacagctaagtctaaagttgtgtggagacactagcctcaacaatatgcaacgccagcttgcccttgaagtgatcgtcaccctctctgagactgcagctgctatgttaagaaaacataccaatattgttgcacagactattcctcagatgttagcaatgatggttgatttggaagaagatgaggactgggcaaatgcagatgaactagaagatgatgattttgacagcaatgcagttgcaggcgagagtgctctagatcgaatggcttgcggacttggtggaaagctcgttctgccgatgatcaaggaacacattatgcaaatgcttcaaaatcctgactggaaataccggcatgcaggattgatggccttatctgccattggtgaagggtgccaccagcaaatggaaggaattctaaatgagatcgtaaattttgttttactttttctccaggatcctcatccaagagtaaggtatgcagcctgtaatgccgtgggacagatggctacagattttgcacctggtttccaaaagaaatttcatgagaaggtgattgcagctctgctgcagaccatggaagaccaaggcaatcaacgtgtgcaggcccatgcagctgctgccctcattaactttactgaagactgtcccaagtcactacttattccatacttggataatttggtgaaacatctgcattccattatggtactgaagcttcaagagctgattcagaaaggcaccaagttagttttggaacaagttgtgacatccattgcatcagttgccgatactgcagaagaaaaatttgtcccctactatgatttatttatgccatcactgaagcacatcgttgagaatgcggttcaaaaagaactgagacttctgagaggaaaaactattgaatgcattagcctcattggtctggctgttgggaaggaaaaattcatgcaggatgcatcagatgtgatgcagcttttgttaaagacccagacagacttcaatgatatggaagatgatgatcctcagatctcttacatgatctcagcatgggccagaatgtgcaaaatccttggaaaagaatttcagcaataccttccagtggttatggggcctttaatgaagacggcttcaattaagcccgaagtagcccttttagatacccaagacatggagaatatgagtgatgatgatggttgggaatttgtgaaccttggagatcagcaaagctttggtattaaaactgcaggactagaagaaaaatcaactgcttgccagatgttggtttgctatgctaaggagttaaaggaaggctttgtggagtacaccgaacaggttgtcaaactgatggtccctttactgaaattttatttccacgatggtgttcgagtggcagcagcggaatccatgcctcttctcctggagtgtgcaagagtccgtggtcctgagtatctcacacagatgtggcattttatgtgtgatgctctaattaaggccattggtacagaaccagattcagacgtcctctcagaaataatgcattcttttgcaaagtgcattgaagtaatgggagatggatgccttaataatgaacactttgaagaactgggaggtatattgaaagcaaagcttgaagaacattttaaaaatcaagaattacgacaagttaaaagacaagatgaagactatgatgaacaggtcgaagagtcactacaagatgaggatgataatgatgtttatattctgaccaaagtgtcagatattttacactcaatattcagtagctacaaagaaaaggtgttaccatggtttgaacagctgcttccattaattgtcaacctcatttgtccacatagaccatggccagacagacaatggggattatgcatctttgatgatgtcatagaacactgtagtccagcctcatttaaatacgcagaatatttcttaagaccaatgctccaatatgtatgtgacaacagcccagaagtcaggcaagcagctgcatatggcctgggagtcatggcacagtacggtggagataattatcgccctttttgtacagaagcacttcccctgctggtaagagttattcagtctgcggattctaagaccaaagaaaatgtcaatgctacagagaactgcatctcagcagtagggaaaatcatgaagttcaagcctgactgtgtaaacgttgaagaggtccttccacactggttgtcttggcttccactacatgaagataaagaagaagctgttcagactttcaattatctgtgtgacctgattgaaagtaatcatccaattgttcttggcccaaacaataccaatctgcccaaaatatttagtataattgcggaaggagaaatgcacgaggcaattaaacatgaagatccttgtgccaaacgtctggccaatgtcgttcgccaagtacagacttctggaggactgtggactgagtgcatagcacagctcagtcctgagcagcaggccgccattcaggagctcctgaactctgcgtgaagggccttaatgtcacccaccagaaaactaactccaaataaacgcttaccctttcct

SEQ ID NO: 405402 - DNA, 3829 bp, Homo sapiens
  misc_feature (41)..(41): n is a, c, g, or t
  misc_feature (3745)..(3745): n is a, c, g, or t
  misc_feature (3779)..(3779): n is a, c, g, or t
  misc_feature (3794)..(3794): n is a, c, g, or t
  misc_feature (3807)..(3807): n is a, c, g, or t
  misc_feature (3825)..(3825): n is a, c, g, or t
cgtacccatatccgcagcaggtctccaaggtgaacagcttntgttaaagacccagacagacttcaatgatatggaagatgatgatcctcagatctcttacatgatctcagcatgggccagaatgtgcaaaatccttggaaaagaatttcagcaataccttccagtggttatggggcctttaatgaagacggcttcaattaagcccgaagtagcccttttagatacccaagacatggagaatatgagtgatgatgatggttgggaatttgtgaaccttggagatcagcaaagctttggtattaaaactgcaggactagaagaaaaatcaactgcttgccagatgttggtttgctatgctaaggagttaaaggaaggctttgtggagtacaccgaacaggttgtcaaactgatggtccctttactgaaattttatttccacgatggtgttcgagtggcagcagcggaatccatgcctcttctcctgtctcccctccctccttctctctcacgcctagcgcaatggcggcggccgcggcggagcagcaacagttctacctgctcctgggaaacctgctcagccccgacaatgtggtccggaaacaggcagaggaaacctatgagaatatcccaggccagtcaaagatcacattcctcttacaagccatcagaaatacaacagctgctgaagaggctagacaaatggccgccgttctcctaagacgtctcttgtcctctgcatttgatgaagtctatccagcacttccctctgatgttcagactgccatcaagagtgagctactcatgattattcagatggaaacacaatctagcatgaggaaaaaagtttgtgatattgcggcagaactggccaggaatttaatagatgaggatggcaataaccagtggcccgaaggtttgaagttcctttttgattcagtcagctctcaaaatgtgggactgcgggaagctgcccttcacattttctggaactttcctggaatttttgggaaccagcaacaacactatttagatgtcatcaaacgaatgttagttcagtgtatgcaagatcaggaacacccgtcgatcaggacgttatctgctagagctacagctgcatttatacttgcaaatgagcataatgttgctctgttcaaacattttgcagacttgctaccgggattcctacaggcggtaaatgactcgtgctaccagaatgatgattctgtcctaaaatccctcgttgagattgcagatactgttccaaagtatttgcgtcctcacttggaagcaactctacagctaagtctaaagttgtgtggagacactagcctcaacaatatgcaacgccagcttgcccttgaagtgatcgtcaccctctctgagactgcagctgctatgttaagaaaacataccaatattgttgcacagactattcctcagatgttagcaatgatggttgatttggaagaagatgaggactgggcaaatgcagatgaactagaagatgatgattttgacagcaatgcagttgcaggcgagagtgctctagatcgaatggcttgcggacttggtggaaagctcgttctgccgatgatcaaggaacacattatgcaaatgcttcaaaatcctgactggaaataccggcatgcaggattgatggccttatctgccattggtgaagggtgccaccagcaaatggaaggaattctaaatgagatcgtaaattttgttttactttttctccaggatcctcatccaagagtaaggtatgcagcctgtaatgccgtgggacagatggctacagattttgcacctggtttccaaaagaaatttcatgagaaggtgattgcagctctgctgcagaccatggaagaccaaggcaatcaacgtgtgcaggcccatgcagctgctgccctcattaactttactgaagactgtcccaagtcactacttattccatacttggataatttggtgaaacatctgcattccattatggtactgaagcttcaagagctgattcagaaaggcaccaagttagttttggaacaagttgtgacatccattgcatcagttgccgatactgcagaagaaaaatttgtcccctactatgatttatttatgccatcactgaagcacatcgttgagaatgcggttcaaaaagaactgagacttctgagaggaaaaactattgaatgcattagcctcattggtctggctgttgggaaggaaaaattcatgcaggatgcatcagatgtgatgcagcttttgttaaagacccagacagacttcaatgatatggaagatgatgatcctcagatctcttacatgatctcagcatgggccagaatgtgcaaaatccttggaaaagaatttcagcaataccttccagtggttatggggcctttaatgaagacggcttcaattaagcccgaagtagcccttttagatacccaagacatggagaatatgagtgatgatgatggttgggaatttgtgaaccttggagatcagcaaagctttggtattaaaactgcaggactagaagaaaaatcaactgcttgccagatgttggtttgctatgctaaggagttaaaggaaggctttgtggagtacaccgaacaggttgtcaaactgatggtccctttactgaaattttatttccacgatggtgttcgagtggcagcagcggaatccatgcctcttctcctggagtgtgcaagagtccgtggtcctgagtatctcacacagatgtggcattttatgtgtgatgctctaattaaggccattggtacagaaccagattcagacgtcctctcagaaataatgcattcttttgcaaagtgcattgaagtaatgggagatggatgccttaataatgaacactttgaagaactgggaggtatattgaaagcaaagcttgaagaacattttaaaaatcaagaattacgacaagttaaaagacaagatgaagactatgatgaacaggtcgaagagtcactacaagatgaggatgataatgatgtttatattctgaccaaagtgtcagatattttacactcaatattcagtagctacaaagaaaaggtgttaccatggtttgaacagctgcttccattaattgtcaacctcatttgtccacatagaccatggccagacagacaatggggattatgcatctttgatgatgtcatagaacactgtagtccagcctcatttaaatacgcagaatatttcttaagaccaatgctccaatatgtatgtgacaacagcccagaagtcaggcaagcagctgcatatggcctgggagtcatggcacagtacggtggagataattatcgccctttttgtacagaagcacttcccctgctggtaagagttattcagtctgcggattctaagaccaaagaaaatgtcaatgctacagagaactgcatctcagcagtagggaaaatcatgaagttcaagcctgactgtgtaaacgttgaagaggtccttccacactggttgtcttggcttccactacatgaagataaagaagaagctgttcagactttcaattatctgtgtgacctgattgaaagtaatcatccaattgttcttggcccaaacaataccaatctgcccaaaatatttagtataattgcggaaggagaaatgcacgaggcaattaaacatgaagatccttgtgccaaacgtctggccaatgtcgttcgccaagtacagtacaaacttctggaaggantgttgggactgaattgcattaaccacagctccantccctgaaccaacanggccgccctttcnaggaactccctgaaactnctgc

SEQ ID NO: 405403 - DNA, 3633 bp, Homo sapiens
  misc_feature (41)..(41): n is a, c, g, or t
cgtacccatatccgcagcaggtctccaaggtgaacagcttntgttaaagacccagacagacttcaatgatatggaagatgatgatcctcagatctcttacatgatctcagcatgggccagaatgtgcaaaatccttggaaaagaatttcagcaataccttccagtggttatggggcctttaatgaagacggcttcaattaagcccgaagtagcccttttagatacccaagacatggagaatatgagtgatgatgatggttgggaatttgtgaaccttggagatcagcaaagctttggtattaaaactgcaggactagaagaaaaatcaactgcttgccagatgttggtttgctatgctaaggagttaaaggaaggctttgtggagtacaccgaacaggttgtcaaactgatggtccctttactgaaattttatttccacgatggtgttcgagtggcagcagcggaatccatgcctcttctcctgtctcccctccctccttctctctcacgcctagcgcaatggcggcggccgcggcggagcagcaacagttctacctgctcctgggaaacctgctcagccccgacaatgtggtccggaaacaggcagaggaaacctatgagaatatcccaggccagtcaaagatcacattcctcttacaagccatcagaaatacaacagctgctgaagaggctagacaaatggccgccgttctcctaagacgtctcttgtcctctgcatttgatgaagtctatccagcacttccctctgatgttcagactgccatcaagagtgagctactcatgattattcagatggaaacacaatctagcatgaggaaaaaagtttgtgatattgcggcagaactggccaggaatttaatagatgaggatggcaataaccagtggcccgaaggtttgaagttcctttttgattcagtcagctctcaaaatgtgggactgcgggaagctgcccttcacattttctggaactttcctggaatttttgggaaccagcaacaacactatttagatgtcatcaaacgaatgttagttcagtgtatgcaagatcaggaacacccgtcgatcaggacgttatctgctagagctacagctgcatttatacttgcaaatgagcataatgttgctctgttcaaacattttgcagacttgctaccgggattcctacaggcggtaaatgactcgtgctaccagaatgatgattctgtcctaaaatccctcgttgagattgcagatactgttccaaagtatttgcgtcctcacttggaagcaactctacagctaagtctaaagttgtgtggagacactagcctcaacaatatgcaacgccagcttgcccttgaagtgatcgtcaccctctctgagactgcagctgctatgttaagaaaacataccaatattgttgcacagactattcctcagatgttagcaatgatggttgatttggaagaagatgaggactgggcaaatgcagatgaactagaagatgatgattttgacagcaatgcagttgcaggcgagagtgctctagatcgaatggcttgcggacttggtggaaagctcgttctgccgatgatcaaggaacacattatgcaaatgcttcaaaatcctgactggaaataccggcatgcaggattgatggccttatctgccattggtgaagggtgccaccagcaaatggaaggaattctaaatgagatcgtaaattttgttttactttttctccaggatcctcatccaagagtaaggtatgcagcctgtaatgccgtgggacagatggctacagattttgcacctggtttccaaaagaaatttcatgagaaggtgattgcagctctgctgcagaccatggaagaccaaggcaatcaacgtgtgcaggcccatgcagctgctgccctcattaactttactgaagactgtcccaagtcactacttattccatacttggataatttggtgaaacatctgcattccattatggtactgaagcttcaagagctgattcagaaaggcaccaagttagttttggaacaagttgtgacatccattgcatcagttgccgatactgcagaagaaaaatttgtcccctactatgatttatttatgccatcactgaagcacatcgttgagaatgcggttcaaaaagaactgagacttctgagaggaaaaactattgaatgcattagcctcattggtctggctgttgggaaggaaaaattcatgcaggatgcatcagatgtgatgcagcttttgttaaagacccagacagacttcaatgatatggaagatgatgatcctcagatctcttacatgatctcagcatgggccagaatgtgcaaaatccttggaaaagaatttcagcaataccttccagtggttatggggcctttaatgaagacggcttcaattaagcccgaagtagcccttttagatacccaagacatggagaatatgagtgatgatgatggttgggaatttgtgaaccttggagatcagcaaagctttggtattaaaactgcaggactagaagaaaaatcaactgcttgccagatgttggtttgctatgctaaggagttaaaggaaggctttgtggagtacaccgaacaggttgtcaaactgatggtccctttactgaaattttatttccacgatggtgttcgagtggcagcagcggaatccatgcctcttctcctggagtgtgcaagagtccgtggtcctgagtatctcacacagatgtggcattttatgtgtgatgctctaattaaggccattggtacagaaccagattcagacgtcctctcagaaataatgcattcttttgcaaagtgcattgaagtaatgggagatggatgccttaataatgaacactttgaagaactgggaggtatattgaaagcaaagcttgaagaacattttaaaaatcaagaattacgacaagttaaaagacaagatgaagactatgatgaacaggtcgaagagtcactacaagatgaggatgataatgatgtttatattctgaccaaagtgtcagatattttacactcaatattcagtagctacaaagaaaaggtgttaccatggtttgaacagctgcttccattaattgtcaacctcatttgtccacatagaccatggccagacagacaatggggattatgcatctttgatgatgtcatagaacactgtagtccagcctcatttaaatacgcagaatatttcttaagaccaatgctccaatatgtatgtgacaacagcccagaagtcaggcaagcagctgcatatggcctgggagtcatggcacagtacggtggagataattatcgccctttttgtacagaagcacttcccctgctggtaagagttattcagtctgcggattctaagaccaaagaaaatgtcaatgctacagagaactgcatctcagcagtagggaaaatcatgaagttcaagcctgactgtgtaaacgttgaagaggtccttccacactggttgtcttggcttccactacatgattggtgtgcagcagagctgcaatcaccttctcatgaaatttcttttggataccaggtgcaaaatctgtagccatctgtccacggcattacaggctgcatacct

SEQ ID NO: 405404 - DNA, 2453 bp, Homo sapiens
  misc_feature (41)..(41): n is a, c, g, or t
cgtacccatatccgcagcaggtctccaaggtgaacagcttntgttaaagacccagacagacttcaatgatatggaagatgatgatcctcagatctcttacatgatctcagcatgggccagaatgtgcaaaatccttggaaaagaatttcagcaataccttccagtggttatggggcctttaatgaagacggcttcaattaagcccgaagtagcccttttagatacccaagacatggagaatatgagtgatgatgatggttgggaatttgtgaaccttggagatcagcaaagctttggtattaaaactgcaggactagaagaaaaatcaactgcttgccagatgttggtttgctatgctaaggagttaaaggaaggctttgtggagtacaccgaacaggttgtcaaactgatggtccctttactgaaattttatttccacgatggtgttcgagtggcagcagcggaatccatgcctcttctcctgtctcccctccctccttctctctcacgcctagcgcaatggcggcggccgcggcggagcagcaacagttctacctgctcctgggaaacctgctcagccccgacaatgtggtccggaaacaggcagaggaaacctatgagaatatcccaggccagtcaaagatcacattcctcttacaagccatcagaaatacaacagctgctgaagaggctagacaaatggccgccgttctcctaagacgtctcttgtcctctgcatttgatgaagtctatccagcacttccctctgatgttcagactgccatcaagagtgagctactcatgattattcagatggaaacacaatctagcatgaggaaaaaagtttgtgatattgcggcagaactggccaggaatttaatagatgaggatggcaataaccagtggcccgaaggtttgaagttcctttttgattcagtcagctctcaaaatgtgggactgcgggaagctgcccttcacattttctggaactttcctggaatttttgggaaccagcaacaacactatttagatgtcatcaaacgaatgttagttcagtgtatgcaagatcaggaacacccgtcgatcaggacgttatctgctagagctacagctgcatttatacttgcaaatgagcataatgttgctctgttcaaacattttgcagacttgctaccgggattcctacaggcggtaaatgactcgtgctaccagaatgatgattctgtcctaaaatccctcgttgagattgcagatactgttccaaagtatttgcgtcctcacttggaagcaactctacagctaagtctaaagttgtgtggagacactagcctcaacaatatgcaacgccagcttgcccttgaagtgatcgtcaccctctctgagactgcagctgctatgttaagaaaacataccaatattgttgcacagactattcctcagatgttagcaatgatggttgatttggaagaagatgaggactgggcaaatgcagatgaactagaagatgatgattttgacagcaatgcagttgcaggcgagagtgctctagatcgaatggcttgcggacttggtggaaagctcgttctgccgatgatcaaggaacacattatgcaaatgcttcaaaatcctgactggaaataccggcatgcaggattgatggccttatctgccattggtgaagggtgccaccagcaaatggaaggaattctaaatgagatcgtaaattttgttttactttttctccaggatcctcatccaagagtaaggtatgcagcctgtaatgccgtgggacagatggctacagattttgcacctggtttccaaaagaaatttcatgagaaggtgattgcagctctgctgcagaccatggaagaccaaggcaatcaacgtgtgcaggcccatgcagctgctgccctcattaactttactgaagactgtcccaagtcactacttattccatacttggataatttggtgaaacatctgcattccattatggtactgaagcttcaagagctgattcagaaaggcaccaagttagttttggaacaagttgtgacatccattgcatcagttgccgatactgcagaagaaaaatttgtcccctactatgatttatttatgccatcactgaagcacatcgttgagaatgcggttcaaaaagaactgagacttctgagaggaaaaactattgaatgcattagcctcattggtctggctgttgggaaggaaaaagagaaatgcacgaggcaattaaacatgaagatccttgtgccaaacgtctggccaatgtcgttcgccaagtacagacttctggaggactgtggactgagtgcatagcacagctcagtcctgagcagcaggccgccattcaggagctcctgaactctgcgtgaagggccttaatgtcacccaccagaaaactaactccaaataaacgcttaccctttcct

SEQ ID NO: 405405 - DNA, 1010 bp, Homo sapiens
  misc_feature (41)..(41): n is a, c, g, or t
cgtacccatatccgcagcaggtctccaaggtgaacagcttntgttaaagacccagacagacttcaatgatatggaagatgatgatcctcagatctcttacatgatctcagcatgggccagaatgtgcaaaatccttggaaaagaatttcagcaataccttccagtggttatggggcctttaatgaagacggcttcaattaagcccgaagtagcccttttagatacccaagacatggagaatatgagtgatgatgatggttgggaatttgtgaaccttggagatcagcaaagctttggtattaaaactgcaggactagaagaaaaatcaactgcttgccagatgttggtttgctatgctaaggagttaaaggaaggctttgtggagtacaccgaacaggttgtcaaactgatggtccctttactgaaattttatttccacgatggtgttcgagtggcagcagcggaatccatgcctcttctcctgtctcccctccctccttctctctcacgcctagcgcaatggcggcggccgcggcggagcagcaacagttctacctgctcctgggaaacctgctcagccccgacaatgtggtccggaaacaggcagaggaaacctatgagaatatcccaggccagtcaaagatcacattcctcttacaagccatcagaaatacaacagctgctgaagaggctagacaaatggccgccgttctcctaagacgtctcttgtcctctgcatttgatgaagtctatccagcacttccctctgatgttcagactgccatcaagagtgagctactcatgattattcagatggaaacacaatctagcatgaggaaaaaagtttgtgatattgcggcagaactggccaggaatttaatagatgaggatggcaataaccagtggcccgaaggtttgaagttcctttttgattcagtcagctctcaaaatgtgggactgcgggaagctgcccttcacattttctggtatatacattaatctagtttttt

SEQ ID NO: 405406 - DNA, 239 bp, Homo sapiens
  misc_feature (78)..(78): n is a, c, g, or t
  misc_feature (142)..(142): n is a, c, g, or t
tgggtatgtacacacacacacacacacacacagtcatacatatgcaacaataagaaaaacaaaatttagaaaaaaaanttctgcctataataataggatttgtatgggatggttacagacacataaacatacttgtataggnccaaactggctccattttttggcaagaaaatataaaataaaattagaataatagagtacttatggcagacatagggtaaagccatactcatgtcctt

SEQ ID NO: 405407 - DNA, 450 bp, Homo sapiens
aaaaagtatcttcacactttacattgaaaaaaatcagttacatggtcttatttagcaagttatggtaaaaattatctctatgactatctttttggttaaggtaatctataatggatactttactgttaccatatggcatactaaatccaatcagtcaatattgtgttgaaattattatattaaacataattctctaactaaaaatgaatactgttacaatatatttctcttacaagttttaaggaattacttaatagtgaatatgttctccgaatcatataaaactgtgtttatgtggtaaaactttaaaattcacccagttcttagatgagtaatttcttcaatcttctaatgtaaaacaatcacattttcttattaaagggaagttctatctggcgaaatagtttgaaaaggtcaaaacaaaacacaactgtttctcaaacaaacaaa

SEQ ID NO: 405408 - DNA, 1120 bp, Homo sapiens
ggggaaataacgaaaaggattattaaatcttatgcgggtatctactggaggttgagcgtacatgctggcaacgtccccagttaaaggatctatgggagttaggataggtcaataattggggagagaagcactcactcactcccctacacctcagacatacttgaaactcagaaacagcactgagtctccccatttctcagccccagctgctgggcctccaaggttgggctgaggatggagttttggctctgggtttgccctgactcctgctggaagacgctgccctggtttttcaccctctagtggccttggacattgagtatttgtagaaatgcagattacattgcaaatggaaacctttgccaggaagacacatgcattttgcttttaattctttgagacatttgattttgtcttagggactgacctttcagcatcaaagaaatacatatctactgtatccgccaaagtttgtgatgcctgcatagacgcttacttgtaaaaaaaaaaaaatacaaaaaaatacaaaaaaaccaacaacgaaaaaccacaattgaattgcctttgaaagtgggagatgatctgtctccaacggattgaaaaaaaaaaatgcttcttaaaaaatgtgtatgttttgtattctttttttctagtagaaaataactgacttgaaatattggtggtttttttcttagtgacgtgtgttgcttttgtgtgtaataatatttgaatgtaattacagcagtgccaatttgccaaagatgttggacatatttttcttttttggggaggagggcagggctaggggtgggacttgggagaaaacaggggtgggcttttggtttaattttttttttacttttttttccttgtcaaacctgaaatttgtggcttccttttaagttaaatggttgactgcaacacctttattttagattagttggagaaacatgcaataagattggcgtagtttcaatatctgtgtgtcttttcatgagtggctgttacttgtgaagaattgattttatgtaacctttatgtgagataattatttgtaaatatttgccataattttattggttcctaaaataaaagtaattttttaagttcagaaaaagaa

SEQ ID NO: 405409 - DNA, 8918 bp, Homo sapiens
agcactgctgctctcccggcttcccgctctactccggccgggccgggtccgccacgtctggcgcgctgagcaggcccggccgcgcagcgcctaccctttcctcgctccgggccggcagtgtggggcggcgcgctgggggcgcggcgtgtctggggacatcttgtgatgttggcgagaacaggacatgatctcacatggcgagaagctctttagttccttaatcatttcacggtgccttcggacgctttttttccacctaaaacgtttagtttcagctcagtgatcagctaccccagctcggcgggggagcggaaggcttgaattattccgacctgtgagcggcccctggcaccaaaaaaaaaaaaaaaaaaaaaaaaaaaagaaaaaaaaaggcacaaaaaagtggaaacttttccctgtccattccatcaagtcctgaaaaatcaaaatggatttagagaaaaattatccgactcctcggaccagcaggacaggacatggaggagtgaatcagcttgggggggtttttgtgaatggacggccactcccggatgtagtccgccagaggatagtggaacttgctcatcaaggtgtcaggccctgcgacatctccaggcagcttcgggtcagccatggttgtgtcagcaaaattcttggcaggtattatgagacaggaagcatcaagcctggggtaattggaggatccaaaccaaaggtcgccacacccaaagtggtggaaaaaatcgctgaatataaacgccaaaatcccaccatgtttgcctgggagatcagggaccggctgctggcagagcgggtgtgtgacaatgacaccgtgcctagcgtcagttccatcaacaggatcatccggacaaaagtacagcagccacccaaccaaccagtcccagcttccagtcacagcatagtgtccactggctccgtgacgcaggtgtcctcggtgagcacggattcggccggctcgtcgtactccatcagcggcatcctgggcatcacgtcccccagcgccgacaccaacaagcgcaagagagacgaaggtattcaggagtctccggtgccgaacggccactcgcttccgggcagagacttcctccggaagcagatgcggggagacttgttcacacagcagcagctggaggtgctggaccgcgtgtttgagaggcagcactactcagacatcttcaccaccacagagcccatcaagcccgagcagaccacagagtattcagccatggcctcgctggctggtgggctggacgacatgaaggccaatctggccagccccacccctgctgacatcgggagcagtgtgccaggcccgcagtcctaccccattgtgacaggccgtgacttggcgagcacgaccctccccgggtaccctccacacgtcccccccgctggacagggcagctactcagcaccgacgctgacagggatggtgcctgggagtgagttttccgggagtccctacagccaccctcagtattcctcgtacaacgactcctggaggttccccaacccggggctgcttggctccccctactattatagcgctgccgcccgaggagccgccccacctgcagccgccactgcctatgaccgtcactgacccttggagccaggcgggcaccaaacactgatggcacctattgagggtgacagccacccagccctcctgaagatagccagagagcccatgagaccgtcccccagcatcccccacttgcctgaagctcccctcttcctctcttcctccagggactctggggccctttggtggggccgttggacttctggatgcttgtctatttctaaaagccaatctatgagcttctcccgatggccactgggtctctgcaaaccaatagactgtcctgcaaataaccgcagccccagcccagcctgcctgtcctccagctgtctgactatccatccatcataaccaccccagcctgggaaggagagcttgcttttgttgcttcagcagcacccatgtaaataccttcttgcttttctgtgggcctgaaggtccgactgagaagactgctccacccatgatgcatctcgcactcttggtgcatcaccggacatcttagacctatggcagagcatcctctctgccctgggtgaccctggcaggtgcgctcagagctgtcctcaagatggaggatgctgcccttgggccccagcctcctgctcatccctccttctttagtatctttacgaggagtctcactgggctggttgtgctgcaggctccccctgaggcccctctccaagaggagcacactttggggagatgtcctggtttcctgcctccatttctctgggaccgatgcagtatcagcagctcttttccagatcaaagaactcaaagaaaactgtctgggagattcctcagctacttttccgaagcagaatgtcatccgaggtattgattacattgtggactttgaatgtgagggctggatgggacgcaggagatcatctgatcccagccaaggaggggcctgaggctctccctactccctcagcccctggaacggtgttttctgaggcatgcccaggttcaggtcacttcggacacctgccatggacacttcacccaccctccaggaccccagcaagtggattctgggcaagcctgttccggtgatgtagacaataattaacacagaggactttcccccacacccagatcacaaacagcctacagccagaacttctgagcatcctctcggggcagaccctccccgtcctcgtggagcttagcaggcagctgggcatggaggtgctggggctggggcagatgcctaatttcgcacaatgcatgcccacctgttgatctaaggggccgcgatggtcagggccacggccaagggccacgggaacttggagagggagcttggagaactcactgtgggctagggtggtcagaggaagccagcagggaagatctgggggacagaggaaggcctcctgagggaggggcaggagagcagtgaggagctgctgtgtgacctgggagtgattttgacatgggggtgccaggtgccatcatctctttacctggggccttaattccttgcatagtctctcttgtcaagtcagaacagccaggtagagcccttgtccaaacctgggctgaatgacagtgatgagagggggcttggccttcttaggtgacaatgtcccccatatctgtatgtcaccaggatggcagagagccagggcagagagagactggacttgggatcagcaggccaggcaggtcttgtcctggtcctggccacatgtctttgctgtgggacctcagacaaaaccctgcacctctttgagccttggctgccttggtgcagcagggtcatctgtagggccaccccacagctctttccttcccctcctctctccagggagccggggctgtgagaggatcatctggggcaggccctccacttccaagcaagcagatgggggtgggcacctgaggcccaataatatttggaccaagtgggaaacaagaacactcggaggggcgggaatcagaagagcctggaaaaagacctagcccaacttcccttgtgggaaactgaggcccagcttggggaaggccaggaccatgcagggagaaaaagcagacttcctctggccaccgctaagtattttgttccctaagtcccccacagggtggtggaacagaagagaaaactaaggctcagcaaggtggagtcctcaagcagtgactggtgggggtggggctgggactcgggctcctgacccccaacccatggtgttccctgtcaccctggtctatccacatctcctattcctgaggagagttgacagtaagagcagtgagagatggttctgggccccatgccctagacaatcagtctgtaagaactgccaaggaagcctggtcacccaggccagggatggagcccagcgagctcacagcaggcacatgcacccccgcccccacccagaacctgcggggcaaagaagggaggtagttggggccagagtccacctccaggagccagggtgagctggctgcagcttccacctgtcaggtaaggtaggagaaggtatgttacctggcatctctctccctgcctccctccatttagcaggaagtggtggggtcaggggtcttcagcacagacttcttgagcctctgccccctgtcacccttcttttggaatgatgtgtacccacatctttggatcctgccctccttgtggttccaggctgttgggaggaggtcagcctcccctgaaccagctgcctgaggcatgcagcatccttcctcggcaaagcccacctggctcacagcggccccctctccccatcctgttcctcttcttgccctgtaatgagctccccccatacctttcctccctcacctgaggctttgctggtcctcagattggttttgtatttgtgagacaaccacttgactcctgggctgccaggcggaagcacaagcgcacatggatgcacacggatgttctcacacacacacgcccgctctcaccaattcacagcacctcgtggtccagcggagctgcctgggagcttggtgaggatggctccaaaggacacaagccgttgagtagatgccagagaattctgaatggaaaacacaagtccggggcctcaccagcatcgtggcagaaggcctggggcatttctccatgggccttcttccctgtgttcgagctctgacttttggaaaaggacattgtggattttatgaaaatttctcataccatcagtctagctccaacctagaaaaattggatgatatatcaaacccaacatccctttcccaaggcaccttagttaaggctagcccttccataactgacattgtacggtgctttgcaatcctcaaccactctgtggagcaaagagcatgatgcctactttatagacggggaaattgacatttggggctctcacggcaacatagaggcgaagtgaattctcagatctccaggccccattctctctccaccgagttgtgctcctgtcatgggagtgtatggcttaaagacactcccccacccccattccctagaaatcccccagacccacaatcaggcaagaaagaacagggacccagaggctggcctgacctaggggcctgcaggttggcggctttgtttcctaagaacattgaaacctgcggagtctttgaccaaatccacaacagtgcttctgaggtttcatccagactctttcccagctgtccctgaggttcagagggtatcagagtcaattcaaggccatgccataatccctgaccaggcctggacatgggtccagccctgactccaggggtccaggtgccaaggtcatgtgctgtcccccacttccctttctttgccttcccactttggaacaggctccaggcctggctgtgacagtatgcaggagtgcccaagccagggccaccagggtgtccacagcccctggaaacacagatcacaatctcaagtcccctgaatgaactgcttcctgggtgaacggggtggtgtagccttgccactcgggcagcgcaccagacagtacggtgcagcagtgcccgagatgcccagaagtgtgcctgcccccctgagtggcattcaagtatgaaaacttgtaaaattttctgtcggcctaaagaaaaatgtccatgggccaaacttgacccactgggcaccagcctgtgagccccaatgcctgtcaattgccccctttctcattcacctcctgtcctttgttgcagatttggaggagatgggagcccagagaggtgagagatgtgcttcagggtgtccagcaaggcaggggtagaaacgggcacgcccagagcctgccactctcccaggcctcatcttgggctcttgcaagccttgcgctttgaagatggagttgggtggaaggtcagaggcgctggggacgggattggggagctgctgggttttcaggggaggtcagtgctgcttgggcacctttcacatgtgcagggaagagactcagatgtggccacagggcactgaggggtgaaatccatttaccagaagtcacgctccagaacgactgcccagccttggcagccagtggctccagccaccccctcctcatgacattcagccagaattgagctccaagccaggaagcaaatcttaaaaaccaaccaagcaccctgacacagccctagaaacacgatgagtctgaaatacagcttcccaggaggggagtctaagatacagcttcccgggagggtggaaaccaactcctgccccacggcaggccaggcccaggcaggcatgggtggatcccacagggctctgagctagaccggctccacggtggccccactacgaggccagttctgcagtcttggccttgtcacccatcgagaggctgctctgatggttcccagccacacaccagctctcctggggaaactatttctttcgttcttttggcctcggagaggtccgaggcaagtacatttcttaaaaggtaataaaatgcattattggaaagttggacagtcaggccacgactcctagcccacggcgtgccccacctcccagcagccccttcagccccttgcccctgttgccccaaacctcagggttccctcttgcatattcatgggggaaccacagtgctgatgtgcacttccccactgtcagctcggctgcacctcgtgtggcgccaggtcccaagggcctctgcagaggccaggctgtgagccccttgcctgcctgctcccctgatgaggcaacagcttctctgaaatgagctgccggccaggagcaggcaggcaccagcctgtctttccttttctggtaattcctcagcactgaggctccgttcctgggcaccccaggattgaagggaacctcagaatcatgtcactgccattctagagtttcaatccaaggggtcccctttagctcatctccaagatgggtaaacgtagccaccattcagaaagcccagaaattcttgttcccacatcttagacccctgagcaacacaaggagaaaatgcagctgcttacctattaatatctactgagggacaatcagcaaagcctcaaaggagtcgtctcaggtagggtacttggcctgtggcaggagagacagaggcacaaacccacccacccatcagcttccggtggctgatcggggcccagggagggaagcaggtgaaacagcagggtgggggtgacttggcagtcatgcatctcctccccgactctgaggcctggcaggaggaggccacaccagcctcacctgccctgacccccgccccccaccctgtgaccctgtggctatggccgctggtcgcccttgtccccaaaatcaccatgcctgtggccacgtccctcatcttctccaaaagcatcattaagaacaagtgattttggatgatggatttttgatttacaaacggcgcatttcccttggagtggaacagaaaggaaaccatttaatggcgcccttcttttcaagcatgaatacattttaatgaaactattttattgtatttgaggaaatggagagttgaacattccaaccaatcaatagccaattaattgctataaagctaaaaagaaaataaataaatcctgagtctattttaaacactgcaaaaagttcagagcctcagaatctggccttcccctcccataaggtgcacgagcatgtaaacacacacacacacacacacacacacacacacacactcactcactcccctacacctcagacatacttgaaactcagaaacagcactgagtctccccatgccaattcttgcctgctgtcttcgacttgggtcagagaaggtgagcagacccggcagcagcctgtcccggggctcaggaagaggcaggcccatcccctggccccaagcacccagcacaacagagggtggcgggcagtgagggcctggcgttgcctgggccccacttctcagccccagctgctgggcctccaaggttgggctgaggatggagttttggctctgggtttgccctgactcctgctggaagacgctgccctggtttttcaccctctagtggccttggacattgagtatttgtagaaatgcagattacattgcaaatggaaacctttgccaggaagacacatgcattttgcttttaattctttgagacatttgattttgtcttagggactgacctttcagcatcaaagaaatacatatctactgtatccgccaaagtttgtgatgcctgcatagacgcttacttgtaaaaaaaaaaaaatacaaaaaaatacaaaaaaaccaacaacgaaaaaccacaattgaattgcctttgaaagtgggagatgatctgtctccaacggattgaaaaaaaaaaatgcttcttaaaaaatgtgtatgttttgtattctttttttctagtagaaaataactgacttgaaatattggtggtttttttcttagtgacgtgtgttgcttttgtgtgtaataatatttgaatgtaattacagcagtgccaatttgccaaagatgttggacatatttttcttttttggggaggagggcagggctaggggtgggacttgggagaaaacaggggtgggcttttggtttaattttttttttacttttttttccttgtcaaacctgaaatttgtggcttccttttaagttaaatggttgactgcaacacctttattttagattagttggagaaacatgcaataagattggcgtagtttcaatatctgtgtgtcttttcatgagtggctgttacttgtgaagaattgattttatgtaacctttatgtgagataattatttgtaaatatttgccataattttattggttcctaaaataaaagtaattttttaagttcagaaaaagaa

SEQ ID NO: 405410 - DNA, 7629 bp, Homo sapiens
agcactgctgctctcccggcttcccgctctactccggccgggccgggtccgccacgtctggcgcgctgagcaggcccggccgcgcagcgcctaccctttcctcgctccgggccggcagtgtggggcggcgcgctgggggcgcggcgtgtctggggacatcttgtgatgttggcgagaacaggacatgatctcacatggcgagaagctctttagttccttaatcatttcacggtgccttcggacgctttttttccacctaaaacgtttagtttcagctcagtgatcagctaccccagctcggcgggggagcggaaggcttgaattattccgacctgtgagcggcccctggcaccaaaaaaaaaaaaaaaaaaaaaaaaaaaagaaaaaaaaaggcacaaaaaagtggaaacttttccctgtccattccatcaagtcctgaaaaatcaaaatggatttagagaaaaattatccgactcctcggaccagcaggacaggacatggaggagtgaatcagcttgggggggtttttgtgaatggacggccactcccggatgtagtccgccagaggatagtggaacttgctcatcaaggtgtcaggccctgcgacatctccaggcagcttcgggtcagccatggttgtgtcagcaaaattcttggcaggtattatgagacaggaagcatcaagcctggggtaattggaggatccaaaccaaaggtcgccacacccaaagtggtggaaaaaatcgctgaatataaacgccaaaatcccaccatgtttgcctgggagatcagggaccggctgctggcagagcgggtgtgtgacaatgacaccgtgcctagcgtcagttccatcaacaggatcatccggacaaaagtacagcagccacccaaccaaccagtcccagcttccagtcacagcatagtgtccactggctccgtgacgcaggtgtcctcggtgagcacggattcggccggctcgtcgtactccatcagcggcatcctgggcatcacgtcccccagcgccgacaccaacaagcgcaagagagacgaaggtattcaggagtctccggtgccgaacggccactcgcttccgggcagagacttcctccggaagcagatgcggggagacttgttcacacagcagcagctggaggtgctggaccgcgtgtttgagaggcagcactactcagacatcttcaccaccacagagcccatcaagcccgagcagaccacagagtattcagccatggcctcgctggctggtgggctggacgacatgaaggccaatctggccagccccacccctgctgacatcgggagcagtgtgccaggcccgcagtcctaccccattgtgacaggccgtgacttggcgagcacgaccctccccgggtaccctccacacgtcccccccgctggacagggcagctactcagcaccgacgctgacagggatggtgcctgggagtgagttttccgggagtccctacagccaccctcagtattcctcgtacaacgactcctggaggttccccaacccggggctgcttggctccccctactattatagcgctgccgcccgaggagccgccccacctgcagccgccactgcctatgaccgtcactgacccttggagccaggcgggcaccaaacactgatggcacctattgagggtgacagccacccagccctcctgaagatagccagagagcccatgagaccgtcccccagcatcccccacttgcctgaagctcccctcttcctctcttcctccagggactctggggccctttggtggggccgttggacttctggatgcttgtctatttctaaaagccaatctatgagcttctcccgatggccactgggtctctgcaaaccaatagactgtcctgcaaataaccgcagccccagcccagcctgcctgtcctccagctgtctgactatccatccatcataaccaccccagcctgggaaggagagcttgcttttgttgcttcagcagcacccatgtaaataccttcttgcttttctgtgggcctgaaggtccgactgagaagactgctccacccatgatgcatctcgcactcttggtgcatcaccggacatcttagacctatggcagagcatcctctctgccctgggtgaccctggcaggtgcgctcagagctgtcctcaagatggaggatgctgcccttgggccccagcctcctgctcatccctccttctttagtatctttacgaggagtctcactgggctggttgtgctgcaggctccccctgaggcccctctccaagaggagcacactttggggagatgtcctggtttcctgcctccatttctctgggaccgatgcagtatcagcagctcttttccagatcaaagaactcaaagaaaactgtctgggagattcctcagctacttttccgaagcagaatgtcatccgaggtattgattacattgtggactttgaatgtgagggctggatgggacgcaggagatcatctgatcccagccaaggaggggcctgaggctctccctactccctcagcccctggaacggtgttttctgaggcatgcccaggttcaggtcacttcggacacctgccatggacacttcacccaccctccaggaccccagcaagtggattctgggcaagcctgttccggtgatgtagacaataattaacacagaggactttcccccacacccagatcacaaacagcctacagccagaacttctgagcatcctctcggggcagaccctccccgtcctcgtggagcttagcaggcagctgggcatggaggtgctggggctggggcagatgcctaatttcgcacaatgcatgcccacctgttgatctaaggggccgcgatggtcagggccacggccaagggccacgggaacttggagagggagcttggagaactcactgtgggctagggtggtcagaggaagccagcagggaagatctgggggacagaggaaggcctcctgagggaggggcaggagagcagtgaggagctgctgtgtgacctgggagtgattttgacatgggggtgccaggtgccatcatctctttacctggggccttaattccttgcatagtctctcttgtcaagtcagaacagccaggtagagcccttgtccaaacctgggctgaatgacagtgatgagagggggcttggccttcttaggtgacaatgtcccccatatctgtatgtcaccaggatggcagagagccagggcagagagagactggacttgggatcagcaggccaggcaggtcttgtcctggtcctggccacatgtctttgctgtgggacctcagacaaaaccctgcacctctttgagccttggctgccttggtgcagcagggtcatctgtagggccaccccacagctctttccttcccctcctctctccagggagccggggctgtgagaggatcatctggggcaggccctccacttccaagcaagcagatgggggtgggcacctgaggcccaataatatttggaccaagtgggaaacaagaacactcggaggggcgggaatcagaagagcctggaaaaagacctagcccaacttcccttgtgggaaactgaggcccagcttggggaaggccaggaccatgcagggagaaaaagcagacttcctctggccaccgctaagtattttgttccctaagtcccccacagggtggtggaacagaagagaaaactaaggctcagcaaggtggagtcctcaagcagtgactggtgggggtggggctgggactcgggctcctgacccccaacccatggtgttccctgtcaccctggtctatccacatctcctattcctgaggagagttgacagtaagagcagtgagagatggttctgggccccatgccctagacaatcagtctgtaagaactgccaaggaagcctggtcacccaggccagggatggagcccagcgagctcacagcaggcacatgcacccccgcccccacccagaacctgcggggcaaagaagggaggtagttggggccagagtccacctccaggagccagggtgagctggctgcagcttccacctgtcaggtaaggtaggagaaggtatgttacctggcatctctctccctgcctccctccatttagcaggaagtggtggggtcaggggtcttcagcacagacttcttgagcctctgccccctgtcacccttcttttggaatgatgtgtacccacatctttggatcctgccctccttgtggttccaggctgttgggaggaggtcagcctcccctgaaccagctgcctgaggcatgcagcatccttcctcggcaaagcccacctggctcacagcggccccctctccccatcctgttcctcttcttgccctgtaatgagctccccccatacctttcctccctcacctgaggctttgctggtcctcagattggttttgtatttgtgagacaaccacttgactcctgggctgccaggcggaagcacaagcgcacatggatgcacacggatgttctcacacacacacgcccgctctcaccaattcacagcacctcgtggtccagcggagctgcctgggagcttggtgaggatggctccaaaggacacaagccgttgagtagatgccagagaattctgaatggaaaacacaagtccggggcctcaccagcatcgtggcagaaggcctggggcatttctccatgggccttcttccctgtgttcgagctctgacttttggaaaaggacattgtggattttatgaaaatttctcataccatcagtctagctccaacctagaaaaattggatgatatatcaaacccaacatccctttcccaaggcaccttagttaaggctagcccttccataactgacattgtacggtgctttgcaatcctcaaccactctgtggagcaaagagcatgatgcctactttatagacggggaaattgacatttggggctctcacggcaacatagaggcgaagtgaattctcagatctccaggccccattctctctccaccgagttgtgctcctgtcatgggagtgtatggcttaaagacactcccccacccccattccctagaaatcccccagacccacaatcaggcaagaaagaacagggacccagaggctggcctgacctaggggcctgcaggttggcggctttgtttcctaagaacattgaaacctgcggagtctttgaccaaatccacaacagtgcttctgaggtttcatccagactctttcccagctgtccctgaggttcagagggtatcagagtcaattcaaggccatgccataatccctgaccaggcctggacatgggtccagccctgactccaggggtccaggtgccaaggtcatgtgctgtcccccacttccctttctttgccttcccactttggaacaggctccaggcctggctgtgacagtatgcaggagtgcccaagccagggccaccagggtgtccacagcccctggaaacacagatcacaatctcaagtcccctgaatgaactgcttcctgggtgaacggggtggtgtagccttgccactcgggcagcgcaccagacagtacggtgcagcagtgcccgagatgcccagaagtgtgcctgcccccctgagtggcattcaagtatgaaaacttgtaaaattttctgtcggcctaaagaaaaatgtccatgggccaaacttgacccactgggcaccagcctgtgagccccaatgcctgtcaattgccccctttctcattcacctcctgtcctttgttgcagatttggaggagatgggagcccagagaggtgagagatgtgcttcagggtgtccagcaaggcaggggtagaaacgggcacgcccagagcctgccactctcccaggcctcatcttgggctcttgcaagccttgcgctttgaagatggagttgggtggaaggtcagaggcgctggggacgggattggggagctgctgggttttcaggggaggtcagtgctgcttgggcacctttcacatgtgcagggaagagactcagatgtggccacagggcactgaggggtgaaatccatttaccagaagtcacgctccagaacgactgcccagccttggcagccagtggctccagccaccccctcctcatgacattcagccagaattgagctccaagccaggaagcaaatcttaaaaaccaaccaagcaccctgacacagccctagaaacacgatgagtctgaaatacagcttcccaggaggggagtctaagatacagcttcccgggagggtggaaaccaactcctgccccacggcaggccaggcccaggcaggcatgggtggatcccacagggctctgagctagaccggctccacggtggccccactacgaggccagttctgcagtcttggccttgtcacccatcgagaggctgctctgatggttcccagccacacaccagctctcctggggaaactatttctttcgttcttttggcctcggagaggtccgaggcaagtacatttcttaaaaggtaataaaatgcattattggaaagttggacagtcaggccacgactcctagcccacggcgtgccccacctcccagcagccccttcagccccttgcccctgttgccccaaacctcagggttccctcttgcatattcatgggggaaccacagtgctgatgtgcacttccccactgtcagctcggctgcacctcgtgtggcgccaggtcccaagggcctctgcagaggccaggctgtgagccccttgcctgcctgctcccctgatgaggcaacagcttctctgaaatgagctgccggccaggagcaggcaggcaccagcctgtctttccttttctggtaattcctcagcactgaggctccgttcctgggcaccccaggattgaagggaacctcagaatcatgtcactgccattctagagtttcaatccaaggggtcccctttagctcatctccaagatgggtaaacgtagccaccattcagaaagcccagaaattcttgttcccacatcttagacccctgagcaacacaaggagaaaatgcagctgcttacctattaatatctactgagggacaatcagcaaagcctcaaaggagtcgtctcaggtagggtacttggcctgtggcaggagagacagaggcacaaacccacccacccatcagcttccggtggctgatcggggcccagggagggaagcaggtgaaacagcagggtgggggtgacttggcagtcatgcatctcctccccgactctgaggcctggcaggaggaggccacaccagcctcacctgccctgacccccgccccccaccctgtgaccctgtggctatggccgctggtcgcccttgtccccaaaatcaccatgcctgtggccacgtccctcatcttctccaaaagcatcattaagaacaagtgattttggatgatggatttttgatttacaaacggcgcatttcccttggagtggaacagaaaggaaaccatttaatggcgcccttcttttcaagcatgaatacattttaatgaaactattttattgtatttgaggaaatggagagttgaacattccaaccaatcaatagccaattaattgctataaagcta

SEQ ID NO: 405411 - DNA, 4630 bp, Homo sapiens
cacgaggagaaggcccatggagaaatgccccaggccttctgccacgatgctggtgaggccccggacttgtgttttccatcctgttcctcttcttgccctgtaatgagctccccccatacctttcctccctcacctgaggctttgctggtcctcagattggttttgtatttgtgagacaaccacttgactcctgggctgccaggcggaagcacaagcgcacatggatgcacacggatgttctcacacacacacgcccgctctcaccaattcacagcacctcgtggtccagcggagctgcctgggagcttggtgaggatggctccaaaggacacaagccgttgagtagatgccagagaattctgaatggaaaacacaagtccggggcctcaccagcatcgtggcagaaggcctggggcatttctccatgggccttcttccctgtgttcgagctctgacttttggaaaaggacattgtggattttatgaaaatttctcataccatcagtctagctccaacctagaaaaattggatgatatatcaaacccaacatccctttcccaaggcaccttagttaaggctagcccttccataactgacattgtacggtgctttgcaatcctcaaccactctgtggagcaaagagcatgatgcctactttatagacggggaaattgacatttggggctctcacggcaacatagaggcgaagtgaattctcagatctccaggccccattctctctccaccgagttgtgctcctgtcatgggagtgtatggcttaaagacactcccccacccccattccctagaaatcccccagacccacaatcaggcaagaaagaacagggacccagaggctggcctgacctaggggcctgcaggttggcggctttgtttcctaagaacattgaaacctgcggagtctttgaccaaatccacaacagtgcttctgaggtttcatccagactctttcccagctgtccctgaggttcagagggtatcagagtcaattcaaggccatgccataatccctgaccaggcctggacatgggtccagccctgactccaggggtccaggtgccaaggtcatgtgctgtcccccacttccctttctttgccttcccactttggaacaggctccaggcctggctgtgacagtatgcaggagtgcccaagccagggccaccagggtgtccacagcccctggaaacacagatcacaatctcaagtcccctgaatgaactgcttcctgggtgaacggggtggtgtagccttgccactcgggcagcgcaccagacagtacggtgcagcagtgcccgagatgcccagaagtgtgcctgcccccctgagtggcattcaagtatgaaaacttgtaaaattttctgtcggcctaaagaaaaatgtccatgggccaaacttgacccactgggcaccagcctgtgagccccaatgcctgtcaattgccccctttctcattcacctcctgtcctttgttgcagatttggaggagatgggagcccagagaggtgagagatgtgcttcagggtgtccagcaaggcaggggtagaaacgggcacgcccagagcctgccactctcccaggcctcatcttgggctcttgcaagccttgcgctttgaagatggagttgggtggaaggtcagaggcgctggggacgggattggggagctgctgggttttcaggggaggtcagtgctgcttgggcacctttcacatgtgcagggaagagactcagatgtggccacagggcactgaggggtgaaatccatttaccagaagtcacgctccagaacgactgcccagccttggcagccagtggctccagccaccccctcctcatgacattcagccagaattgagctccaagccaggaagcaaatcttaaaaaccaaccaagcaccctgacacagccctagaaacacgatgagtctgaaatacagcttcccaggaggggagtctaagatacagcttcccgggagggtggaaaccaactcctgccccacggcaggccaggcccaggcaggcatgggtggatcccacagggctctgagctagaccggctccacggtggccccactacgaggccagttctgcagtcttggccttgtcacccatcgagaggctgctctgatggttcccagccacacaccagctctcctggggaaactatttctttcgttcttttggcctcggagaggtccgaggcaagtacatttcttaaaaggtaataaaatgcattattggaaagttggacagtcaggccacgactcctagcccacggcgtgccccacctcccagcagccccttcagccccttgcccctgttgccccaaacctcagggttccctcttgcatattcatgggggaaccacagtgctgatgtgcacttccccactgtcagctcggctgcacctcgtgtggcgccaggtcccaagggcctctgcagaggccaggctgtgagccccttgcctgcctgctcccctgatgaggcaacagcttctctgaaatgagctgccggccaggagcaggcaggcaccagcctgtctttccttttctggtaattcctcagcactgaggctccgttcctgggcaccccaggattgaagggaacctcagaatcatgtcactgccattctagagtttcaatccaaggggtcccctttagctcatctccaagatgggtaaacgtagccaccattcagaaagcccagaaattcttgttcccacatcttagacccctgagcaacacaaggagaaaatgcagctgcttacctattaatatctactgagggacaatcagcaaagcctcaaaggagtcgtctcaggtagggtacttggcctgtggcaggagagacagaggcacaaacccacccacccatcagcttccggtggctgatcggggcccagggagggaagcaggtgaaacagcagggtgggggtgacttggcagtcatgcatctcctccccgactctgaggcctggcaggaggaggccacaccagcctcacctgccctgacccccgccccccaccctgtgaccctgtggctatggccgctggtcgcccttgtccccaaaatcaccatgcctgtggccacgtccctcatcttctccaaaagcatcattaagaacaagtgattttggatgatggatttttgatttacaaacggcgcatttcccttggagtggaacagaaaggaaaccatttaatggcgcccttcttttcaagcatgaatacattttaatgaaactattttattgtatttgaggaaatggagagttgaacattccaaccaatcaatagccaattaattgctataaagctaaaaagaaaataaataaatcctgagtctattttaaacactgcaaaaagttcagagcctcagaatctggccttcccctcccataaggtgcacgagcatgtaaacacacacacacacacacacacacacacacacacactcactcactcccctacacctcagacatacttgaaactcagaaacagcactgagtctccccatgccaattcttgcctgctgtcttcgacttgggtcagagaaggtgagcagacccggcagcagcctgtcccggggctcaggaagaggcaggcccatcccctggccccaagcacccagcacaacagagggtggcgggcagtgagggcctggcgttgcctgggccccacttctcagccccagctgctgggcctccaaggttgggctgaggatggagttttggctctgggtttgccctgactcctgctggaagacgctgccctggtttttcaccctctagtggccttggacattgagtatttgtagaaatgcagattacattgcaaatggaaacctttgccaggaagacacatgcattttgcttttaattctttgagacatttgattttgtcttagggactgacctttcagcatcaaagaaatacatatctactgtatccgccaaagtttgtgatgcctgcatagacgcttacttgtaaaaaaaaaaaaatacaaaaaaatacaaaaaaaccaacaacgaaaaaccacaattgaattgcctttgaaagtgggagatgatctgtctccaacggattgaaaaaaaaaaatgcttcttaaaaaatgtgtatgttttgtattctttttttctagtagaaaataactgacttgaaatattggtggtttttttcttagtgacgtgtgttgcttttgtgtgtaataatatttgaatgtaattacagcagtgccaatttgccaaagatgttggacatatttttcttttttggggaggagggcagggctaggggtgggacttgggagaaaacaggggtgggcttttggtttaattttttttttacttttttttccttgtcaaacctgaaatttgtggcttccttttaagttaaatggttgactgcaacacctttattttagattagttggagaaacatgcaataagattggcgtagtttcaatatctgtgtgtcttttcatgagtggctgttacttgtgaagaattgattttatgtaacctttatgtgagataattatttgtaaatatttgccataattttattggttcctaaaataaaagtaattttttaagttcagaaaaagaa

SEQ ID NO: 405412 - DNA, 8754 bp, Homo sapiens
agcactgctgctctcccggcttcccgctctactccggccgggccgggtccgccacgtctggcgcgctgagcaggcccggccgcgcagcgcctaccctttcctcgctccgggccggcagtgtggggcggcgcgctgggggcgcggcgtgtctggggacatcttgtgatgttggcgagaacaggacatgatctcacatggcgagaagctctttagttccttaatcatttcacggtgccttcggacgctttttttccacctaaaacgtttagtttcagctcagtgatcagctaccccagctcggcgggggagcggaaggcttgaattattccgacctgtgagcggcccctggcaccaaaaaaaaaaaaaaaaaaaaaaaaaaaagaaaaaaaaaggcacaaaaaagtggaaacttttccctgtccattccatcaagtcctgaaaaatcaaaatggatttagagaaaaattatccgactcctcggaccagcaggacaggacatggaggagtgaatcagcttgggggggtttttgtgaatggacggccactcccggatgtagtccgccagaggatagtggaacttgctcatcaaggtgtcaggccctgcgacatctccaggcagcttcgggtcagccatggttgtgtcagcaaaattcttggcaggtattatgagacaggaagcatcaagcctggggtaattggaggatccaaaccaaaggtcgccacacccaaagtggtggaaaaaatcgctgaatataaacgccaaaatcccaccatgtttgcctgggagatcagggaccggctgctggcagagcgggtgtgtgacaatgacaccgtgcctagcgtcagttccatcaacaggatcatccggacaaaagtacagcagccacccaaccaaccagtcccagcttccagtcacagcatagtgtccactggctccgtgacgcaggtgtcctcggtgagcacggattcggccggctcgtcgtactccatcagcggcatcctgggcatcacgtcccccagcgccgacaccaacaagcgcaagagagacgaaggtattcaggagtctccggtgccgaacggccactcgcttccgggcagagacttcctccggaagcagatgcggggagacttgttcacacagcagcagctggaggtgctggaccgcgtgtttgagaggcagcactactcagacatcttcaccaccacagagcccatcaagcccgagcagaccacagagtattcagccatggcctcgctggctggtgggctggacgacatgaaggccaatctggccagccccacccctgctgacatcgggagcagtgtgccaggcccgcagtcctaccccattgtgacaggccgtgacttggcgagcacgaccctccccgggtaccctccacacgtcccccccgctggacagggcagctactcagcaccgacgctgacagggatggtgcctgggagtgagttttccgggagtccctacagccaccctcagtattcctcgtacaacgactcctggaggttccccaacccggggctgcttggctccccctactattatagcgctgccgcccgaggagccgccccacctgcagccgccactgcctatgaccgtcactgacccttggagccaggcgggcaccaaacactgatggcacctattgagggtgacagccacccagccctcctgaagatagccagagagcccatgagaccgtcccccagcatcccccacttgcctgaagctcccctcttcctctcttcctccagggactctggggccctttggtggggccgttggacttctggatgcttgtctatttctaaaagccaatctatgagcttctcccgatggccactgggtctctgcaaaccaatagactgtcctgcaaataaccgcagccccagcccagcctgcctgtcctccagctgtctgactatccatccatcataaccaccccagcctgggaaggagagcttgcttttgttgcttcagcagcacccatgtaaataccttcttgcttttctgtgggcctgaaggtccgactgagaagactgctccacccatgatgcatctcgcactcttggtgcatcaccggacatcttagacctatggcagagcatcctctctgccctgggtgaccctggcaggtgcgctcagagctgtcctcaagatggaggatgctgcccttgggccccagcctcctgctcatccctccttctttagtatctttacgaggagtctcactgggctggttgtgctgcaggctccccctgaggcccctctccaagaggagcacactttggggagatgtcctggtttcctgcctccatttctctgggaccgatgcagtatcagcagctcttttccagatcaaagaactcaaagaaaactgtctgggagattcctcagctacttttccgaagcagaatgtcatccgaggtattgattacattgtggactttgaatgtgagggctggatgggacgcaggagatcatctgatcccagccaaggaggggcctgaggctctccctactccctcagcccctggaacggtgttttctgaggcatgcccaggttcaggtcacttcggacacctgccatggacacttcacccaccctccaggaccccagcaagtggattctgggcaagcctgttccggtgatgtagacaataattaacacagaggactttcccccacacccagatcacaaacagcctacagccagaacttctgagcatcctctcggggcagaccctccccgtcctcgtggagcttagcaggcagctgggcatggaggtgctggggctggggcagatgcctaatttcgcacaatgcatgcccacctgttgatctaaggggccgcgatggtcagggccacggccaagggccacgggaacttggagagggagcttggagaactcactgtgggctagggtggtcagaggaagccagcagggaagatctgggggacagaggaaggcctcctgagggaggggcaggagagcagtgaggagctgctgtgtgacctgggagtgattttgacatgggggtgccaggtgccatcatctctttacctggggccttaattccttgcatagtctctcttgtcaagtcagaacagccaggtagagcccttgtccaaacctgggctgaatgacagtgatgagagggggcttggccttcttaggtgacaatgtcccccatatctgtatgtcaccaggatggcagagagccagggcagagagagactggacttgggatcagcaggccaggcaggtcttgtcctggtcctggccacatgtctttgctgtgggacctcagacaaaaccctgcacctctttgagccttggctgccttggtgcagcagggtcatctgtagggccaccccacagctctttccttcccctcctctctccagggagccggggctgtgagaggatcatctggggcaggccctccacttccaagcaagcagatgggggtgggcacctgaggcccaataatatttggaccaagtgggaaacaagaacactcggaggggcgggaatcagaagagcctggaaaaagacctagcccaacttcccttgtgggaaactgaggcccagcttggggaaggccaggaccatgcagggagaaaaagcagacttcctctggccaccgctaagtattttgttccctaagtcccccacagggtggtggaacagaagagaaaactaaggctcagcaaggtggagtcctcaagcagtgactggtgggggtggggctgggactcgggctcctgacccccaacccatggtgttccctgtcaccctggtctatccacatctcctattcctgaggagagttgacagtaagagcagtgagagatggttctgggccccatgccctagacaatcagtctgtaagaactgccaaggaagcctggtcacccaggccagggatggagcccagcgagctcacagcaggcacatgcacccccgcccccacccagaacctgcggggcaaagaagggaggtagttggggccagagtccacctccaggagccagggtgagctggctgcagcttccacctgtcaggtaaggtaggagaaggtatgttacctggcatctctctccctgcctccctccatttagcaggaagtggtggggtcaggggtcttcagcacagacttcttgagcctctgccccctgtcacccttcttttggaatgatgtgtacccacatctttggatcctgccctccttgtggttccaggctgttgggaggaggtcagcctcccctgaaccagctgcctgaggcatgcagcatccttcctcggcaaagcccacctggctcacagcggccccctctccccatcctgttcctcttcttgccctgtaatgagctccccccatacctttcctccctcacctgaggctttgctggtcctcagattggttttgtatttgtgagacaaccacttgactcctgggctgccaggcggaagcacaagcgcacatggatgcacacggatgttctcacacacacacgcccgctctcaccaattcacagcacctcgtggtccagcggagctgcctgggagcttggtgaggatggctccaaaggacacaagccgttgagtagatgccagagaattctgaatggaaaacacaagtccggggcctcaccagcatcgtggcagaaggcctggggcatttctccatgggccttcttccctgtgttcgagctctgacttttggaaaaggacattgtggattttatgaaaatttctcataccatcagtctagctccaacctagaaaaattggatgatatatcaaacccaacatccctttcccaaggcaccttagttaaggctagcccttccataactgacattgtacggtgctttgcaatcctcaaccactctgtggagcaaagagcatgatgcctactttatagacggggaaattgacatttggggctctcacggcaacatagaggcgaagtgaattctcagatctccaggccccattctctctccaccgagttgtgctcctgtcatgggagtgtatggcttaaagacactcccccacccccattccctagaaatcccccagacccacaatcaggcaagaaagaacagggacccagaggctggcctgacctaggggcctgcaggttggcggctttgtttcctaagaacattgaaacctgcggagtctttgaccaaatccacaacagtgcttctgaggtttcatccagactctttcccagctgtccctgaggttcagagggtatcagagtcaattcaaggccatgccataatccctgaccaggcctggacatgggtccagccctgactccaggggtccaggtgccaaggtcatgtgctgtcccccacttccctttctttgccttcccactttggaacaggctccaggcctggctgtgacagtatgcaggagtgcccaagccagggccaccagggtgtccacagcccctggaaacacagatcacaatctcaagtcccctgaatgaactgcttcctgggtgaacggggtggtgtagccttgccactcgggcagcgcaccagacagtacggtgcagcagtgcccgagatgcccagaagtgtgcctgcccccctgagtggcattcaagtatgaaaacttgtaaaattttctgtcggcctaaagaaaaatgtccatgggccaaacttgacccactgggcaccagcctgtgagccccaatgcctgtcaattgccccctttctcattcacctcctgtcctttgttgcagatttggaggagatgggagcccagagaggtgagagatgtgcttcagggtgtccagcaaggcaggggtagaaacgggcacgcccagagcctgccactctcccaggcctcatcttgggctcttgcaagccttgcgctttgaagatggagttgggtggaaggtcagaggcgctggggacgggattggggagctgctgggttttcaggggaggtcagtgctgcttgggcacctttcacatgtgcagggaagagactcagatgtggccacagggcactgaggggtgaaatccatttaccagaagtcacgctccagaacgactgcccagccttggcagccagtggctccagccaccccctcctcatgacattcagccagaattgagctccaagccaggaagcaaatcttaaaaaccaaccaagcaccctgacacagccctagaaacacgatgagtctgaaatacagcttcccaggaggggagtctaagatacagcttcccgggagggtggaaaccaactcctgccccacggcaggccaggcccaggcaggcatgggtggatcccacagggctctgagctagaccggctccacggtggccccactacgaggccagttctgcagtcttggccttgtcacccatcgagaggctgctctgatggttcccagccacacaccagctctcctggggaaactatttctttcgttcttttggcctcggagaggtccgaggcaagtacatttcttaaaaggtaataaaatgcattattggaaagttggacagtcaggccacgactcctagcccacggcgtgccccacctcccagcagccccttcagccccttgcccctgttgccccaaacctcagggttccctcttgcatattcatgggggaaccacagtgctgatgtgcacttccccactgtcagctcggctgcacctcgtgtggcgccaggtcccaagggcctctgcagaggccaggctgtgagccccttgcctgcctgctcccctgatgaggcaacagcttctctgaaatgagctgccggccaggagcaggcaggcaccagcctgtctttccttttctggtaattcctcagcactgaggctccgttcctgggcaccccaggattgaagggaacctcagaatcatgtcactgccattctagagtttcaatccaaggggtcccctttagctcatctccaagatgggtaaacgtagccaccattcagaaagcccagaaattcttgttcccacatcttagacccctgagcaacacaaggagaaaatgcagctgcttacctattaatatctactgagggacaatcagcaaagcctcaaaggagtcgtctcaggtagggtacttggcctgtggcaggagagacagaggcacaaacccacccacccatcagcttccggtggctgatcggggcccagggagggaagcaggtgaaacagcagggtgggggtgacttggcagtcatgcatctcctccccgactctgaggcctggcaggaggaggccacaccagcctcacctgccctgacccccgccccccaccctgtgaccctgtggctatggccgctggtcgcccttgtccccaaaatcaccatgcctgtggccacgtccctcatcttctccaaaagcatcattaagaacaagtgattttggatgatggatttttgatttacaaacggcgcatttcccttggagtggaacagaaaggaaaccatttaatggcgcccttcttttcaagcatgaatacattttaatgaaactattttattgtatttgaggaaatggagagttgaacattccaaccaatcaatagccaattaattgctataaagctaaaaagaaaataaataaatcctgagtctattttaaacactgcaaaaagttcagagcctcagaatctggccttcccctcccataaggtgcacgagcatgtaaacacacacacacacacacacacacacacacacacactcactcactcccctacacctcagacatacttgaaactcagaaacagcactgagtctccccatttctcagccccagctgctgggcctccaaggttgggctgaggatggagttttggctctgggtttgccctgactcctgctggaagacgctgccctggtttttcaccctctagtggccttggacattgagtatttgtagaaatgcagattacattgcaaatggaaacctttgccaggaagacacatgcattttgcttttaattctttgagacatttgattttgtcttagggactgacctttcagcatcaaagaaatacatatctactgtatccgccaaagtttgtgatgcctgcatagacgcttacttgtaaaaaaaaaaaaatacaaaaaaatacaaaaaaaccaacaacgaaaaaccacaattgaattgcctttgaaagtgggagatgatctgtctccaacggattgaaaaaaaaaaatgcttcttaaaaaatgtgtatgttttgtattctttttttctagtagaaaataactgacttgaaatattggtggtttttttcttagtgacgtgtgttgcttttgtgtgtaataatatttgaatgtaattacagcagtgccaatttgccaaagatgttggacatatttttcttttttggggaggagggcagggctaggggtgggacttgggagaaaacaggggtgggcttttggtttaattttttttttacttttttttccttgtcaaacctgaaatttgtggcttccttttaagttaaatggttgactgcaacacctttattttagattagttggagaaacatgcaataagattggcgtagtttcaatatctgtgtgtcttttcatgagtggctgttacttgtgaagaattgattttatgtaacctttatgtgagataattatttgtaaatatttgccataattttattggttcctaaaataaaagtaattttttaagttcagaaaaagaa

SEQ ID NO: 405413 - DNA, 7582 bp, Homo sapiens
ttctaactctaatctaaaaacccatgaggttgaaatcctcaagccccaagcgacacctgtgaaacggcccaagagaagcgtgccatgaggcagcaggaagggattccaggaggagggaacagagggagtgagttttccgggagtccctacagccaccctcagtattcctcgtacaacgactcctggaggttccccaacccggggctgcttggctccccctactattatagcgctgccgcccgaggagccgccccacctgcagccgccactgcctatgaccgtcactgacccttggagccaggcgggcaccaaacactgatggcacctattgagggtgacagccacccagccctcctgaagatagccagagagcccatgagaccgtcccccagcatcccccacttgcctgaagctcccctcttcctctcttcctccagggactctggggccctttggtggggccgttggacttctggatgcttgtctatttctaaaagccaatctatgagcttctcccgatggccactgggtctctgcaaaccaatagactgtcctgcaaataaccgcagccccagcccagcctgcctgtcctccagctgtctgactatccatccatcataaccaccccagcctgggaaggagagcttgcttttgttgcttcagcagcacccatgtaaataccttcttgcttttctgtgggcctgaaggtccgactgagaagactgctccacccatgatgcatctcgcactcttggtgcatcaccggacatcttagacctatggcagagcatcctctctgccctgggtgaccctggcaggtgcgctcagagctgtcctcaagatggaggatgctgcccttgggccccagcctcctgctcatccctccttctttagtatctttacgaggagtctcactgggctggttgtgctgcaggctccccctgaggcccctctccaagaggagcacactttggggagatgtcctggtttcctgcctccatttctctgggaccgatgcagtatcagcagctcttttccagatcaaagaactcaaagaaaactgtctgggagattcctcagctacttttccgaagcagaatgtcatccgaggtattgattacattgtggactttgaatgtgagggctggatgggacgcaggagatcatctgatcccagccaaggaggggcctgaggctctccctactccctcagcccctggaacggtgttttctgaggcatgcccaggttcaggtcacttcggacacctgccatggacacttcacccaccctccaggaccccagcaagtggattctgggcaagcctgttccggtgatgtagacaataattaacacagaggactttcccccacacccagatcacaaacagcctacagccagaacttctgagcatcctctcggggcagaccctccccgtcctcgtggagcttagcaggcagctgggcatggaggtgctggggctggggcagatgcctaatttcgcacaatgcatgcccacctgttgatctaaggggccgcgatggtcagggccacggccaagggccacgggaacttggagagggagcttggagaactcactgtgggctagggtggtcagaggaagccagcagggaagatctgggggacagaggaaggcctcctgagggaggggcaggagagcagtgaggagctgctgtgtgacctgggagtgattttgacatgggggtgccaggtgccatcatctctttacctggggccttaattccttgcatagtctctcttgtcaagtcagaacagccaggtagagcccttgtccaaacctgggctgaatgacagtgatgagagggggcttggccttcttaggtgacaatgtcccccatatctgtatgtcaccaggatggcagagagccagggcagagagagactggacttgggatcagcaggccaggcaggtcttgtcctggtcctggccacatgtctttgctgtgggacctcagacaaaaccctgcacctctttgagccttggctgccttggtgcagcagggtcatctgtagggccaccccacagctctttccttcccctcctctctccagggagccggggctgtgagaggatcatctggggcaggccctccacttccaagcaagcagatgggggtgggcacctgaggcccaataatatttggaccaagtgggaaacaagaacactcggaggggcgggaatcagaagagcctggaaaaagacctagcccaacttcccttgtgggaaactgaggcccagcttggggaaggccaggaccatgcagggagaaaaagcagacttcctctggccaccgctaagtattttgttccctaagtcccccacagggtggtggaacagaagagaaaactaaggctcagcaaggtggagtcctcaagcagtgactggtgggggtggggctgggactcgggctcctgacccccaacccatggtgttccctgtcaccctggtctatccacatctcctattcctgaggagagttgacagtaagagcagtgagagatggttctgggccccatgccctagacaatcagtctgtaagaactgccaaggaagcctggtcacccaggccagggatggagcccagcgagctcacagcaggcacatgcacccccgcccccacccagaacctgcggggcaaagaagggaggtagttggggccagagtccacctccaggagccagggtgagctggctgcagcttccacctgtcaggtaaggtaggagaaggtatgttacctggcatctctctccctgcctccctccatttagcaggaagtggtggggtcaggggtcttcagcacagacttcttgagcctctgccccctgtcacccttcttttggaatgatgtgtacccacatctttggatcctgccctccttgtggttccaggctgttgggaggaggtcagcctcccctgaaccagctgcctgaggcatgcagcatccttcctcggcaaagcccacctggctcacagcggccccctctccccatcctgttcctcttcttgccctgtaatgagctccccccatacctttcctccctcacctgaggctttgctggtcctcagattggttttgtatttgtgagacaaccacttgactcctgggctgccaggcggaagcacaagcgcacatggatgcacacggatgttctcacacacacacgcccgctctcaccaattcacagcacctcgtggtccagcggagctgcctgggagcttggtgaggatggctccaaaggacacaagccgttgagtagatgccagagaattctgaatggaaaacacaagtccggggcctcaccagcatcgtggcagaaggcctggggcatttctccatgggccttcttccctgtgttcgagctctgacttttggaaaaggacattgtggattttatgaaaatttctcataccatcagtctagctccaacctagaaaaattggatgatatatcaaacccaacatccctttcccaaggcaccttagttaaggctagcccttccataactgacattgtacggtgctttgcaatcctcaaccactctgtggagcaaagagcatgatgcctactttatagacggggaaattgacatttggggctctcacggcaacatagaggcgaagtgaattctcagatctccaggccccattctctctccaccgagttgtgctcctgtcatgggagtgtatggcttaaagacactcccccacccccattccctagaaatcccccagacccacaatcaggcaagaaagaacagggacccagaggctggcctgacctaggggcctgcaggttggcggctttgtttcctaagaacattgaaacctgcggagtctttgaccaaatccacaacagtgcttctgaggtttcatccagactctttcccagctgtccctgaggttcagagggtatcagagtcaattcaaggccatgccataatccctgaccaggcctggacatgggtccagccctgactccaggggtccaggtgccaaggtcatgtgctgtcccccacttccctttctttgccttcccactttggaacaggctccaggcctggctgtgacagtatgcaggagtgcccaagccagggccaccagggtgtccacagcccctggaaacacagatcacaatctcaagtcccctgaatgaactgcttcctgggtgaacggggtggtgtagccttgccactcgggcagcgcaccagacagtacggtgcagcagtgcccgagatgcccagaagtgtgcctgcccccctgagtggcattcaagtatgaaaacttgtaaaattttctgtcggcctaaagaaaaatgtccatgggccaaacttgacccactgggcaccagcctgtgagccccaatgcctgtcaattgccccctttctcattcacctcctgtcctttgttgcagatttggaggagatgggagcccagagaggtgagagatgtgcttcagggtgtccagcaaggcaggggtagaaacgggcacgcccagagcctgccactctcccaggcctcatcttgggctcttgcaagccttgcgctttgaagatggagttgggtggaaggtcagaggcgctggggacgggattggggagctgctgggttttcaggggaggtcagtgctgcttgggcacctttcacatgtgcagggaagagactcagatgtggccacagggcactgaggggtgaaatccatttaccagaagtcacgctccagaacgactgcccagccttggcagccagtggctccagccaccccctcctcatgacattcagccagaattgagctccaagccaggaagcaaatcttaaaaaccaaccaagcaccctgacacagccctagaaacacgatgagtctgaaatacagcttcccaggaggggagtctaagatacagcttcccgggagggtggaaaccaactcctgccccacggcaggccaggcccaggcaggcatgggtggatcccacagggctctgagctagaccggctccacggtggccccactacgaggccagttctgcagtcttggccttgtcacccatcgagaggctgctctgatggttcccagccacacaccagctctcctggggaaactatttctttcgttcttttggcctcggagaggtccgaggcaagtacatttcttaaaaggtaataaaatgcattattggaaagttggacagtcaggccacgactcctagcccacggcgtgccccacctcccagcagccccttcagccccttgcccctgttgccccaaacctcagggttccctcttgcatattcatgggggaaccacagtgctgatgtgcacttccccactgtcagctcggctgcacctcgtgtggcgccaggtcccaagggcctctgcagaggccaggctgtgagccccttgcctgcctgctcccctgatgaggcaacagcttctctgaaatgagctgccggccaggagcaggcaggcaccagcctgtctttccttttctggtaattcctcagcactgaggctccgttcctgggcaccccaggattgaagggaacctcagaatcatgtcactgccattctagagtttcaatccaaggggtcccctttagctcatctccaagatgggtaaacgtagccaccattcagaaagcccagaaattcttgttcccacatcttagacccctgagcaacacaaggagaaaatgcagctgcttacctattaatatctactgagggacaatcagcaaagcctcaaaggagtcgtctcaggtagggtacttggcctgtggcaggagagacagaggcacaaacccacccacccatcagcttccggtggctgatcggggcccagggagggaagcaggtgaaacagcagggtgggggtgacttggcagtcatgcatctcctccccgactctgaggcctggcaggaggaggccacaccagcctcacctgccctgacccccgccccccaccctgtgaccctgtggctatggccgctggtcgcccttgtccccaaaatcaccatgcctgtggccacgtccctcatcttctccaaaagcatcattaagaacaagtgattttggatgatggatttttgatttacaaacggcgcatttcccttggagtggaacagaaaggaaaccatttaatggcgcccttcttttcaagcatgaatacattttaatgaaactattttattgtatttgaggaaatggagagttgaacattccaaccaatcaatagccaattaattgctataaagctaaaaagaaaataaataaatcctgagtctattttaaacactgcaaaaagttcagagcctcagaatctggccttcccctcccataaggtgcacgagcatgtaaacacacacacacacacacacacacacacacacacactcactcactcccctacacctcagacatacttgaaactcagaaacagcactgagtctccccatgccaattcttgcctgctgtcttcgacttgggtcagagaaggtgagcagacccggcagcagcctgtcccggggctcaggaagaggcaggcccatcccctggccccaagcacccagcacaacagagggtggcgggcagtgagggcctggcgttgcctgggccccacttctcagccccagctgctgggcctccaaggttgggctgaggatggagttttggctctgggtttgccctgactcctgctggaagacgctgccctggtttttcaccctctagtggccttggacattgagtatttgtagaaatgcagattacattgcaaatggaaacctttgccaggaagacacatgcattttgcttttaattctttgagacatttgattttgtcttagggactgacctttcagcatcaaagaaatacatatctactgtatccgccaaagtttgtgatgcctgcatagacgcttacttgtaaaaaaaaaaaaatacaaaaaaatacaaaaaaaccaacaacgaaaaaccacaattgaattgcctttgaaagtgggagatgatctgtctccaacggattgaaaaaaaaaaatgcttcttaaaaaatgtgtatgttttgtattctttttttctagtagaaaataactgacttgaaatattggtggtttttttcttagtgacgtgtgttgcttttgtgtgtaataatatttgaatgtaattacagcagtgccaatttgccaaagatgttggacatatttttcttttttggggaggagggcagggctaggggtgggacttgggagaaaacaggggtgggcttttggtttaattttttttttacttttttttccttgtcaaacctgaaatttgtggcttccttttaagttaaatggttgactgcaacacctttattttagattagttggagaaacatgcaataagattggcgtagtttcaatatctgtgtgtcttttcatgagtggctgttacttgtgaagaattgattttatgtaacctttatgtgagataattatttgtaaatatttgccataattttattggttcctaaaataaaagtaattttttaagttcagaaaaagaa

SEQ ID NO: 405414 - DNA, 2629 bp, Homo sapiens
ggaactcggctgcggctccatggtctgagttgtcagccgttgttttttcgtgctcgctagtcgccgccgccgctccgccatggggaagcgacagcaccaaaaggacaaaatgtacattacctgtgctgaatacactcacttttatggtggcaagaagccagatctcccacaaacaaattttcgtcgtttaccttttgaccactgcagtctctctctgcagccctttgtctacccagtctgcactcccgatggcatcgtctttgacttactgaacattgttccatggcttaagaagtacgggaccaaccccagcaatggagagaagctggacgggaggtccctgatcaagctgaacttttccaagaacagtgaggggaagtaccactgcccagtgctgtttaccgtgttcaccaacaacacccacatcgtggctgtgaggacgaccggcaacgtctacgcctatgaggcagtggaacagctaaatatcaaggccaagaacttccgggacctgctgaccgacgagcccttctcccggcaggacatcatcaccctccaggaccccaccaatttggacaagttcaatgtctctaacttctatcatgtgaagaataacatgaaaataatagacccagatgaagagaaggccaaacaggacccgtcttattatctgaaaaatacaaatgccgagacccgagagaccctgcaggagctctacaaggagttcaaaggggacgagattctggcagccaccatgaaggccccggagaagaagaaagtggacaagctgaacgctgcccactattccacagggaaggtcagcgcttccttcacctccaccgcgatggtcccggagaccacacatgaagcagctgccatcgacgaggatgtgctgcgctaccagtttgtgaagaagaagggctacgtgcggctgcacaccaacaagggcgacctcaacctggagctgcactgcgacctgacaccaaaaacctgcgaaaacttcatcaggctttgcaagaagcattattacgatggcaccatcttccacagatccatccggaactttgtgatccaagggggcgaccccacaggcacaggcacgggtggggagtcatactgggggaagcccttcaaagacgagttccggcccaacctctcgcacacgggccgcggcatcctcagcatggccaactccgggcccaacagcaacaggtctcaattcttcatcacgtttcgctcctgtgcctacctggacaagaagcataccatctttggacgggttgttgggggctttgacgtactgacagccatggagaatgtggagagtgaccccaaaactgaccgccctaaggaggagatccgcattgatgccactacagtgttcgtggacccctatgaggaggccgatgcccagattgcgcaggagcggaagacacagctcaaggtagccccggagaccaaagtgaagagcagccagccccaggcagggagccagggcccccagaccttccgccagggcgtgggcaagtacatcaacccagcagccacgaagcgagcagcagaggaagagccctcaaccagtgccactgtccccatgtccaagaagaagcccagtcggggttttggggacttcagctcctggtagcagcaggctgcctgatgaccactagaggtatgtctgcccctcgtcaccctgctgcacaccaatctgtggcccttcatcatgctaagaacaagaactgcgccatggctggctccttctcttctccagcccatccctctgcagcctgtcatccctgtctgtgaccattggtcgggcccctgggctctagagtgacttttgacgccctccatccctcccgccaggcactgtcctccgcaaggcctggtgcagccctggcagtaactggcttgtaagaggctcagacaccaagctgggcctgcagaggaggggcacagtaggacacagtgactgcccaggtgtccacacacctgtaggcctctgagccagcgtccagggtacaggtgcgggtggtggggatgaaggcctgaccagggagggagaagcaggtttggagaggaccctgtgcccaccctgacagacaccctggctggccctgactgactgtattctctggccacattcaagtcccccattggtgggggcagagaagtaggaccaggccatccttggctccagagctcgaagaccccaagacagccctctgctctcagcggcgccacagagagcctgggctcagccttctgcatcaggacatggcctcgtccactgagggcacgatttaaacatttgacatcagaagctttatttgtaaacctcacacagataaggaccaagggctggcggtgtggccagaggacaggggaagctgaaggccccgtgcttgagctcggcagtcctgctccttgcagtgaagccaccatgggtgaccgtccagcctcacccggtggcctgcacagtgagggaagggcttcagggccatctgctcccagggcaggggacaggccaccaaggacctttggcaaatgaaggtttacatttctgtagtttgtttgttttagagcttaatttgtagttttttagctattaaaaccatttgaatttttaacg

SEQ ID NO: 405415 - DNA, 470 bp, Homo sapiens
gggggtcagtgggctaggtgggttccttccccacctgaggcctcctcactgcctttttcgtggacctgagtcatgtgccatgctggccatcactgctgggggttgaggctatgcagagctgcgatggagggtgctccatgtgccagggaagtctggctctctagacccaccgggctcaggagaggaggaaactcgcccatgtggcctggacactgccctgtctcagacccagtggcgcgccactcgcaagcctggccacacccagctcccttcaccctctagtccaggggtctttccagcgttgtgggccacgtggtctctgacgcccacccagctgtgtggaagcagcacgaaacagggtggacgcaggtgatgtggttctggccaagtggaactctgtttaccaaaccagcggggagagcacaagccacgttttgtgactcctatttttcctgtgggtgggggaaacc

SEQ ID NO: 405416 - DNA, 5891 bp, Homo sapiens
ggaactcggctgcggctccatggtctgagttgtcagccgttgttttttcgtgctcgctagtcgccgccgccgctccgccatggggaagcgacagcaccaaaaggacaaaatgtacattacctgtgctgaatacactcacttttatggtggcaagaagccagatctcccacaaacaaattttcgtcgtttaccttttgaccactgcagtctctctctgcagccctttgtctacccagtctgcactcccgatggcatcgtctttgacttactgaacattgttccatggcttaagaagtacgggaccaaccccagcaatggagagaagctggacgggaggtccctgatcaagctgaacttttccaagaacagtgaggggaagtaccactgcccagtgctgtttaccgtgttcaccaacaacacccacatcgtggctgtgaggacgaccggcaacgtctacgcctatgaggcagtggaacagctaaatatcaaggccaagaacttccgggacctgctgaccgacgagcccttctcccggcaggacatcatcaccctccaggaccccaccaatttggacaagttcaatgtctctaacttctatcatgtgaagaataacatgaaaataatagacccagatgaagagaaggccaaacaggacccgtcttattatctgaaaaatacaaatgccgagacccgagagaccctgcaggagctctacaaggagttcaaaggggacgagattctggcagccaccatgaaggccccggagaagaagaaagtggacaagctgaacgctgcccactattccacagggaaggtcagcgcttccttcacctccaccgcgatggtcccggagaccacacatgaagcagctgccatcgacgaggatgtgctgcgctaccagtttgtgaagaagaagggctacgtgcggctgcacaccaacaagggcgacctcaacctggagctgcactgcgacctgacaccaaaaacctgcgaaaacttcatcaggctttgcaagaagcattattacgatggcaccatcttccacagatccatccggaactttgtgatccaagggggcgaccccacaggcacaggcacgggtggggagtcatactgggggaagcccttcaaagacgagttccggcccaacctctcgcacacgggccgcggcatcctcagcatggccaactccgggcccaacagcaacaggtctcaattcttcatcacgtttcgctcctgtgcctacctggacaagaagcataccatctttggacgggttgttgggggctttgacgtactgacagccatggagaatgtggagagtgaccccaaaactgaccgccctaaggaggagatccgcattgatgccactacagtgttcgtggacccctatgaggaggccgatgcccagattgcgcaggagcggaagacacagctcaaggtagccccggagaccaaagtgaagagcagccagccccaggcagggagccagggcccccagaccttccgccagggcgtgggcaagtacatcaacccagcagccacgaagcgagcagcagaggaagagccctcaaccagtgccactgtccccatgtccaagaagaagcccagtcggggttttggggacttcagctcctggtagcagcaggttggccgctgtggaccttggtggggttgcagggctgggggcccatgtccacatctccatttccagcctttctagcctgccctctgctgccagccaataaattgcttgcctgctgcctgcatcccctttcctggcccctgggagcccacagccttcccatcccttaacctgttgccaagggccttggccctgtttccaggacctggcccagccagagcccactgctgggaccttcaagcacaaggcctgccctacacccaggctggtgcctcaggcctctcctctagtaggcaggccaggttagtgaggaaggactgtgtctccagattgtggtttcctctttaagacagggtcttgctctgttgcccaggctccagtgcagtggtgtgatcatggctcactgcagcctcgacctcctgggctcaagcaatcctcctgcctcagcctcgcaagtagctgggactacagccgtgcaccactacatccagctgtatatgtctggttttcttacccctacttctgtcatcttctcagggacagcctatttatacaaccagtgtggtcccctgaccaacgccattacctgggacaagttttcagaccccagacttactgagcctaagcctctgcagggtgggcttctcggtctgttttgacaaaacttcaggggcttctgaaggctggtgttggacggcagcattgagtttcctgccgtgccctgcctgagctctcagggccctgctcacctgctctggctgtgaaccacctgggcttcatctcaagcctgcctggcgtctctgtgcccctgtgagaatcttgaggggacccacactgggttgaggccagtgtctcctgctgtgagaacaagtggatgtccctctccccgccctcctgctgaagtggccttgctgctctcaggcccggccactgggctccaagactctgctcctcctgtcagtcactgactctgatggccttgggccggctgcatcagcagcccttaaagaaagacccctccctcaacccccatttttctgttaaatgtgcccctggctggctttttcttcgtcttcagcccaggccagtggtcagtgttctcatgtcatggactctccttgcctgacacttgcctcttgggctccctgttgccctcaggccaccccccacttctagttcttcacactaagccctaacttaggccttgttcttggttttctcatttttgttgccccaaatcttgaacctgtcagcaacttgcaggctgtacctctgcccttccttttctcatcaatcactgatgctgaagctgcaggcctgagccctttgtctccctggatgctgggtggcgcctcatctgcatctctgcctcaccccatccactgccacaggctgcctgatgaccactagaggtatgtctgcccctcgtcaccctgctgcacaccaatctgtggcccttcatcatgctaagaacaagaactgcgccatggctggctccttctcttctccagcccatccctctgcagcctgtcatccctgtctgtgaccattggtcgggcccctgggctctagagtgacttttgacgccctccatccctcccgccaggcactgtcctccgcaaggcctggtgcagccctggcagtaactggcttgtaagaggctcagacaccaagctgggcctgcagaggaggggcacagtaggacacagtgactgcccaggtgtccacacacctgtaggcctctgagccagcgtccagggtacaggtgcgggtggtggggatgaaggcctgaccagggagggagaagcaggtttggagaggaccctgtgcccaccctgacagacaccctggctggccctgactgactgtattctctggccacattcaagtcccccattggtgggggcagagaagtaggaccaggccatccttggctccagagctcgaagaccccaagacagccctctgctctcagcggcgccacagagagcctgggctcagccttctgcatcaggacatggcctcgtccactgagggcacgatttaaacatttgacatcagaagctttatttgtaaacctcacacagataaggaccaagggctggcggtgtggccagaggacaggggaagctgaaggccccgtgcttgagctcggcagtcctgctccttgcagtgaagccaccatgggtgaccgtccagcctcacccggtggcctgcacagtgagggaagggcttcagggccatctgctcccagggcaggggacaggccaccaaggacctttggcaaatgaaggtttacatttctgtagtttgtttgttttagagcttaatttgtagttttttagctattaaaaccatttgaatttttaacgacctgatgagggcatcaggtaaattaaaggattttgggaagattcttattttcaattctaatatctgacagatgccatcaagaataagcattaaggtataaaaaatactgtgtgtataaaacaatgccaaaccacattcctacagcaaatgcactgtgccatttataaccctgacatcacctcccaaggctctcaaggaagatttattttaaataacttaaatagaagtcctagatgatattgtttaggaatttaagagggtggtggatatggtcctgtgaatagcacttcccctgaagccagctcatggtctgttcatttggtttaaaaatgagcttgtattttgcagaagcccaacaaaaaaaaagtgataaaagtgttgttggtataaattacaaaaaaaaaaaaaaaaaaatacaaaagtcataagactactagtaaaaaatgttcaatcaatgccgtcacaaaagacagtacaaaaaccaaagtgcccaaatagaaggagcagcgaacttgcccaaaacagaaaagctctaaatagaactttagtatatacaaaaaccactcggtagagttttagaagtttcttccatgtaagtgaagcatcttgagtcactcaggacttggctgtcctcgcacccgtggcaggctggggacggcacggacctccaactgtttcccctagtccccggggcatcggaggctgggttcccacatgggagaggaatgaagactcactcaaagggaagggtcagtttaagataagttttcagtgaactccttcttccacccgggaaggtgtctttcagcctcttcacagtctcaagacaattgactgaagccacaggcattgctaacttcatgggccagcttgtgggcggagcctcttcaggcttgagaccatggcagcaagagccctgcagcgtgcagtgacccctgcgctctgggtggctgcacgcgagctcaggaggacaggatgtgctgggccagcctaaaccctcgggggagactagcgcagggataaagcagcttgcagggccatagccggatgtggaggcttccaagacagtacaaagatttccttcctttcctaagtggaagatgtgctttaaaggaacttctgcctctgtcactcctgctgagtggatgcatctcagtgccatgcccaccagggcagcggcatttcccacctgccaaggcttccaggcttgggcaaagagatggcacccaaaggcatgctgtgtgtgggcagtgagctcgagtgggcacagcccagtgcctgcctggaccgcaggtctgggtttaggaagggctgaagtcgggggaggtgtgaagctgggcaggtggccacgttcttattgtcagccagctcgcactcttgcccctagactagccttgtctgaaggcagcttcagagccacttgccaggctgagaactatccgggctcagtgctctcctatctgctgcccctcggtccccctgcctgccctctgccctgagacaagttactaaatgttgaaaaccaaacttatctgggagtggtttttgacctccatcctctgcaaagtggcctaaacccttatggggtgcccactcctggtggagggcaggtggatgagtggattgtaatttataataaaatatatggcagaaacacaggccttaggagattgcacaggcccctctatcagttcaagtgacatgggacagcaccacgcagggacgggcaacgcgtctagcaggccaggcgtcttcatgcacaaaggctaaacttgttgctttaaccttttctgaacaaattttaaacattctggcaaatgtcaagttttgaagtttttcctgtgggttctggcctctttcatatgcaaaaata

SEQ ID NO: 405417 - DNA, 4414 bp, Homo sapiens
ggaactcggctgcggctccatggtctgagttgtcagccgttgttttttcgtgctcgctagtcgccgccgccgctccgccatggggaagcgacagcaccaaaaggacaaaatgtacattacctgtgctgaatacactcacttttatggtggcaagaagccagatctcccacaaacaaattttcgtcgtttaccttttgaccactgcagtctctctctgcagccctttgtctacccagtctgcactcccgatggcatcgtctttgacttactgaacattgttccatggcttaagaagtacgggaccaaccccagcaatggagagaagctggacgggaggtccctgatcaagctgaacttttccaagaacagtgaggggaagtaccactgcccagtgctgtttaccgtgttcaccaacaacacccacatcgtggctgtgaggacgaccggcaacgtctacgcctatgaggcagtggaacagctaaatatcaaggccaagaacttccgggacctgctgaccgacgagcccttctcccggcaggacatcatcaccctccaggaccccaccaatttggacaagttcaatgtctctaacttctatcatgtgaagaataacatgaaaataatagacccagatgaagagaaggccaaacaggacccgtcttattatctgaaaaatacaaatgccgagacccgagagaccctgcaggagctctacaaggagttcaaaggggacgagattctggcagccaccatgaaggccccggagaagaagaaagtggacaagctgaacgctgcccactattccacagggaaggtcagcgcttccttcacctccaccgcgatggtcccggagaccacacatgaagcagctgccatcgacgaggatgtgctgcgctaccagtttgtgaagaagaagggctacgtgcggctgcacaccaacaagggcgacctcaacctggagctgcactgcgacctgacaccaaaaacctgcgaaaacttcatcaggctttgcaagaagcattattacgatggcaccatcttccacagatccatccggaactttgtgatccaagggggcgaccccacaggcacaggcacgggtggggagtcatactgggggaagcccttcaaagacgagttccggcccaacctctcgcacacgggccgcggcatcctcagcatggccaactccgggcccaacagcaacaggtctcaattcttcatcacgtttcgctcctgtgcctacctggacaagaagcataccatctttggacgggttgttgggggctttgacgtactgacagccatggagaatgtggagagtgaccccaaaactgaccgccctaaggaggagatccgcattgatgccactacagtgttcgtggacccctatgaggaggccgatgcccagattgcgcaggagcggaagacacagctcaaggtagccccggagaccaaagtgaagagcagccagccccaggcagggagccagggcccccagaccttccgccagggcgtgggcaagtacatcaacccagcagccacgaagcgagcagcagaggaagagccctcaaccagtgccactgtccccatgtccaagaagaagcccagtcggggttttggggacttcagctcctggtagcagcaggttggccgctgtggaccttggtggggttgcagggctgggggcccatgtccacatctccatttccagcctttctagcctgccctctgctgccagccaataaattgcttgcctgctgcctgcatcccctttcctggcccctgggagcccacagccttcccatcccttaacctgttgccaagggccttggccctgtttccaggacctggcccagccagagcccactgctgggaccttcaagcacaaggcctgccctacacccaggctggtgcctcaggcctctcctctagtaggcaggccaggttagtgaggaaggactgtgtctccagattgtggtttcctctttaagacagggtcttgctctgttgcccaggctccagtgcagtggtgtgatcatggctcactgcagcctcgacctcctgggctcaagcaatcctcctgcctcagcctcgcaagtagctgggactacagccgtgcaccactacatccagctgtatatgtctggttttcttacccctacttctgtcatcttctcagggacagcctatttatacaaccagtgtggtcccctgaccaacgccattacctgggacaagttttcagaccccagacttactgagcctaagcctctgcagggtgggcttctcggtctgttttgacaaaacttcaggggcttctgaaggctggtgttggacggcagcattgagtttcctgccgtgccctgcctgagctctcagggccctgctcacctgctctggctgtgaaccacctgggcttcatctcaagcctgcctggcgtctctgtgcccctgtgagaatcttgaggggacccacactgggttgaggccagtgtctcctgctgtgagaacaagtggatgtccctctccccgccctcctgctgaagtggccttgctgctctcaggcccggccactgggctccaagactctgctcctcctgtcagtcactgactctgatggccttgggccggctgcatcagcagcccttaaagaaagacccctccctcaacccccatttttctgttaaatgtgcccctggctggctttttcttcgtcttcagcccaggccagtggtcagtgttctcatgtcatggactctccttgcctgacacttgcctcttgggctccctgttgccctcaggccaccccccacttctagttcttcacactaagccctaacttaggccttgttcttggttttctcatttttgttgccccaaatcttgaacctgtcagcaacttgcaggctgtacctctgcccttccttttctcatcaatcactgatgctgaagctgcaggcctgagccctttgtctccctggatgctgggtggcgcctcatctgcatctctgcctcaccccatccactgccacaggctgcctgatgaccactagaggtatgtctgcccctcgtcaccctgctgcacaccaatctgtggcccttcatcatgctaagaacaagaactgcgccatggctggctccttctcttctccagcccatccctctgcagcctgtcatccctgtctgtgaccattggtcgggcccctgggctctagagtgacttttgacgccctccatccctcccgccaggcactgtcctccgcaaggcctggtgcagccctggcagtaactggcttgtaagaggctcagacaccaagctgggcctgcagaggaggggcacagtaggacacagtgactgcccaggtgtccacacacctgtaggcctctgagccagcgtccagggtacaggtgcgggtggtggggatgaaggcctgaccagggagggagaagcaggtttggagaggaccctgtgcccaccctgacagacaccctggctggccctgactgactgtattctctggccacattcaagtcccccattggtgggggcagagaagtaggaccaggccatccttggctccagagctcgaagaccccaagacagccctctgctctcagcggcgccacagagagcctgggctcagccttctgcatcaggacatggcctcgtccactgagggcacgatttaaacatttgacatcagaagctttatttgtaaacctcacacagataaggaccaagggctggcggtgtggccagaggacaggggaagctgaaggccccgtgcttgagctcggcagtcctgctccttgcagtgaagccaccatgggtgaccgtccagcctcacccggtggcctgcacagtgagggaagggcttcagggccatctgctcccagggcaggggacaggccaccaaggacctttggcaaatgaaggtttacatttctgtagtttgtttgttttagagcttaatttgtagttttttagctattaaaaccatttgaatttttaacgacctgatgagggcatcaggtaaattaaaggattttgggaagattcttattttcaattctaatatctgacagatgccatcaagaataagcattaaggtataaaaaatactgtgtgtataaaacaatgccaaaccacattcctacagcaaatgcactgtgccatttataaccctgacatcacctcccaaggctctcaaggaagatttattttaaataacttaaatagaagtcctagatgatattgtttaggaatttaagagggtggtggatatggtcctgtgaatagcacttcccctgaagccagctcatggtctgttcatttggtttaaaaatgagcttgtattttgcagaagcccaacaaaaaaaaagtgataaaagtgttgttggtataaattaca

SEQ ID NO: 405418 - DNA, 5756 bp, Homo sapiens
ggaactcggctgcggctccatggtctgagttgtcagccgttgttttttcgtgctcgctagtcgccgccgccgctccgccatggggaagcgacagcaccaaaaggacaaaatgtacattacctgtgctgaatacactcacttttatggtggcaagaagccagatctcccacaaacaaattttcgtcgtttaccttttgaccactgcagtctctctctgcagccctttgtctacccagtctgcactcccgatggcatcgtctttgacttactgaacattgttccatggcttaagaagtacgggaccaaccccagcaatggagagaagctggacgggaggtccctgatcaagctgaacttttccaagaacagtgaggggaagtaccactgcccagtgctgtttaccgtgttcaccaacaacacccacatcgtggctgtgaggacgaccggcaacgtctacgcctatgaggcagtggaacagctaaatatcaaggccaagaacttccgggacctgctgaccgacgagcccttctcccggcaggacatcatcaccctccaggaccccaccaatttggacaagttcaatgtctctaacttctatcatgtgaagaataacatgaaaataatagacccagatgaagagaaggccaaacaggacccgtcttattatctgaaaaatacaaatgccgagacccgagagaccctgcaggagctctacaaggagttcaaaggggacgagattctggcagccaccatgaaggccccggagaagaagaaagtggacaagctgaacgctgcccactattccacagggaaggtcagcgcttccttcacctccaccgcgatggtcccggagaccacacatgaagcagctgccatcgacgaggatgtgctgcgctaccagtttgtgaagaagaagggctacgtgcggctgcacaccaacaagggcgacctcaacctggagctgcactgcgacctgacaccaaaaacctgcgaaaacttcatcaggctttgcaagaagcattattacgatggcaccatcttccacagatccatccggaactttgtgatccaagggggcgaccccacaggcacaggcacgggtggggagtcatactgggggaagcccttcaaagacgagttccggcccaacctctcgcacacgggccgcggcatcctcagcatggccaactccgggcccaacagcaacaggtctcaattcttcatcacgtttcgctcctgtgcctacctggacaagaagcataccatctttggacgggttgttgggggctttgacgtactgacagccatggagaatgtggagagtgaccccaaaactgaccgccctaaggaggagatccgcattgatgccactacagtgttcgtgggcaagtacatcaacccagcagccacgaagcgagcagcagaggaagagccctcaaccagtgccactgtccccatgtccaagaagaagcccagtcggggttttggggacttcagctcctggtagcagcaggttggccgctgtggaccttggtggggttgcagggctgggggcccatgtccacatctccatttccagcctttctagcctgccctctgctgccagccaataaattgcttgcctgctgcctgcatcccctttcctggcccctgggagcccacagccttcccatcccttaacctgttgccaagggccttggccctgtttccaggacctggcccagccagagcccactgctgggaccttcaagcacaaggcctgccctacacccaggctggtgcctcaggcctctcctctagtaggcaggccaggttagtgaggaaggactgtgtctccagattgtggtttcctctttaagacagggtcttgctctgttgcccaggctccagtgcagtggtgtgatcatggctcactgcagcctcgacctcctgggctcaagcaatcctcctgcctcagcctcgcaagtagctgggactacagccgtgcaccactacatccagctgtatatgtctggttttcttacccctacttctgtcatcttctcagggacagcctatttatacaaccagtgtggtcccctgaccaacgccattacctgggacaagttttcagaccccagacttactgagcctaagcctctgcagggtgggcttctcggtctgttttgacaaaacttcaggggcttctgaaggctggtgttggacggcagcattgagtttcctgccgtgccctgcctgagctctcagggccctgctcacctgctctggctgtgaaccacctgggcttcatctcaagcctgcctggcgtctctgtgcccctgtgagaatcttgaggggacccacactgggttgaggccagtgtctcctgctgtgagaacaagtggatgtccctctccccgccctcctgctgaagtggccttgctgctctcaggcccggccactgggctccaagactctgctcctcctgtcagtcactgactctgatggccttgggccggctgcatcagcagcccttaaagaaagacccctccctcaacccccatttttctgttaaatgtgcccctggctggctttttcttcgtcttcagcccaggccagtggtcagtgttctcatgtcatggactctccttgcctgacacttgcctcttgggctccctgttgccctcaggccaccccccacttctagttcttcacactaagccctaacttaggccttgttcttggttttctcatttttgttgccccaaatcttgaacctgtcagcaacttgcaggctgtacctctgcccttccttttctcatcaatcactgatgctgaagctgcaggcctgagccctttgtctccctggatgctgggtggcgcctcatctgcatctctgcctcaccccatccactgccacaggctgcctgatgaccactagaggtatgtctgcccctcgtcaccctgctgcacaccaatctgtggcccttcatcatgctaagaacaagaactgcgccatggctggctccttctcttctccagcccatccctctgcagcctgtcatccctgtctgtgaccattggtcgggcccctgggctctagagtgacttttgacgccctccatccctcccgccaggcactgtcctccgcaaggcctggtgcagccctggcagtaactggcttgtaagaggctcagacaccaagctgggcctgcagaggaggggcacagtaggacacagtgactgcccaggtgtccacacacctgtaggcctctgagccagcgtccagggtacaggtgcgggtggtggggatgaaggcctgaccagggagggagaagcaggtttggagaggaccctgtgcccaccctgacagacaccctggctggccctgactgactgtattctctggccacattcaagtcccccattggtgggggcagagaagtaggaccaggccatccttggctccagagctcgaagaccccaagacagccctctgctctcagcggcgccacagagagcctgggctcagccttctgcatcaggacatggcctcgtccactgagggcacgatttaaacatttgacatcagaagctttatttgtaaacctcacacagataaggaccaagggctggcggtgtggccagaggacaggggaagctgaaggccccgtgcttgagctcggcagtcctgctccttgcagtgaagccaccatgggtgaccgtccagcctcacccggtggcctgcacagtgagggaagggcttcagggccatctgctcccagggcaggggacaggccaccaaggacctttggcaaatgaaggtttacatttctgtagtttgtttgttttagagcttaatttgtagttttttagctattaaaaccatttgaatttttaacgacctgatgagggcatcaggtaaattaaaggattttgggaagattcttattttcaattctaatatctgacagatgccatcaagaataagcattaaggtataaaaaatactgtgtgtataaaacaatgccaaaccacattcctacagcaaatgcactgtgccatttataaccctgacatcacctcccaaggctctcaaggaagatttattttaaataacttaaatagaagtcctagatgatattgtttaggaatttaagagggtggtggatatggtcctgtgaatagcacttcccctgaagccagctcatggtctgttcatttggtttaaaaatgagcttgtattttgcagaagcccaacaaaaaaaaagtgataaaagtgttgttggtataaattacaaaaaaaaaaaaaaaaaaatacaaaagtcataagactactagtaaaaaatgttcaatcaatgccgtcacaaaagacagtacaaaaaccaaagtgcccaaatagaaggagcagcgaacttgcccaaaacagaaaagctctaaatagaactttagtatatacaaaaaccactcggtagagttttagaagtttcttccatgtaagtgaagcatcttgagtcactcaggacttggctgtcctcgcacccgtggcaggctggggacggcacggacctccaactgtttcccctagtccccggggcatcggaggctgggttcccacatgggagaggaatgaagactcactcaaagggaagggtcagtttaagataagttttcagtgaactccttcttccacccgggaaggtgtctttcagcctcttcacagtctcaagacaattgactgaagccacaggcattgctaacttcatgggccagcttgtgggcggagcctcttcaggcttgagaccatggcagcaagagccctgcagcgtgcagtgacccctgcgctctgggtggctgcacgcgagctcaggaggacaggatgtgctgggccagcctaaaccctcgggggagactagcgcagggataaagcagcttgcagggccatagccggatgtggaggcttccaagacagtacaaagatttccttcctttcctaagtggaagatgtgctttaaaggaacttctgcctctgtcactcctgctgagtggatgcatctcagtgccatgcccaccagggcagcggcatttcccacctgccaaggcttccaggcttgggcaaagagatggcacccaaaggcatgctgtgtgtgggcagtgagctcgagtgggcacagcccagtgcctgcctggaccgcaggtctgggtttaggaagggctgaagtcgggggaggtgtgaagctgggcaggtggccacgttcttattgtcagccagctcgcactcttgcccctagactagccttgtctgaaggcagcttcagagccacttgccaggctgagaactatccgggctcagtgctctcctatctgctgcccctcggtccccctgcctgccctctgccctgagacaagttactaaatgttgaaaaccaaacttatctgggagtggtttttgacctccatcctctgcaaagtggcctaaacccttatggggtgcccactcctggtggagggcaggtggatgagtggattgtaatttataataaaatatatggcagaaacacaggccttaggagattgcacaggcccctctatcagttcaagtgacatgggacagcaccacgcagggacgggcaacgcgtctagcaggccaggcgtcttcatgcacaaaggctaaacttgttgctttaaccttttctgaacaaattttaaacattctggcaaatgtcaagttttgaagtttttcctgtgggttctggcctctttcatatgcaaaaata

SEQ ID NO: 405419 - DNA, 6004 bp, Homo sapiens
ggaactcggctgcggctccatggtctgagttgtcagccgttgttttttcgtgctcgctagtcgccgccgccgctccgccatggggaagcgacagcaccaaaaggacaaaatgtacattacctgtgctgaatacactcacttttatggtggcaagaagccagtttataaggaataaaaagaatgataatattttcagctgtcaaaactatcaagactacaataacaagagcactgtcataattttaatggaagtaaaaagtatgcacttttcccaatctcccacaaacaaattttcgtcgtttaccttttgaccactgcagtctctctctgcagccctttgtctacccagtctgcactcccgatggcatcgtctttgacttactgaacattgttccatggcttaagaagtacgggaccaaccccagcaatggagagaagctggacgggaggtccctgatcaagctgaacttttccaagaacagtgaggggaagtaccactgcccagtgctgtttaccgtgttcaccaacaacacccacatcgtggctgtgaggacgaccggcaacgtctacgcctatgaggcagtggaacagctaaatatcaaggccaagaacttccgggacctgctgaccgacgagcccttctcccggcaggacatcatcaccctccaggaccccaccaatttggacaagttcaatgtctctaacttctatcatgtgaagaataacatgaaaataatagacccagatgaagagaaggccaaacaggacccgtcttattatctgaaaaatacaaatgccgagacccgagagaccctgcaggagctctacaaggagttcaaaggggacgagattctggcagccaccatgaaggccccggagaagaagaaagtggacaagctgaacgctgcccactattccacagggaaggtcagcgcttccttcacctccaccgcgatggtcccggagaccacacatgaagcagctgccatcgacgaggatgtgctgcgctaccagtttgtgaagaagaagggctacgtgcggctgcacaccaacaagggcgacctcaacctggagctgcactgcgacctgacaccaaaaacctgcgaaaacttcatcaggctttgcaagaagcattattacgatggcaccatcttccacagatccatccggaactttgtgatccaagggggcgaccccacaggcacaggcacgggtggggagtcatactgggggaagcccttcaaagacgagttccggcccaacctctcgcacacgggccgcggcatcctcagcatggccaactccgggcccaacagcaacaggtctcaattcttcatcacgtttcgctcctgtgcctacctggacaagaagcataccatctttggacgggttgttgggggctttgacgtactgacagccatggagaatgtggagagtgaccccaaaactgaccgccctaaggaggagatccgcattgatgccactacagtgttcgtggacccctatgaggaggccgatgcccagattgcgcaggagcggaagacacagctcaaggtagccccggagaccaaagtgaagagcagccagccccaggcagggagccagggcccccagaccttccgccagggcgtgggcaagtacatcaacccagcagccacgaagcgagcagcagaggaagagccctcaaccagtgccactgtccccatgtccaagaagaagcccagtcggggttttggggacttcagctcctggtagcagcaggttggccgctgtggaccttggtggggttgcagggctgggggcccatgtccacatctccatttccagcctttctagcctgccctctgctgccagccaataaattgcttgcctgctgcctgcatcccctttcctggcccctgggagcccacagccttcccatcccttaacctgttgccaagggccttggccctgtttccaggacctggcccagccagagcccactgctgggaccttcaagcacaaggcctgccctacacccaggctggtgcctcaggcctctcctctagtaggcaggccaggttagtgaggaaggactgtgtctccagattgtggtttcctctttaagacagggtcttgctctgttgcccaggctccagtgcagtggtgtgatcatggctcactgcagcctcgacctcctgggctcaagcaatcctcctgcctcagcctcgcaagtagctgggactacagccgtgcaccactacatccagctgtatatgtctggttttcttacccctacttctgtcatcttctcagggacagcctatttatacaaccagtgtggtcccctgaccaacgccattacctgggacaagttttcagaccccagacttactgagcctaagcctctgcagggtgggcttctcggtctgttttgacaaaacttcaggggcttctgaaggctggtgttggacggcagcattgagtttcctgccgtgccctgcctgagctctcagggccctgctcacctgctctggctgtgaaccacctgggcttcatctcaagcctgcctggcgtctctgtgcccctgtgagaatcttgaggggacccacactgggttgaggccagtgtctcctgctgtgagaacaagtggatgtccctctccccgccctcctgctgaagtggccttgctgctctcaggcccggccactgggctccaagactctgctcctcctgtcagtcactgactctgatggccttgggccggctgcatcagcagcccttaaagaaagacccctccctcaacccccatttttctgttaaatgtgcccctggctggctttttcttcgtcttcagcccaggccagtggtcagtgttctcatgtcatggactctccttgcctgacacttgcctcttgggctccctgttgccctcaggccaccccccacttctagttcttcacactaagccctaacttaggccttgttcttggttttctcatttttgttgccccaaatcttgaacctgtcagcaacttgcaggctgtacctctgcccttccttttctcatcaatcactgatgctgaagctgcaggcctgagccctttgtctccctggatgctgggtggcgcctcatctgcatctctgcctcaccccatccactgccacaggctgcctgatgaccactagaggtatgtctgcccctcgtcaccctgctgcacaccaatctgtggcccttcatcatgctaagaacaagaactgcgccatggctggctccttctcttctccagcccatccctctgcagcctgtcatccctgtctgtgaccattggtcgggcccctgggctctagagtgacttttgacgccctccatccctcccgccaggcactgtcctccgcaaggcctggtgcagccctggcagtaactggcttgtaagaggctcagacaccaagctgggcctgcagaggaggggcacagtaggacacagtgactgcccaggtgtccacacacctgtaggcctctgagccagcgtccagggtacaggtgcgggtggtggggatgaaggcctgaccagggagggagaagcaggtttggagaggaccctgtgcccaccctgacagacaccctggctggccctgactgactgtattctctggccacattcaagtcccccattggtgggggcagagaagtaggaccaggccatccttggctccagagctcgaagaccccaagacagccctctgctctcagcggcgccacagagagcctgggctcagccttctgcatcaggacatggcctcgtccactgagggcacgatttaaacatttgacatcagaagctttatttgtaaacctcacacagataaggaccaagggctggcggtgtggccagaggacaggggaagctgaaggccccgtgcttgagctcggcagtcctgctccttgcagtgaagccaccatgggtgaccgtccagcctcacccggtggcctgcacagtgagggaagggcttcagggccatctgctcccagggcaggggacaggccaccaaggacctttggcaaatgaaggtttacatttctgtagtttgtttgttttagagcttaatttgtagttttttagctattaaaaccatttgaatttttaacgacctgatgagggcatcaggtaaattaaaggattttgggaagattcttattttcaattctaatatctgacagatgccatcaagaataagcattaaggtataaaaaatactgtgtgtataaaacaatgccaaaccacattcctacagcaaatgcactgtgccatttataaccctgacatcacctcccaaggctctcaaggaagatttattttaaataacttaaatagaagtcctagatgatattgtttaggaatttaagagggtggtggatatggtcctgtgaatagcacttcccctgaagccagctcatggtctgttcatttggtttaaaaatgagcttgtattttgcagaagcccaacaaaaaaaaagtgataaaagtgttgttggtataaattacaaaaaaaaaaaaaaaaaaatacaaaagtcataagactactagtaaaaaatgttcaatcaatgccgtcacaaaagacagtacaaaaaccaaagtgcccaaatagaaggagcagcgaacttgcccaaaacagaaaagctctaaatagaactttagtatatacaaaaaccactcggtagagttttagaagtttcttccatgtaagtgaagcatcttgagtcactcaggacttggctgtcctcgcacccgtggcaggctggggacggcacggacctccaactgtttcccctagtccccggggcatcggaggctgggttcccacatgggagaggaatgaagactcactcaaagggaagggtcagtttaagataagttttcagtgaactccttcttccacccgggaaggtgtctttcagcctcttcacagtctcaagacaattgactgaagccacaggcattgctaacttcatgggccagcttgtgggcggagcctcttcaggcttgagaccatggcagcaagagccctgcagcgtgcagtgacccctgcgctctgggtggctgcacgcgagctcaggaggacaggatgtgctgggccagcctaaaccctcgggggagactagcgcagggataaagcagcttgcagggccatagccggatgtggaggcttccaagacagtacaaagatttccttcctttcctaagtggaagatgtgctttaaaggaacttctgcctctgtcactcctgctgagtggatgcatctcagtgccatgcccaccagggcagcggcatttcccacctgccaaggcttccaggcttgggcaaagagatggcacccaaaggcatgctgtgtgtgggcagtgagctcgagtgggcacagcccagtgcctgcctggaccgcaggtctgggtttaggaagggctgaagtcgggggaggtgtgaagctgggcaggtggccacgttcttattgtcagccagctcgcactcttgcccctagactagccttgtctgaaggcagcttcagagccacttgccaggctgagaactatccgggctcagtgctctcctatctgctgcccctcggtccccctgcctgccctctgccctgagacaagttactaaatgttgaaaaccaaacttatctgggagtggtttttgacctccatcctctgcaaagtggcctaaacccttatggggtgcccactcctggtggagggcaggtggatgagtggattgtaatttataataaaatatatggcagaaacacaggccttaggagattgcacaggcccctctatcagttcaagtgacatgggacagcaccacgcagggacgggcaacgcgtctagcaggccaggcgtcttcatgcacaaaggctaaacttgttgctttaaccttttctgaacaaattttaaacattctggcaaatgtcaagttttgaagtttttcctgtgggttctggcctctttcatatgcaaaaata

SEQ ID NO: 405420 - DNA, 5906 bp, Homo sapiens
gcatcccatgtagtcctgacgtttgatcagcctgtttgatttctttctgttgcatcgactaggtctgcctgcctgcctgctcctgccactggggaatgcgacagcaccaaaaggacaaaatgtacattacctgtgctgaatacacatcatcttattattggctggcaatgaatgccatctcccacaaacaaattttcgtcgtttaccttttgaccactgcagtctctctctgcagccctttgtctacccagtctgcactcccgatggcatcgtctttgacttactgaacattgttccatggcttaagaagtacgggaccaaccccagcaatggagagaagctggacgggaggtccctgatcaagctgaacttttccaagaacagtgaggggaagtaccactgcccagtgctgtttaccgtgttcaccaacaacacccacatcgtggctgtgaggacgaccggcaacgtctacgcctatgaggcagtggaacagctaaatatcaaggccaagaacttccgggacctgctgaccgacgagcccttctcccggcaggacatcatcaccctccaggaccccaccaatttggacaagttcaatgtctctaacttctatcatgtgaagaataacatgaaaataatagacccagatgaagagaaggccaaacaggacccgtcttattatctgaaaaatacaaatgccgagacccgagagaccctgcaggagctctacaaggagttcaaaggggacgagattctggcagccaccatgaaggccccggagaagaagaaagtggacaagctgaacgctgcccactattccacagggaaggtcagcgcttccttcacctccaccgcgatggtcccggagaccacacatgaagcagctgccatcgacgaggatgtgctgcgctaccagtttgtgaagaagaagggctacgtgcggctgcacaccaacaagggcgacctcaacctggagctgcactgcgacctgacaccaaaaacctgcgaaaacttcatcaggctttgcaagaagcattattacgatggcaccatcttccacagatccatccggaactttgtgatccaagggggcgaccccacaggcacaggcacgggtggggagtcatactgggggaagcccttcaaagacgagttccggcccaacctctcgcacacgggccgcggcatcctcagcatggccaactccgggcccaacagcaacaggtctcaattcttcatcacgtttcgctcctgtgcctacctggacaagaagcataccatctttggacgggttgttgggggctttgacgtactgacagccatggagaatgtggagagtgaccccaaaactgaccgccctaaggaggagatccgcattgatgccactacagtgttcgtggacccctatgaggaggccgatgcccagattgcgcaggagcggaagacacagctcaaggtagccccggagaccaaagtgaagagcagccagccccaggcagggagccagggcccccagaccttccgccagggcgtgggcaagtacatcaacccagcagccacgaagcgagcagcagaggaagagccctcaaccagtgccactgtccccatgtccaagaagaagcccagtcggggttttggggacttcagctcctggtagcagcaggttggccgctgtggaccttggtggggttgcagggctgggggcccatgtccacatctccatttccagcctttctagcctgccctctgctgccagccaataaattgcttgcctgctgcctgcatcccctttcctggcccctgggagcccacagccttcccatcccttaacctgttgccaagggccttggccctgtttccaggacctggcccagccagagcccactgctgggaccttcaagcacaaggcctgccctacacccaggctggtgcctcaggcctctcctctagtaggcaggccaggttagtgaggaaggactgtgtctccagattgtggtttcctctttaagacagggtcttgctctgttgcccaggctccagtgcagtggtgtgatcatggctcactgcagcctcgacctcctgggctcaagcaatcctcctgcctcagcctcgcaagtagctgggactacagccgtgcaccactacatccagctgtatatgtctggttttcttacccctacttctgtcatcttctcagggacagcctatttatacaaccagtgtggtcccctgaccaacgccattacctgggacaagttttcagaccccagacttactgagcctaagcctctgcagggtgggcttctcggtctgttttgacaaaacttcaggggcttctgaaggctggtgttggacggcagcattgagtttcctgccgtgccctgcctgagctctcagggccctgctcacctgctctggctgtgaaccacctgggcttcatctcaagcctgcctggcgtctctgtgcccctgtgagaatcttgaggggacccacactgggttgaggccagtgtctcctgctgtgagaacaagtggatgtccctctccccgccctcctgctgaagtggccttgctgctctcaggcccggccactgggctccaagactctgctcctcctgtcagtcactgactctgatggccttgggccggctgcatcagcagcccttaaagaaagacccctccctcaacccccatttttctgttaaatgtgcccctggctggctttttcttcgtcttcagcccaggccagtggtcagtgttctcatgtcatggactctccttgcctgacacttgcctcttgggctccctgttgccctcaggccaccccccacttctagttcttcacactaagccctaacttaggccttgttcttggttttctcatttttgttgccccaaatcttgaacctgtcagcaacttgcaggctgtacctctgcccttccttttctcatcaatcactgatgctgaagctgcaggcctgagccctttgtctccctggatgctgggtggcgcctcatctgcatctctgcctcaccccatccactgccacaggctgcctgatgaccactagaggtatgtctgcccctcgtcaccctgctgcacaccaatctgtggcccttcatcatgctaagaacaagaactgcgccatggctggctccttctcttctccagcccatccctctgcagcctgtcatccctgtctgtgaccattggtcgggcccctgggctctagagtgacttttgacgccctccatccctcccgccaggcactgtcctccgcaaggcctggtgcagccctggcagtaactggcttgtaagaggctcagacaccaagctgggcctgcagaggaggggcacagtaggacacagtgactgcccaggtgtccacacacctgtaggcctctgagccagcgtccagggtacaggtgcgggtggtggggatgaaggcctgaccagggagggagaagcaggtttggagaggaccctgtgcccaccctgacagacaccctggctggccctgactgactgtattctctggccacattcaagtcccccattggtgggggcagagaagtaggaccaggccatccttggctccagagctcgaagaccccaagacagccctctgctctcagcggcgccacagagagcctgggctcagccttctgcatcaggacatggcctcgtccactgagggcacgatttaaacatttgacatcagaagctttatttgtaaacctcacacagataaggaccaagggctggcggtgtggccagaggacaggggaagctgaaggccccgtgcttgagctcggcagtcctgctccttgcagtgaagccaccatgggtgaccgtccagcctcacccggtggcctgcacagtgagggaagggcttcagggccatctgctcccagggcaggggacaggccaccaaggacctttggcaaatgaaggtttacatttctgtagtttgtttgttttagagcttaatttgtagttttttagctattaaaaccatttgaatttttaacgacctgatgagggcatcaggtaaattaaaggattttgggaagattcttattttcaattctaatatctgacagatgccatcaagaataagcattaaggtataaaaaatactgtgtgtataaaacaatgccaaaccacattcctacagcaaatgcactgtgccatttataaccctgacatcacctcccaaggctctcaaggaagatttattttaaataacttaaatagaagtcctagatgatattgtttaggaatttaagagggtggtggatatggtcctgtgaatagcacttcccctgaagccagctcatggtctgttcatttggtttaaaaatgagcttgtattttgcagaagcccaacaaaaaaaaagtgataaaagtgttgttggtataaattacaaaaaaaaaaaaaaaaaaatacaaaagtcataagactactagtaaaaaatgttcaatcaatgccgtcacaaaagacagtacaaaaaccaaagtgcccaaatagaaggagcagcgaacttgcccaaaacagaaaagctctaaatagaactttagtatatacaaaaaccactcggtagagttttagaagtttcttccatgtaagtgaagcatcttgagtcactcaggacttggctgtcctcgcacccgtggcaggctggggacggcacggacctccaactgtttcccctagtccccggggcatcggaggctgggttcccacatgggagaggaatgaagactcactcaaagggaagggtcagtttaagataagttttcagtgaactccttcttccacccgggaaggtgtctttcagcctcttcacagtctcaagacaattgactgaagccacaggcattgctaacttcatgggccagcttgtgggcggagcctcttcaggcttgagaccatggcagcaagagccctgcagcgtgcagtgacccctgcgctctgggtggctgcacgcgagctcaggaggacaggatgtgctgggccagcctaaaccctcgggggagactagcgcagggataaagcagcttgcagggccatagccggatgtggaggcttccaagacagtacaaagatttccttcctttcctaagtggaagatgtgctttaaaggaacttctgcctctgtcactcctgctgagtggatgcatctcagtgccatgcccaccagggcagcggcatttcccacctgccaaggcttccaggcttgggcaaagagatggcacccaaaggcatgctgtgtgtgggcagtgagctcgagtgggcacagcccagtgcctgcctggaccgcaggtctgggtttaggaagggctgaagtcgggggaggtgtgaagctgggcaggtggccacgttcttattgtcagccagctcgcactcttgcccctagactagccttgtctgaaggcagcttcagagccacttgccaggctgagaactatccgggctcagtgctctcctatctgctgcccctcggtccccctgcctgccctctgccctgagacaagttactaaatgttgaaaaccaaacttatctgggagtggtttttgacctccatcctctgcaaagtggcctaaacccttatggggtgcccactcctggtggagggcaggtggatgagtggattgtaatttataataaaatatatggcagaaacacaggccttaggagattgcacaggcccctctatcagttcaagtgacatgggacagcaccacgcagggacgggcaacgcgtctagcaggccaggcgtcttcatgcacaaaggctaaacttgttgctttaaccttttctgaacaaattttaaacattctggcaaatgtcaagttttgaagtttttcctgtgggttctggcctctttcatatgcaaaaata

SEQ ID NO: 405421 - DNA, 4641 bp, Homo sapiens
ggaactcggctgcggctccatggtctgagttgtcagccgttgttttttcgtgctcgctagtcgccgccgccgctccgccatggggaagcgacagcaccaaaaggacaaaatgtacattacctgtgctgaatacactcacttttatggtggcaagaagccagatctcccacaaacaaattttcgtcgtttaccttttgaccactgcagtctctctctgcagccctttgtctacccagtctgcactcccgatggcatcgtctttgacttactgaacattgttccatggcttaagaagtacgggaccaaccccagcaatggagagaagctggacgggaggtccctgatcaagctgaacttttccaagaacagtgaggggaagtaccactgcccagtgctgtttaccgtgttcaccaacaacacccacatcgtggctgtgaggacgaccggcaacgtctacgcctatgaggcagtggaacagctaaatatcaaggccaagaacttccgggacctgctgaccgacgagcccttctcccggcaggacatcatcaccctccaggaccccaccaatttggacaagttcaatgtctctaacttctatcatgtgaagaataacatgaaaataatagacccagatgaagagaaggccaaacaggacccgtcttattatctgaaaaatacaaatgccgagacccgagagaccctgcaggagctctacaaggagttcaaaggggacgagattctggcagccaccatgaaggccccggagaagaagaaagtggacaagctgaacgctgcccactattccacagggaaggtcagcgcttccttcacctccaccgcgatggtcccggagaccacacatgaagcagctgccatcgacgaggatgtgctgcgctaccagtttgtgaagaagaagggctacgtgcggctgcacaccaacaagggcgacctcaacctggagctgcactgcgacctgacaccaaaaacctgcgaaaacttcatcaggctttgcaagaagcattattacgatggcaccatcttccacagatccatccggaactttgtgatccaagggggcgaccccacaggcacaggcacgggtggggagtcatactgggggaagcccttcaaagacgagttccggcccaacctctcgcacacgggccgcggcatcctcagcatggccaactccgggcccaacagcaacaggtctcaattcttcatcacgtttcgctcctgtgcctacctggacaagaagcataccatctttggacgggttgttgggggctttgacgtactgacagccatggagaatgtggagagtgaccccaaaactgaccgccctaaggaggagatccgcattgatgccactacagtgttcgtggacccctatgaggaggccgatgcccagattgcgcaggagcggaagacacagctcaaggtagccccggagaccaaagtgaagagcagccagccccaggcagggagccagggcccccagaccttccgccagggcgtgggcaagtacatcaacccagcagccacgaagcgagcagcagaggaagagccctcaaccagtgccactgtccccatgtccaagaagaagcccagtcggggttttggggacttcagctcctggtagcagcagcaacttgcaggctgtacctctgcccttccttttctcatcaatcactgatgctgaagctgcaggcctgagccctttgtctccctggatgctgggtggcgcctcatctgcatctctgcctcaccccatccactgccacaggctgcctgatgaccactagaggtatgtctgcccctcgtcaccctgctgcacaccaatctgtggcccttcatcatgctaagaacaagaactgcgccatggctggctccttctcttctccagcccatccctctgcagcctgtcatccctgtctgtgaccattggtcgggcccctgggctctagagtgacttttgacgccctccatccctcccgccaggcactgtcctccgcaaggcctggtgcagccctggcagtaactggcttgtaagaggctcagacaccaagctgggcctgcagaggaggggcacagtaggacacagtgactgcccaggtgtccacacacctgtaggcctctgagccagcgtccagggtacaggtgcgggtggtggggatgaaggcctgaccagggagggagaagcaggtttggagaggaccctgtgcccaccctgacagacaccctggctggccctgactgactgtattctctggccacattcaagtcccccattggtgggggcagagaagtaggaccaggccatccttggctccagagctcgaagaccccaagacagccctctgctctcagcggcgccacagagagcctgggctcagccttctgcatcaggacatggcctcgtccactgagggcacgatttaaacatttgacatcagaagctttatttgtaaacctcacacagataaggaccaagggctggcggtgtggccagaggacaggggaagctgaaggccccgtgcttgagctcggcagtcctgctccttgcagtgaagccaccatgggtgaccgtccagcctcacccggtggcctgcacagtgagggaagggcttcagggccatctgctcccagggcaggggacaggccaccaaggacctttggcaaatgaaggtttacatttctgtagtttgtttgttttagagcttaatttgtagttttttagctattaaaaccatttgaatttttaacgacctgatgagggcatcaggtaaattaaaggattttgggaagattcttattttcaattctaatatctgacagatgccatcaagaataagcattaaggtataaaaaatactgtgtgtataaaacaatgccaaaccacattcctacagcaaatgcactgtgccatttataaccctgacatcacctcccaaggctctcaaggaagatttattttaaataacttaaatagaagtcctagatgatattgtttaggaatttaagagggtggtggatatggtcctgtgaatagcacttcccctgaagccagctcatggtctgttcatttggtttaaaaatgagcttgtattttgcagaagcccaacaaaaaaaaagtgataaaagtgttgttggtataaattacaaaaaaaaaaaaaaaaaaatacaaaagtcataagactactagtaaaaaatgttcaatcaatgccgtcacaaaagacagtacaaaaaccaaagtgcccaaatagaaggagcagcgaacttgcccaaaacagaaaagctctaaatagaactttagtatatacaaaaaccactcggtagagttttagaagtttcttccatgtaagtgaagcatcttgagtcactcaggacttggctgtcctcgcacccgtggcaggctggggacggcacggacctccaactgtttcccctagtccccggggcatcggaggctgggttcccacatgggagaggaatgaagactcactcaaagggaagggtcagtttaagataagttttcagtgaactccttcttccacccgggaaggtgtctttcagcctcttcacagtctcaagacaattgactgaagccacaggcattgctaacttcatgggccagcttgtgggcggagcctcttcaggcttgagaccatggcagcaagagccctgcagcgtgcagtgacccctgcgctctgggtggctgcacgcgagctcaggaggacaggatgtgctgggccagcctaaaccctcgggggagactagcgcagggataaagcagcttgcagggccatagccggatgtggaggcttccaagacagtacaaagatttccttcctttcctaagtggaagatgtgctttaaaggaacttctgcctctgtcactcctgctgagtggatgcatctcagtgccatgcccaccagggcagcggcatttcccacctgccaaggcttccaggcttgggcaaagagatggcacccaaaggcatgctgtgtgtgggcagtgagctcgagtgggcacagcccagtgcctgcctggaccgcaggtctgggtttaggaagggctgaagtcgggggaggtgtgaagctgggcaggtggccacgttcttattgtcagccagctcgcactcttgcccctagactagccttgtctgaaggcagcttcagagccacttgccaggctgagaactatccgggctcagtgctctcctatctgctgcccctcggtccccctgcctgccctctgccctgagacaagttactaaatgttgaaaaccaaacttatctgggagtggtttttgacctccatcctctgcaaagtggcctaaacccttatggggtgcccactcctggtggagggcaggtggatgagtggattgtaatttataataaaatatatggcagaaacacaggccttaggagattgcacaggcccctctatcagttcaagtgacatgggacagcaccacgcagggacgggcaacgcgtctagcaggccaggcgtcttcatgcacaaaggctaaacttgttgctttaaccttttctgaacaaattttaaacattctggcaaatgtcaagttttgaagtttttcctgtgggttctggcctctttcatatgcaaaaata

SEQ ID NO: 405422 - DNA, 5979 bp, Homo sapiens
ggaactcggctgcggctccatggtctgagttgtcagccgttgttttttcgtgctcgctagtcgccgccgccgctccgccatggggaagcgacagcaccaaaaggacaaaatgtacattacctgtgctgaatacactcacttttatggtggcaagaagccagatctcccacaaacaaattttcgtcgtttaccttttgaccactgcagtctctctctgcagccctttgtctacccagtctgcactcccgatggcatcgtctttgacttactgaacattgttccatggcttaagaagtacgggaccaaccccagcaatggagagaagctggacgggaggtccctgatcaagctgaacttttccaagaacagtgaggggagatgctgtagcacctgaggccaaggcccttttgccccgcttgtctgagcccagagcccggtccccagtcggtgcagcattcgcagggaagtaccactgcccagtgctgtttaccgtgttcaccaacaacacccacatcgtggctgtgaggacgaccggcaacgtctacgcctatgaggcagtggaacagctaaatatcaaggccaagaacttccgggacctgctgaccgacgagcccttctcccggcaggacatcatcaccctccaggaccccaccaatttggacaagttcaatgtctctaacttctatcatgtgaagaataacatgaaaataatagacccagatgaagagaaggccaaacaggacccgtcttattatctgaaaaatacaaatgccgagacccgagagaccctgcaggagctctacaaggagttcaaaggggacgagattctggcagccaccatgaaggccccggagaagaagaaagtggacaagctgaacgctgcccactattccacagggaaggtcagcgcttccttcacctccaccgcgatggtcccggagaccacacatgaagcagctgccatcgacgaggatgtgctgcgctaccagtttgtgaagaagaagggctacgtgcggctgcacaccaacaagggcgacctcaacctggagctgcactgcgacctgacaccaaaaacctgcgaaaacttcatcaggctttgcaagaagcattattacgatggcaccatcttccacagatccatccggaactttgtgatccaagggggcgaccccacaggcacaggcacgggtggggagtcatactgggggaagcccttcaaagacgagttccggcccaacctctcgcacacgggccgcggcatcctcagcatggccaactccgggcccaacagcaacaggtctcaattcttcatcacgtttcgctcctgtgcctacctggacaagaagcataccatctttggacgggttgttgggggctttgacgtactgacagccatggagaatgtggagagtgaccccaaaactgaccgccctaaggaggagatccgcattgatgccactacagtgttcgtggacccctatgaggaggccgatgcccagattgcgcaggagcggaagacacagctcaaggtagccccggagaccaaagtgaagagcagccagccccaggcagggagccagggcccccagaccttccgccagggcgtgggcaagtacatcaacccagcagccacgaagcgagcagcagaggaagagccctcaaccagtgccactgtccccatgtccaagaagaagcccagtcggggttttggggacttcagctcctggtagcagcaggttggccgctgtggaccttggtggggttgcagggctgggggcccatgtccacatctccatttccagcctttctagcctgccctctgctgccagccaataaattgcttgcctgctgcctgcatcccctttcctggcccctgggagcccacagccttcccatcccttaacctgttgccaagggccttggccctgtttccaggacctggcccagccagagcccactgctgggaccttcaagcacaaggcctgccctacacccaggctggtgcctcaggcctctcctctagtaggcaggccaggttagtgaggaaggactgtgtctccagattgtggtttcctctttaagacagggtcttgctctgttgcccaggctccagtgcagtggtgtgatcatggctcactgcagcctcgacctcctgggctcaagcaatcctcctgcctcagcctcgcaagtagctgggactacagccgtgcaccactacatccagctgtatatgtctggttttcttacccctacttctgtcatcttctcagggacagcctatttatacaaccagtgtggtcccctgaccaacgccattacctgggacaagttttcagaccccagacttactgagcctaagcctctgcagggtgggcttctcggtctgttttgacaaaacttcaggggcttctgaaggctggtgttggacggcagcattgagtttcctgccgtgccctgcctgagctctcagggccctgctcacctgctctggctgtgaaccacctgggcttcatctcaagcctgcctggcgtctctgtgcccctgtgagaatcttgaggggacccacactgggttgaggccagtgtctcctgctgtgagaacaagtggatgtccctctccccgccctcctgctgaagtggccttgctgctctcaggcccggccactgggctccaagactctgctcctcctgtcagtcactgactctgatggccttgggccggctgcatcagcagcccttaaagaaagacccctccctcaacccccatttttctgttaaatgtgcccctggctggctttttcttcgtcttcagcccaggccagtggtcagtgttctcatgtcatggactctccttgcctgacacttgcctcttgggctccctgttgccctcaggccaccccccacttctagttcttcacactaagccctaacttaggccttgttcttggttttctcatttttgttgccccaaatcttgaacctgtcagcaacttgcaggctgtacctctgcccttccttttctcatcaatcactgatgctgaagctgcaggcctgagccctttgtctccctggatgctgggtggcgcctcatctgcatctctgcctcaccccatccactgccacaggctgcctgatgaccactagaggtatgtctgcccctcgtcaccctgctgcacaccaatctgtggcccttcatcatgctaagaacaagaactgcgccatggctggctccttctcttctccagcccatccctctgcagcctgtcatccctgtctgtgaccattggtcgggcccctgggctctagagtgacttttgacgccctccatccctcccgccaggcactgtcctccgcaaggcctggtgcagccctggcagtaactggcttgtaagaggctcagacaccaagctgggcctgcagaggaggggcacagtaggacacagtgactgcccaggtgtccacacacctgtaggcctctgagccagcgtccagggtacaggtgcgggtggtggggatgaaggcctgaccagggagggagaagcaggtttggagaggaccctgtgcccaccctgacagacaccctggctggccctgactgactgtattctctggccacattcaagtcccccattggtgggggcagagaagtaggaccaggccatccttggctccagagctcgaagaccccaagacagccctctgctctcagcggcgccacagagagcctgggctcagccttctgcatcaggacatggcctcgtccactgagggcacgatttaaacatttgacatcagaagctttatttgtaaacctcacacagataaggaccaagggctggcggtgtggccagaggacaggggaagctgaaggccccgtgcttgagctcggcagtcctgctccttgcagtgaagccaccatgggtgaccgtccagcctcacccggtggcctgcacagtgagggaagggcttcagggccatctgctcccagggcaggggacaggccaccaaggacctttggcaaatgaaggtttacatttctgtagtttgtttgttttagagcttaatttgtagttttttagctattaaaaccatttgaatttttaacgacctgatgagggcatcaggtaaattaaaggattttgggaagattcttattttcaattctaatatctgacagatgccatcaagaataagcattaaggtataaaaaatactgtgtgtataaaacaatgccaaaccacattcctacagcaaatgcactgtgccatttataaccctgacatcacctcccaaggctctcaaggaagatttattttaaataacttaaatagaagtcctagatgatattgtttaggaatttaagagggtggtggatatggtcctgtgaatagcacttcccctgaagccagctcatggtctgttcatttggtttaaaaatgagcttgtattttgcagaagcccaacaaaaaaaaagtgataaaagtgttgttggtataaattacaaaaaaaaaaaaaaaaaaatacaaaagtcataagactactagtaaaaaatgttcaatcaatgccgtcacaaaagacagtacaaaaaccaaagtgcccaaatagaaggagcagcgaacttgcccaaaacagaaaagctctaaatagaactttagtatatacaaaaaccactcggtagagttttagaagtttcttccatgtaagtgaagcatcttgagtcactcaggacttggctgtcctcgcacccgtggcaggctggggacggcacggacctccaactgtttcccctagtccccggggcatcggaggctgggttcccacatgggagaggaatgaagactcactcaaagggaagggtcagtttaagataagttttcagtgaactccttcttccacccgggaaggtgtctttcagcctcttcacagtctcaagacaattgactgaagccacaggcattgctaacttcatgggccagcttgtgggcggagcctcttcaggcttgagaccatggcagcaagagccctgcagcgtgcagtgacccctgcgctctgggtggctgcacgcgagctcaggaggacaggatgtgctgggccagcctaaaccctcgggggagactagcgcagggataaagcagcttgcagggccatagccggatgtggaggcttccaagacagtacaaagatttccttcctttcctaagtggaagatgtgctttaaaggaacttctgcctctgtcactcctgctgagtggatgcatctcagtgccatgcccaccagggcagcggcatttcccacctgccaaggcttccaggcttgggcaaagagatggcacccaaaggcatgctgtgtgtgggcagtgagctcgagtgggcacagcccagtgcctgcctggaccgcaggtctgggtttaggaagggctgaagtcgggggaggtgtgaagctgggcaggtggccacgttcttattgtcagccagctcgcactcttgcccctagactagccttgtctgaaggcagcttcagagccacttgccaggctgagaactatccgggctcagtgctctcctatctgctgcccctcggtccccctgcctgccctctgccctgagacaagttactaaatgttgaaaaccaaacttatctgggagtggtttttgacctccatcctctgcaaagtggcctaaacccttatggggtgcccactcctggtggagggcaggtggatgagtggattgtaatttataataaaatatatggcagaaacacaggccttaggagattgcacaggcccctctatcagttcaagtgacatgggacagcaccacgcagggacgggcaacgcgtctagcaggccaggcgtcttcatgcacaaaggctaaacttgttgctttaaccttttctgaacaaattttaaacattctggcaaatgtcaagttttgaagtttttcctgtgggttctggcctctttcatatgcaaaaata

SEQ ID NO: 405423 - DNA, 4503 bp, Homo sapiens
ggaactcggctgcggctccatggtctgagttgtcagccgttgttttttcgtgctcgctagtcgccgccgccgctccgccatggggaagcgacagcaccaaaaggacaaaatgtacattacctgtgctgaatacactcacttttatggtggcaagaagccagatctcccacaaacaaattttcgtcgtttaccttttgaccactgcagtctctctctgcagccctttgtctacccagtctgcactcccgatggcatcgtctttgacttactgaacattgttccatggcttaagaagtacgggaccaaccccagcaatggagagaagctggacgggaggtccctgatcaagctgaacttttccaagaacagtgaggggaagtaccactgcccagtgctgtttaccgtgttcaccaacaacacccacatcgtggctgtgaggacgaccggcaacgtctacgcctatgaggcagtggaacagctaaatatcaaggccaagaacttccgggacctgctgaccgacgagcccttctcccggcaggacatcatcaccctccaggaccccaccaatttggacaagttcaatgtctctaacttctatcatgtgaagaataacatgaaaataatagacccagatgaagagaaggccaaacaggacccgtcttattatctgaaaaatacaaatgccgagacccgagagaccctgcaggagctctacaaggagttcaaaggggacgagattctggcagccaccatgaaggccccggagaagaagaaagtggacaagctgaacgctgcccactattccacagggaaggtcagcgcttccttcacctccaccgcgatggtcccggagaccacacatgaagcagctgccatcgacgaggatgtgctgcgctaccagtttgtgaagaagaagggctacgtgcggctgcacaccaacaagggcgacctcaacctggagctgcactgcgacctgacaccaaaaacctgcgaaaacttcatcaggctttgcaagaagcattattacgatggcaccatcttccacagatccatccggaactttgtgatccaagggggcgaccccacaggcacaggcacgggtggggagtcatactgggggaagcccttcaaagacgagttccggcccaacctctcgcacacgggccgcggcatcctcagcatggccaactccgggcccaacagcaacaggtctcaattcttcatcacgtttcgctcctgtgcctacctggacaagaagcataccatctttggacgggttgttgggggctttgacgtactgacagccatggagaatgtggagagtgaccccaaaactgaccgccctaaggaggagatccgcattgatgccactacagtgttcgtggacccctatgaggaggccgatgcccagattgcgcaggagcggaagacacagctcaaggtagccccggagaccaaagtgaagagcagccagccccaggcagggagccagggcccccagaccttccgccagggcgtgggcaagtacatcaacccagcagccacgaagcgagcagcagaggaagagccctcaaccagtgccactgtccccatgtccaagaagaagcccagtcggggttttggggacttcagctcctggtagcagcaggctgcctgatgaccactagaggtatgtctgcccctcgtcaccctgctgcacaccaatctgtggcccttcatcatgctaagaacaagaactgcgccatggctggctccttctcttctccagcccatccctctgcagcctgtcatccctgtctgtgaccattggtcgggcccctgggctctagagtgacttttgacgccctccatccctcccgccaggcactgtcctccgcaaggcctggtgcagccctggcagtaactggcttgtaagaggctcagacaccaagctgggcctgcagaggaggggcacagtaggacacagtgactgcccaggtgtccacacacctgtaggcctctgagccagcgtccagggtacaggtgcgggtggtggggatgaaggcctgaccagggagggagaagcaggtttggagaggaccctgtgcccaccctgacagacaccctggctggccctgactgactgtattctctggccacattcaagtcccccattggtgggggcagagaagtaggaccaggccatccttggctccagagctcgaagaccccaagacagccctctgctctcagcggcgccacagagagcctgggctcagccttctgcatcaggacatggcctcgtccactgagggcacgatttaaacatttgacatcagaagctttatttgtaaacctcacacagataaggaccaagggctggcggtgtggccagaggacaggggaagctgaaggccccgtgcttgagctcggcagtcctgctccttgcagtgaagccaccatgggtgaccgtccagcctcacccggtggcctgcacagtgagggaagggcttcagggccatctgctcccagggcaggggacaggccaccaaggacctttggcaaatgaaggtttacatttctgtagtttgtttgttttagagcttaatttgtagttttttagctattaaaaccatttgaatttttaacgacctgatgagggcatcaggtaaattaaaggattttgggaagattcttattttcaattctaatatctgacagatgccatcaagaataagcattaaggtataaaaaatactgtgtgtataaaacaatgccaaaccacattcctacagcaaatgcactgtgccatttataaccctgacatcacctcccaaggctctcaaggaagatttattttaaataacttaaatagaagtcctagatgatattgtttaggaatttaagagggtggtggatatggtcctgtgaatagcacttcccctgaagccagctcatggtctgttcatttggtttaaaaatgagcttgtattttgcagaagcccaacaaaaaaaaagtgataaaagtgttgttggtataaattacaaaaaaaaaaaaaaaaaaatacaaaagtcataagactactagtaaaaaatgttcaatcaatgccgtcacaaaagacagtacaaaaaccaaagtgcccaaatagaaggagcagcgaacttgcccaaaacagaaaagctctaaatagaactttagtatatacaaaaaccactcggtagagttttagaagtttcttccatgtaagtgaagcatcttgagtcactcaggacttggctgtcctcgcacccgtggcaggctggggacggcacggacctccaactgtttcccctagtccccggggcatcggaggctgggttcccacatgggagaggaatgaagactcactcaaagggaagggtcagtttaagataagttttcagtgaactccttcttccacccgggaaggtgtctttcagcctcttcacagtctcaagacaattgactgaagccacaggcattgctaacttcatgggccagcttgtgggcggagcctcttcaggcttgagaccatggcagcaagagccctgcagcgtgcagtgacccctgcgctctgggtggctgcacgcgagctcaggaggacaggatgtgctgggccagcctaaaccctcgggggagactagcgcagggataaagcagcttgcagggccatagccggatgtggaggcttccaagacagtacaaagatttccttcctttcctaagtggaagatgtgctttaaaggaacttctgcctctgtcactcctgctgagtggatgcatctcagtgccatgcccaccagggcagcggcatttcccacctgccaaggcttccaggcttgggcaaagagatggcacccaaaggcatgctgtgtgtgggcagtgagctcgagtgggcacagcccagtgcctgcctggaccgcaggtctgggtttaggaagggctgaagtcgggggaggtgtgaagctgggcaggtggccacgttcttattgtcagccagctcgcactcttgcccctagactagccttgtctgaaggcagcttcagagccacttgccaggctgagaactatccgggctcagtgctctcctatctgctgcccctcggtccccctgcctgccctctgccctgagacaagttactaaatgttgaaaaccaaacttatctgggagtggtttttgacctccatcctctgcaaagtggcctaaacccttatggggtgcccactcctggtggagggcaggtggatgagtggattgtaatttataataaaatatatggcagaaacacaggccttaggagattgcacaggcccctctatcagttcaagtgacatgggacagcaccacgcagggacgggcaacgcgtctagcaggccaggcgtcttcatgcacaaaggctaaacttgttgctttaaccttttctgaacaaattttaaacattctggcaaatgtcaagttttgaagtttttcctgtgggttctggcctctttcatatgcaaaaata

SEQ ID NO: 405424 - DNA, 4017 bp, Homo sapiens
ggaactcggctgcggctccatggtctgagttgtcagccgttgttttttcgtgctcgctagtcgccgccgccgctccgccatggggaagcgacagcaccaaaaggacaaaatgtacattacctgtgctgaatacactcacttttatggtggcaagaagccagatctcccacaaacaaattttcgtcgtttaccttttgaccactgcagtctctctctgcagccctttgtctacccagtctgcactcccgatggcatcgtctttgacttactgaacattgttccatggcttaagaagtacgggaccaaccccagcaatggagagaagctggacgggaggtccctgatcaagctgaacttttccaagaacagtgaggggaagtaccactgcccagtgctgtttaccgtgttcaccaacaacacccacatcgtggctgtgaggacgaccggcaacgtctacgcctatgaggcagtggaacagctaaatatcaaggccaagaacttccgggacctgctgaccgacgagcccttctcccggcaggacatcatcaccctccaggaccccaccaatttggacaagttcaatgtctctaacttctatcatgtgaagaataacatgaaaataatagacccagatgaagagaaggccaaacaggacccgtcttattatctgaaaaatacaaatgccgagacccgagagaccctgcaggagctctacaaggagttcaaaggggacgagattctggcagccaccatgaaggccccggagaagaagaaagtggacaagctgaacgctgcccactattccacagggaaggtcagcgcttccttcacctccaccgcgatggtcccggagaccacacatgaagcagctgccatcgacgaggatgtgctgcgctaccagtttgtgaagaagaagggctacgtgcggctgcacaccaacaagggcgacctcaacctggagctgcactgcgacctgacaccaaaaacctgcgaaaacttcatcaggctttgcaagaagcattattacgatggcaccatcttccacagatccatccggaactttgtgatccaagggggcgaccccacaggcacaggcacgggtggggagtcatactgggggaagcccttcaaagacgagttccggcccaacctctcgcacacgggccgcggcatcctcagcatggccaactccgggcccaacagcaacaggtctcaattcttcatcacgtttcgctcctgtgcctacctggacaagaagcataccatctttggacgggttgttgggggctttgacgtactgacagccatggagaatgtggagagtgaccccaaaactgaccgccctaaggaggagatccgcattgatgccactacagtgttcgtggacccctatgaggaggccgatgcccagattgcgcaggagcggaagacacagctcaaggtagccccggagaccaaagtgaagagcagccagccccaggcagggagccagggcccccagaccttccgccagggcgtgggcaagtacatcaacccagcagccacgaagcgagcagcagaggaagagccctcaaccagtgccactgtccccatgtccaagaagaagcccagtcggggttttggggacttcagctcctggtagcagcaggttggccgctgtggaccttggtggggttgcagggctgggggcccatgtccacatctccatttccagcctttctagcctgccctctgctgccagccaataaattgcttgcctgctgcctgcatcccctttcctggcccctgggagcccacagccttcccatcccttaacctgttgccaagggccttggccctgtttccaggacctggcccagccagagcccactgctgggaccttcaagcacaaggcctgccctacacccaggctggtgcctcaggcctctcctctagtaggcaggccaggttagtgaggaaggactgtgtctccagattgtggtttcctctttaagacagggtcttgctctgttgcccaggctccagtgcagtggtgtgatcatggctcactgcagcctcgacctcctgggctcaagcaatcctcctgcctcagcctcgcaagtagctgggactacagccgtgcaccactacatccagctgtatatgtctggttttcttacccctacttctgtcatcttctcagggacagcctatttatacaaccagtgtggtcccctgaccaacgccattacctgggacaagttttcagaccccagacttactgagcctaagcctctgcagggtgggcttctcggtctgttttgacaaaacttcaggggcttctgaaggctggtgttggacggcagcattgagtttcctgccgtgccctgcctgagctctcagggccctgctcacctgctctggctgtgaaccacctgggcttcatctcaagcctgcctggcgtctctgtgcccctgtgagaatcttgaggggacccacactgggttgaggccagtgtctcctgctgtgagaacaagtggatgtccctctccccgccctcctgctgaagtggccttgctgctctcaggcccggccactgggctccaagactctgctcctcctgtcagtcactgactctgatggccttgggccggctgcatcagcagcccttaaagaaagacccctccctcaacccccatttttctgttaaatgtgcccctggctggctttttcttcgtcttcagcccaggccagtggtcagtgttctcatgtcatggactctccttgcctgacacttgcctcttgggctccctgttgccctcaggccaccccccacttctagttcttcacactaagccctaacttaggccttgttcttggttttctcatttttgttgccccaaatcttgaacctgtcagcaacttgcaggctgtacctctgcccttccttttctcatcaatcactgatgctgaagctgcaggcctgagccctttgtctccctggatgctgggtggcgcctcatctgcatctctgcctcaccccatccactgccacaggctgcctgatgaccactagaggtatgtctgcccctcgtcaccctgctgcacaccaatctgtggcccttcatcatgctaagaacaagaactgcgccatggctggctccttctcttctccagcccatccctctgcagcctgtcatccctgtctgtgaccattggtcgggcccctgggctctagagtgacttttgacgccctccatccctcccgccaggcactgtcctccgcaaggcctggtgcagccctggcagtaactggcttgtaagaggctcagacaccaagctgggcctgcagaggaggggcacagtaggacacagtgactgcccaggtgtccacacacctgtaggcctctgagccagcgtccagggtacaggtgcgggtggtggggatgaaggcctgaccagggagggagaagcaggtttggagaggaccctgtgcccaccctgacagacaccctggctggccctgactgactgtattctctggccacattcaagtcccccattggtgggggcagagaagtaggaccaggccatccttggctccagagctcgaagaccccaagacagccctctgctctcagcggcgccacagagagcctgggctcagccttctgcatcaggacatggcctcgtccactgagggcacgatttaaacatttgacatcagaagctttatttgtaaacctcacacagataaggaccaagggctggcggtgtggccagaggacaggggaagctgaaggccccgtgcttgagctcggcagtcctgctccttgcagtgaagccaccatgggtgaccgtccagcctcacccggtggcctgcacagtgagggaagggcttcagggccatctgctcccagggcaggggacaggccaccaaggacctttggcaaatgaaggtttacatttctgtagtttgtttgttttagagcttaatttgtagttttttagctattaaaaccatttgaatttttaacg

SEQ ID NO: 405425 - DNA, 4542 bp, Homo sapiens
ggaactcggctgcggctccatggtctgagttgtcagccgttgttttttcgtgctcgctagtcgccgccgccgctccgccatggggaagcgacagcaccaaaaggacaaaatgtacattacctgtgctgaatacactcacttttatggtggcaagaagccagatctcccacaaacaaattttcgtcgtttaccttttgaccactgcagtctctctctgcagccctttgtctacccagtctgcactcccgatggcatcgtctttgacttactgaacattgttccatggcttaagaagtacgggaccaaccccagcaatggagagaagctggacgggaggtccctgatcaagctgaacttttccaagaacagtgaggggaagtaccactgcccagtgctgtttaccgtgttcaccaacaacacccacatcgtggctgtgaggacgaccggcaacgtctacgcctatgaggcagtggaacagctaaatatcaaggccaagaacttccgggacctgctgaccgacgagcccttctcccggcaggacatcatcaccctccaggaccccaccaatttggacaagttcaatgtctctaacttctatcatgtgaagaataacatgaaaataatagacccagatgaagagaaggccaaacaggacccgtcttattatctgaaaaatacaaatgccgagacccgagagaccctgcaggagctctacaaggagttcaaaggggacgagattctggcagccaccatgaaggccccggagaagaagaaagtggacaagctgaacgctgcccactattccacagggaaggtcagcgcttccttcacctccaccgcgatggtcccggagaccacacatgaagcagctgccatcgacgaggatgtgctgcgctaccagtttgtgaagaagaagggctacgtgcggctgcacaccaacaagggcgacctcaacctggagctgcactgcgacctgacaccaaaaacctgcgaaaacttcatcaggctttgcaagaagcattattacgatggcaccatcttccacagatccatccggaactttgtgatccaagggggcgaccccacaggcacaggcacgggtggggagtcatactgggggaagcccttcaaagacgagttccggcccaacctctcgcacacgggccgcggcatcctcagcatggccaactccgggcccaacagcaacaggtctcaattcttcatcacgtttcgctcctgtgcctacctggacaagaagcataccatctttggacgggttgttgggggctttgacgtactgacagccatggagaatgtggagagtgaccccaaaactgaccgccctaaggaggagatccgcattgatgccactacagtgttcgtggacccctatgaggaggccgatgcccagattgcgcaggagcggaagacacagctcaaggtagccccggagaccaaagtgaagagcagccagccccaggcagggagccagggcccccagaccttccgccagggcgtgggcaagtacatcaacccagcagccacgaagcgagcagcagaggaagagccctcaaccagtgccactgtccccatgtccaagaagaagcccagtcggggttttggggacttcagctcctggtagcagcagcaacttgcaggctgtacctctgcccttccttttctcatcaatcactgatgctgaagctgcaggcctgagccctttgtctccctggatgctgggtggcgcctcatctgcatctctgcctcaccccatccactgccacaggctgcctgatgaccactagaggtatgtctgcccctcgtcaccctgctgcacaccaatctgtggcccttcatcatgctaagaacaagaactgcgccatggctggctccttctcttctccagcccatccctctgcagcctgtcatcccctggcagtaactggcttgtaagaggctcagacaccaagctgggcctgcagaggaggggcacagtaggacacagtgactgcccaggtgtccacacacctgtaggcctctgagccagcgtccagggtacaggtgcgggtggtggggatgaaggcctgaccagggagggagaagcaggtttggagaggaccctgtgcccaccctgacagacaccctggctggccctgactgactgtattctctggccacattcaagtcccccattggtgggggcagagaagtaggaccaggccatccttggctccagagctcgaagaccccaagacagccctctgctctcagcggcgccacagagagcctgggctcagccttctgcatcaggacatggcctcgtccactgagggcacgatttaaacatttgacatcagaagctttatttgtaaacctcacacagataaggaccaagggctggcggtgtggccagaggacaggggaagctgaaggccccgtgcttgagctcggcagtcctgctccttgcagtgaagccaccatgggtgaccgtccagcctcacccggtggcctgcacagtgagggaagggcttcagggccatctgctcccagggcaggggacaggccaccaaggacctttggcaaatgaaggtttacatttctgtagtttgtttgttttagagcttaatttgtagttttttagctattaaaaccatttgaatttttaacgacctgatgagggcatcaggtaaattaaaggattttgggaagattcttattttcaattctaatatctgacagatgccatcaagaataagcattaaggtataaaaaatactgtgtgtataaaacaatgccaaaccacattcctacagcaaatgcactgtgccatttataaccctgacatcacctcccaaggctctcaaggaagatttattttaaataacttaaatagaagtcctagatgatattgtttaggaatttaagagggtggtggatatggtcctgtgaatagcacttcccctgaagccagctcatggtctgttcatttggtttaaaaatgagcttgtattttgcagaagcccaacaaaaaaaaagtgataaaagtgttgttggtataaattacaaaaaaaaaaaaaaaaaaatacaaaagtcataagactactagtaaaaaatgttcaatcaatgccgtcacaaaagacagtacaaaaaccaaagtgcccaaatagaaggagcagcgaacttgcccaaaacagaaaagctctaaatagaactttagtatatacaaaaaccactcggtagagttttagaagtttcttccatgtaagtgaagcatcttgagtcactcaggacttggctgtcctcgcacccgtggcaggctggggacggcacggacctccaactgtttcccctagtccccggggcatcggaggctgggttcccacatgggagaggaatgaagactcactcaaagggaagggtcagtttaagataagttttcagtgaactccttcttccacccgggaaggtgtctttcagcctcttcacagtctcaagacaattgactgaagccacaggcattgctaacttcatgggccagcttgtgggcggagcctcttcaggcttgagaccatggcagcaagagccctgcagcgtgcagtgacccctgcgctctgggtggctgcacgcgagctcaggaggacaggatgtgctgggccagcctaaaccctcgggggagactagcgcagggataaagcagcttgcagggccatagccggatgtggaggcttccaagacagtacaaagatttccttcctttcctaagtggaagatgtgctttaaaggaacttctgcctctgtcactcctgctgagtggatgcatctcagtgccatgcccaccagggcagcggcatttcccacctgccaaggcttccaggcttgggcaaagagatggcacccaaaggcatgctgtgtgtgggcagtgagctcgagtgggcacagcccagtgcctgcctggaccgcaggtctgggtttaggaagggctgaagtcgggggaggtgtgaagctgggcaggtggccacgttcttattgtcagccagctcgcactcttgcccctagactagccttgtctgaaggcagcttcagagccacttgccaggctgagaactatccgggctcagtgctctcctatctgctgcccctcggtccccctgcctgccctctgccctgagacaagttactaaatgttgaaaaccaaacttatctgggagtggtttttgacctccatcctctgcaaagtggcctaaacccttatggggtgcccactcctggtggagggcaggtggatgagtggattgtaatttataataaaatatatggcagaaacacaggccttaggagattgcacaggcccctctatcagttcaagtgacatgggacagcaccacgcagggacgggcaacgcgtctagcaggccaggcgtcttcatgcacaaaggctaaacttgttgctttaaccttttctgaacaaattttaaacattctggcaaatgtcaagttttgaagtttttcctgtgggttctggcctctttcatatgcaaaaata

SEQ ID NO: 405426 - DNA, 3922 bp, Homo sapiens
ggaactcggctgcggctccatggtctgagttgtcagccgttgttttttcgtgctcgctagtcgccgccgccgctccgccatggggaagcgacagcaccaaaaggacaaaatgtacattacctgtgctgaatacactcacttttatggtggcaagaagccagatctcccacaaacaaattttcgtcgtttaccttttgaccactgcagtctctctctgcagccctttgtctacccagtctgcactcccgatggcatcgtctttgacttactgaacattgttccatggcttaagaagtacgggaccaaccccagcaatggagagaagctggacgggaggtccctgatcaagctgaacttttccaagaacagtgaggggaagtaccactgcccagtgctgtttaccgtgttcaccaacaacacccacatcgtggctgtgaggacgaccggcaacgtctacgcctatgaggcagtggaacagctaaatatcaaggccaagaacttccgggacctgctgaccgacgagcccttctcccggcaggacatcatcaccctccaggaccccaccaatttggacaagttcaatgtctctaacttctatcatgtgaagaataacatgaaaataatagacccagatgaagagaaggccaaacaggacccgtcttattatctgaaaaatacaaatgccgagacccgagagaccctgcaggagctctacaaggagttcaaaggggacgagattctggcagccaccatgaaggccccggagaagaagaaagtggacaagctgaacgctgcccactattccacagggaaggtcagcgcttccttcacctccaccgcgatggtcccggagaccacacatgaagcagctgccatcgacgaggatgtgctgcgctaccagtttgtgaagaagaagggctacgtgcggctgcacaccaacaagggcgacctcaacctggagctgcactgcgacctgacaccaaaaacctgcgaaaacttcatcaggctttgcaagaagcattattacgatggcaccatcttccacagatccatccggaactttgtgatccaagggggcgaccccacaggcacaggcacgggtggggagtcatactgggggaagcccttcaaagacgagttccggcccaacctctcgcacacgggccgcggcatcctcagcatggccaactccgggcccaacagcaacaggtctcaattcttcatcacgtttcgctcctgtgcctacctggacaagaagcataccatctttggacgggttgttgggggctttgacgtactgacagccatggagaatgtggagagtgaccccaaaactgaccgccctaaggaggagatccgcattgatgccactacagtgttcgtggacccctatgaggaggccgatgcccagattgcgcaggagcggaagacacagctcaaggtagccccggagaccaaagtgaagagcagccagccccaggcagggagccagggcccccagaccttccgccagggcgtgggcaagtacatcaacccagcagccacgaagcgagcagcagaggaagagccctcaaccagtgccactgtccccatgtccaagaagaagcccagtcggggttttggggacttcagctcctggtagcagcaggttggccgctgtggaccttggtggggttgcagggctgggggcccatgtccacatctccatttccagcctttctagcctgccctctgctgccagccaataaattgcttgcctgctgcctgcatcccctttcctggcccctgggagcccacagccttcccatcccttaacctgttgccaagggccttggccctgtttccaggacctggcccagccagagcccactgctgggaccttcaagcacaaggcctgccctacacccaggctggtgcctcaggcctctcctctagtaggcaggccaggttagtgaggaaggactgtgtctccagattgtggtttcctctttaagacagggtcttgctctgttgcccaggctccagtgcagtggtgtgatcatggctcactgcagcctcgacctcctgggctcaagcaatcctcctgcctcagcctcgcaagtagctgggactacagccgtgcaccactacatccagctgtatatgtctggttttcttacccctacttctgtcatcttctcagggacagcctatttatacaaccagtgtggtcccctgaccaacgccattacctgggacaagttttcagaccccagacttactgagcctaagcctctgcagggtgggcttctcggtctgttttgacaaaacttcaggggcttctgaaggctggtgttggacggcagcattgagtttcctgccgtgccctgcctgagctctcagggccctgctcacctgctctggctgtgaaccacctgggcttcatctcaagcctgcctggcgtctctgtgcccctgtgagaatcttgaggggacccacactgggttgaggccagtgtctcctgctgtgagaacaagtggatgtccctctccccgccctcctgctgaagtggccttgctgctctcaggcccggccactgggctccaagactctgctcctcctgtcagtcactgactctgatggccttgggccggctgcatcagcagcccttaaagaaagacccctccctcaacccccatttttctgttaaatgtgcccctggctggctttttcttcgtcttcagcccaggccagtggtcagtgttctcatgtcatggactctccttgcctgacacttgcctcttgggctccctgttgccctcaggccaccccccacttctagttcttcacactaagccctaacttaggccttgttcttggttttctcatttttgttgccccaaatcttgaacctgtcagcaacttgcaggctgtacctctgcccttccttttctcatcaatcactgatgctgaagctgcaggcctgagccctttgtctccctggatgctgggtggcgcctcatctgcatctctgcctcaccccatccactgccacaggctgcctgatgaccactagaggtatgtctgcccctcgtcaccctgctgcacaccaatctgtggcccttcatcatgctaagaacaagaactgcgccatggctggctccttctcttctccagcccatccctctgcagcctgtcatccctgtctgtgaccattggtcgggcccctgggctctagagtgacttttgacgccctccatccctcccgccaggcactgtcctccgcaaggcctggtgcagccctggcagtaactggcttgtaagaggctcagacaccaagctgggcctgcagaggaggggcacagtaggacacagtgactgcccaggtgtccacacacctgtaggcctctgagccagcgtccagggtacaggtgcgggtggtggggatgaaggcctgaccagggagggagaagcaggtttggagaggaccctgtgcccaccctgacagacaccctggctggccctgactgactgtattctctggccacattcaagtcccccattggtgggggcagagaagtaggaccaggccatccttggctccagagctcgaagaccccaagacagccctctgctctcagcggcgccacagagagcctgggctcagccttctgcatcaggacatggcctcgtccactgagggcacgatttaaacatttgacatcagaagctttatttgtaaacctcacacagataaggaccaagggctggcggtgtggccagggcaggggacaggccaccaaggacctttggcaaatgaaggtttacatttctgtagtttgtttgttttagagcttaatttgtagttttttagctattaaaaccatttgaatttttaacgacctgatgagggcatcaggtaaattaaaggattttgggaaga

SEQ ID NO: 405427 - DNA, 4878 bp, Homo sapiens
  misc_feature (96)..(96): n is a, c, g, or t
gggctgcaggaattcggcacgagtgggcctgcagaggaggggcacagtaggacacagtgactgcccaggtgtccacacacctgtaggcctctgagncagcgtccagggtacaggtgcgggtggtggggatgaaggcctgaccagggagggagaagcaggtttggagaggaccctgtgcccaccccaacagcaacaggtctcaattcttcatcacgtttcgctcctgtgcctacctggacaagaagcataccatctttggacgggttgttgggggctttgacgtactgacagccatggagaatgtggagagtgaccccaaaactgaccgccctaaggaggagatccgcattgatgccactacagtgttcgtggacccctatgaggaggccgatgcccagattgcgcaggagcggaagacacagctcaaggtagccccggagaccaaagtgaagagcagccagccccaggcagggagccagggcccccagaccttccgccagggcgtgggcaagtacatcaacccagcagccacgaagcgagcagcagaggaagagccctcaaccagtgccactgtccccatgtccaagaagaagcccagtcggggttttggggacttcagctcctggtagcagcaggttggccgctgtggaccttggtggggttgcagggctgggggcccatgtccacatctccatttccagcctttctagcctgccctctgctgccagccaataaattgcttgcctgctgcctgcatcccctttcctggcccctgggagcccacagccttcccatcccttaacctgttgccaagggccttggccctgtttccaggacctggcccagccagagcccactgctgggaccttcaagcacaaggcctgccctacacccaggctggtgcctcaggcctctcctctagtaggcaggccaggttagtgaggaaggactgtgtctccagattgtggtttcctctttaagacagggtcttgctctgttgcccaggctccagtgcagtggtgtgatcatggctcactgcagcctcgacctcctgggctcaagcaatcctcctgcctcagcctcgcaagtagctgggactacagccgtgcaccactacatccagctgtatatgtctggttttcttacccctacttctgtcatcttctcagggacagcctatttatacaaccagtgtggtcccctgaccaacgccattacctgggacaagttttcagaccccagacttactgagcctaagcctctgcagggtgggcttctcggtctgttttgacaaaacttcaggggcttctgaaggctggtgttggacggcagcattgagtttcctgccgtgccctgcctgagctctcagggccctgctcacctgctctggctgtgaaccacctgggcttcatctcaagcctgcctggcgtctctgtgcccctgtgagaatcttgaggggacccacactgggttgaggccagtgtctcctgctgtgagaacaagtggatgtccctctccccgccctcctgctgaagtggccttgctgctctcaggcccggccactgggctccaagactctgctcctcctgtcagtcactgactctgatggccttgggccggctgcatcagcagcccttaaagaaagacccctccctcaacccccatttttctgttaaatgtgcccctggctggctttttcttcgtcttcagcccaggccagtggtcagtgttctcatgtcatggactctccttgcctgacacttgcctcttgggctccctgttgccctcaggccaccccccacttctagttcttcacactaagccctaacttaggccttgttcttggttttctcatttttgttgccccaaatcttgaacctgtcagcaacttgcaggctgtacctctgcccttccttttctcatcaatcactgatgctgaagctgcaggcctgagccctttgtctccctggatgctgggtggcgcctcatctgcatctctgcctcaccccatccactgccacaggctgcctgatgaccactagaggtatgtctgcccctcgtcaccctgctgcacaccaatctgtggcccttcatcatgctaagaacaagaactgcgccatggctggctccttctcttctccagcccatccctctgcagcctgtcatccctgtctgtgaccattggtcgggcccctgggctctagagtgacttttgacgccctccatccctcccgccaggcactgtcctccgcaaggcctggtgcagccctggcagtaactggcttgtaagaggctcagacaccaagctgggcctgcagaggaggggcacagtaggacacagtgactgcccaggtgtccacacacctgtaggcctctgagccagcgtccagggtacaggtgcgggtggtggggatgaaggcctgaccagggagggagaagcaggtttggagaggaccctgtgcccaccctgacagacaccctggctggccctgactgactgtattctctggccacattcaagtcccccattggtgggggcagagaagtaggaccaggccatccttggctccagagctcgaagaccccaagacagccctctgctctcagcggcgccacagagagcctgggctcagccttctgcatcaggacatggcctcgtccactgagggcacgatttaaacatttgacatcagaagctttatttgtaaacctcacacagataaggaccaagggctggcggtgtggccagaggacaggggaagctgaaggccccgtgcttgagctcggcagtcctgctccttgcagtgaagccaccatgggtgaccgtccagcctcacccggtggcctgcacagtgagggaagggcttcagggccatctgctcccagggcaggggacaggccaccaaggacctttggcaaatgaaggtttacatttctgtagtttgtttgttttagagcttaatttgtagttttttagctattaaaaccatttgaatttttaacgacctgatgagggcatcaggtaaattaaaggattttgggaagattcttattttcaattctaatatctgacagatgccatcaagaataagcattaaggtataaaaaatactgtgtgtataaaacaatgccaaaccacattcctacagcaaatgcactgtgccatttataaccctgacatcacctcccaaggctctcaaggaagatttattttaaataacttaaatagaagtcctagatgatattgtttaggaatttaagagggtggtggatatggtcctgtgaatagcacttcccctgaagccagctcatggtctgttcatttggtttaaaaatgagcttgtattttgcagaagcccaacaaaaaaaaagtgataaaagtgttgttggtataaattacaaaaaaaaaaaaaaaaaaatacaaaagtcataagactactagtaaaaaatgttcaatcaatgccgtcacaaaagacagtacaaaaaccaaagtgcccaaatagaaggagcagcgaacttgcccaaaacagaaaagctctaaatagaactttagtatatacaaaaaccactcggtagagttttagaagtttcttccatgtaagtgaagcatcttgagtcactcaggacttggctgtcctcgcacccgtggcaggctggggacggcacggacctccaactgtttcccctagtccccggggcatcggaggctgggttcccacatgggagaggaatgaagactcactcaaagggaagggtcagtttaagataagttttcagtgaactccttcttccacccgggaaggtgtctttcagcctcttcacagtctcaagacaattgactgaagccacaggcattgctaacttcatgggccagcttgtgggcggagcctcttcaggcttgagaccatggcagcaagagccctgcagcgtgcagtgacccctgcgctctgggtggctgcacgcgagctcaggaggacaggatgtgctgggccagcctaaaccctcgggggagactagcgcagggataaagcagcttgcagggccatagccggatgtggaggcttccaagacagtacaaagatttccttcctttcctaagtggaagatgtgctttaaaggaacttctgcctctgtcactcctgctgagtggatgcatctcagtgccatgcccaccagggcagcggcatttcccacctgccaaggcttccaggcttgggcaaagagatggcacccaaaggcatgctgtgtgtgggcagtgagctcgagtgggcacagcccagtgcctgcctggaccgcaggtctgggtttaggaagggctgaagtcgggggaggtgtgaagctgggcaggtggccacgttcttattgtcagccagctcgcactcttgcccctagactagccttgtctgaaggcagcttcagagccacttgccaggctgagaactatccgggctcagtgctctcctatctgctgcccctcggtccccctgcctgccctctgccctgagacaagttactaaatgttgaaaaccaaacttatctgggagtggtttttgacctccatcctctgcaaagtggcctaaacccttatggggtgcccactcctggtggagggcaggtggatgagtggattgtaatttataataaaatatatggcagaaacacaggccttaggagattgcacaggcccctctatcagttcaagtgacatgggacagcaccacgcagggacgggcaacgcgtctagcaggccaggcgtcttcatgcacaaaggctaaacttgttgctttaaccttttctgaacaaattttaaacattctggcaaatgtcaagttttgaagtttttcctgtgggttctggcctctttcatatgcaaaaata

SEQ ID NO: 405428 - DNA, 3074 bp, Homo sapiens
  misc_feature (2932)..(2932): n is a, c, g, or t
  misc_feature (2939)..(2939): n is a, c, g, or t
ggaactcggctgcggctccatggtctgagttgtcagccgttgttttttcgtgctcgctagtcgccgccgccgctccgccatggggaagcgacagcaccaaaaggacaaaatgtacattacctgtgctgaatacactcacttttatggtggcaagaagccagatctcccacaaacaaattttcgtcgtttaccttttgaccactgcagtctctctctgcagccctttgtctacccagtctgcactcccgatggcatcgtctttgacttactgaacattgttccatggcttaagaagtacgggaccaaccccagcaatggagagaagctggacgggaggtccctgatcaagctgaacttttccaagaacagtgaggggaagtaccactgcccagtgctgtttaccgtgttcaccaacaacacccacatcgtggctgtgaggacgaccggcaacgtctacgcctatgaggcagtggaacagctaaatatcaaggccaagaacttccgggacctgctgaccgacgagcccttctcccggcaggacatcatcaccctccaggaccccaccaatttggacaagttcaatgtctctaacttctatcatgtgaagaataacatgaaaataatagacccagatgaagagaaggccaaacaggacccgtcttattatctgaaaaatacaaatgccgagacccgagagaccctgcaggagctctacaaggagttcaaaggggacgagattctggcagccaccatgaaggccccggagaagaagaaagtggacaagctgaacgctgcccactattccacagggaaggtcagcgcttccttcacctccaccgcgatggtcccggagaccacacatgaagcagctgccatcgacgaggatgtgctgcgctaccagtttgtgaagaagaagggctacgtgcggctgcacaccaacaagggcgacctcaacctggagctgcactgcgacctgacaccaaaaacctgcgaaaacttcatcaggctttgcaagaagcattattacgatggcaccatcttccacagatccatccggaactttgtgatccaagggggcgaccccacaggcacaggcacgggtggggagtcatactgggggaagcccttcaaagacgagttccggcccaacctctcgcacacgggccgcggcatcctcagcatggccaactccgggcccaacagcaacaggtctcaattcttcatcacgtttcgctcctgtgcctacctggacaagaagcataccatctttggacgggttgttgggggctttgacgtactgacagccatggagaatgtggagagtgaccccaaaactgaccgccctaaggaggagatccgcattgatgccactacagtgttcgtggacccctatgaggaggccgatgcccagattgcgcaggagcggaagacacagctcaaggtagccccggagaccaaagtgaagagcagccagccccaggcagggagccagggcccccagaccttccgccagggcgtgggcaagtacatcaacccagcagccacgaagcgagcagcagaggaagagccctcaaccagtgccactgtccccatgtccaagaagaagcccagtcggggttttggggacttcagctcctggtagcagcaggttggccgctgtggaccttggtggggttgcagggctgggggcccatgtccacatctccatttccagcctttctagcctgccctctgctgccagccaataaattgcttgcctgctgcctgcatcccctttcctggcccctgggagcccacagccttcccatcccttaacctgttgccaagggccttggccctgtttccaggacctggcccagccagagcccactgctgggaccttcaagcacaaggcctgccctacacccaggctggtgcctcaggcctctcctctagtaggcaggccaggttagtgaggaaggactgtgtctccagattgtggtttcctctttaagacagggtcttgctctgttgcccaggctccagtgcagtggtgtgatcatggctcactgcagcctcgacctcctgggctcaagcaatcctcctgcctcagcctcgcaagtagctgggactacagccgtgcaccactacatccagctgtatatgtctggttttcttacccctacttctgtcatcttctcagggacagcctatttatacaaccagtgtggtcccctgaccaacgccattacctgggacaagttttcagaccccagacttactgagcctaagcctctgcagggtgggcttctcggtctgttttgacaaaacttcaggggcttctgaaggctggtgttggacggcagcattgagtttcctgccgtgccctgcctgagctctcagggccctgctcacctgctctggctgtgaaccacctgggcttcatctcaagcctgcctggcgtctctgtgcccctgtgagaatcttgaggggacccacactgggttgaggccagtgtctcctgctgtgagaacaagtggatgtccctctccccgccctcctgctgaagtggccttgctgctctcaggcccggccactgggctccaagactctgctcctcctgtcagtcactgactctgatggccttgggccggctgcatcagcagcccttaaagaaagacccctccctcaacccccatttttctgttaaatgtgcccctggctggctttttcttcgtcttcagcccaggccagtggtcagtgttctcatgtcatggactctccttgcctgacacttgcctcttgggctccctgttgccctcaggccaccccccacttctagttcttcacactaagccctaacttaggccttgttcttggttttctcatttttgttgccccaaatcttgaacctgtcagcaacttgcaggctgtacctctgccccaaaaaaanaaaaaanaaaaaaaaaaaaaaaaacccgggctcttttccggggcggaaaaaggtaaaaaggcagggtaaggttttccgccccttttggaaaaggggaaaaacggggcccaaaaagggggaaaatcaaaaccgaagaacaaag

SEQ ID NO: 405429 - DNA, 824 bp, Homo sapiens
ggaactcggctgcggctccatggtctgagttgtcagccgttgttttttcgtgctcgctagtcgccgccgccgctccgccatggggaagcgacagcaccaaaaggacaaaatgtacattacctgtgctgaatacactcacttttatggtggcaagaagccagatctcccacaaacaaattttcgtcgtttaccttttgaccactgcagtctctctctgcagccctttgtctacccagtctgcactcccgatggcatcgtctttgacttactgaacattgttccatggcttaagaagtacgggaccaaccccagcaatggagagaagctggacgggaggtccctgatcaagctgaacttttccaagaacagtgaggggaagtaccactgcccagtgctgtttaccgtgttcaccaacaacacccacatcgtggctgtgaggacgaccggcaacgtctacgcctatgaggcagtggaacagctaaatatcaaggccaagaacttccgggacctgctgaccgacgagcccttctcccggcaggacatcatcaccctccaggaccccaccaatttggacaagttcaatgtctctaacttctatcatgtgaagaataacatgaaaataatagacccagatgaagagaaggccaaacaggacccgtcttattatctgaaaaatacaaatgccgagacccgagagaccctgcaggagctctacaaggagttcaaaggggacgagattctggcagccaccatgaaggccccggagaagaagaaagtggacaagctgaacgctgtgagtggcggagggcactcggccaagccca

SEQ ID NO: 405430 - DNA, 736 bp, Homo sapiens
ggaactcggctgcggctccatggtctgagttgtcagccgttgttttttcgtgctcgctagtcgccgccgccgctccgccatggggaagcgacagcaccaaaaggacaaaatgtacattacctgtgctgaatacactcacttttatggtggcaagaagccagatctcccacaaacaaattttcgtcgtttaccttttgaccactgcagtctctctctgcagccctttgtctacccagtctgcactcccgatggcatcgtctttgacttactgaacattgttccatggcttaagaagtacgggaccaaccccagcaatggagagaagctggacgggaggtccctgatcaagctgaacttttccaagaacagtgaggggaagtaccactgcccagtgctgtttaccgtgttcaccaacaacacccacatcgtggctgtgaggacgaccggcaacgtctacgcctatgaggcagtggaacagctaaatatcaaggccaagaacttccgggacctgctgaccgacgagcccttctcccggcaggacatcatcaccctccaggaccccaccaatttggacaagttcaatgtctctaacttctatcatgtgaagaataacatgaaaataatagacccagattcagaaggacttgaaaatcaaagcccatgtcaatgtctccatggataccgggcccttttttgcggcgatgtctaacagcttctgcacatccggtatgacgct

SEQ ID NO: 405431 - DNA, 307 bp, Homo sapiens
aaccatccagccctcctccccagcttcatcacgtttcgctcctgtgcctacctggacaagaagcataccatctttggacggtaagggaagcggctgtgtgaagcctggggggtcagtgggctaggtgggttccttccccacctgaggcctcctcactgcctttttcgtggacctgagtcatgtgccatgctggccatcactgctgggggttgaggctatgcagagctgcgatggagggtgctccatgtgccagggaagtctggctctctagacccaccgggctcaggagaggaggaaactcgcccat

SEQ ID NO: 405432 - DNA, 1932 bp, Homo sapiens
ctggcttcaagtgagagcctcctgccttggcctccgaaagtgctggaattacaggcccactattccacagggaaggtcagcgcttccttcacctccaccgcgatggtcccggagaccacacatgaagcagctgccatcgacgaggatgtgctgcgctaccagtttgtgaagaagaagggctacgtgcggctgcacaccaacaagggcgacctcaacctggagctgcactgcgacctgacaccaaaaacctgcgaaaacttcatcaggctttgcaagaagcattattacgatggcaccatcttccacagatccatccggaactttgtgatccaagggggcgaccccacaggcacaggcacgggtggggagtcatactgggggaagcccttcaaagacgagttccggcccaacctctcgcacacgggccgcggcatcctcagcatggccaactccgggcccaacagcaacaggtctcaattcttcatcacgtttcgctcctgtgcctacctggacaagaagcataccatctttggacgggttgttgggggctttgacgtactgacagccatggagaatgtggagagtgaccccaaaactgaccgccctaaggaggagatccgcattgatgccactacagtgttcgtggacccctatgaggaggccgatgcccagattgcgcaggagcggaagacacagctcaaggtagccccggagaccaaagtgaagagcagccagccccaggcagggagccagggcccccagaccttccgccagggcgtgggcaagtacatcaacccagcagccacgaagcgagcagcagaggaagagccctcaaccagtgccactgtccccatgtccaagaagaagcccagtcggggttttggggacttcagctcctggtagcagcaggctgcctgatgaccactagaggtatgtctgcccctcgtcaccctgctgcacaccaatctgtggcccttcatcatgctaagaacaagaactgcgccatggctggctccttctcttctccagcccatccctctgcagcctgtcatccctgtctgtgaccattggtcgggcccctgggctctagagtgacttttgacgccctccatccctcccgccaggcactgtcctccgcaaggcctggtgcagccctggcagtaactggcttgtaagaggctcagacaccaagctgggcctgcagaggaggggcacagtaggacacagtgactgcccaggtgtccacacacctgtaggcctctgagccagcgtccagggtacaggtgcgggtggtggggatgaaggcctgaccagggagggagaagcaggtttggagaggaccctgtgcccaccctgacagacaccctggctggccctgactgactgtattctctggccacattcaagtcccccattggtgggggcagagaagtaggaccaggccatccttggctccagagctcgaagaccccaagacagccctctgctctcagcggcgccacagagagcctgggctcagccttctgcatcaggacatggcctcgtccactgagggcacgatttaaacatttgacatcagaagctttatttgtaaacctcacacagataaggaccaagggctggcggtgtggccagaggacaggggaagctgaaggccccgtgcttgagctcggcagtcctgctccttgcagtgaagccaccatgggtgaccgtccagcctcacccggtggcctgcacagtgagggaagggcttcagggccatctgctcccagggcaggggacaggccaccaaggacctttggcaaatgaaggtttacatttctgtagtttgtttgttttagagcttaatttgtagttttttagctattaaaaccatttgaatttttaacgacctgatgagggcatcaggtaaattaaaggattttgggaaga

SEQ ID NO: 405433 - DNA, 594 bp, Homo sapiens
  misc_feature (452)..(452): n is a, c, g, or t
  misc_feature (459)..(459): n is a, c, g, or t
ggaactcggctgcggctccatggtctgagttgtcagccgttgttttttcgtgctcgctagtcgccgccgccgctccgccatggggaagcgacagcaccaaaaggacaaaatgaacattgttccatggcttaagaagtacgggaccaaccccagcaatggagagaagctggacgggaggtccctgatcaagctgaacttttccaagaacagtgaggggaagtaccactgcccagtgctgtttaccgtgttcaccaacaacacccacatcgtggctgtgaggacgaccggcaacgtctacgcctatgaggcagtggaacagctaaatatcaaggccaagaacttccgggacctgctgaccgacgagcccttctcccggcaggacatcatcaccctccaggaccccaccaatttggacaagttcaatgtctctaacttctatcatgcaaaaaaanaaaaaanaaaaaaaaaaaaaaaaacccgggctcttttccggggcggaaaaaggtaaaaaggcagggtaaggttttccgccccttttggaaaaggggaaaaacggggcccaaaaagggggaaaatcaaaaccgaagaacaaag

SEQ ID NO: 405434 - DNA, 4059 bp, Homo sapiens
ggaactcggctgcggctccatggtctgagttgtcagccgttgttttttcgtgctcgctagtcgccgccgccgctccgccatggggaagcgacagcaccaaaaggacaaaatgtacattacctgtgctgaatacactcacttttatggtggcaagaagccagatctcccacaaacaaattttcgtcgtttaccttttgaccactgcagtctctctctgcagccctttgtctacccagtctgcactcccgatggcatcgtctttgacttactgaacattgttccatggcttaagaagtacgggaccaaccccagcaatggagagaagctggacgggaggtccctgatcaagctgaacttttccaagaacagtgaggggaagtaccactgcccagtgctgtttaccgtgttcaccaacaacacccacatcgtggctgtgaggacgaccggcaacgtctacgcctatgaggcagtggaacagctaaatatcaaggccaagaacttccgggacctgctgaccgacgagcccttctcccggcaggacatcatcaccctccaggaccccaccaatttggacaagttcaatgtctctaacttctatcatgtgaagaataacatgaaaataatagacccagatgaagagaaggccaaacaggacccgtcttattatctgaaaaatacaaatgccgagacccgagagaccctgcaggagctctacaaggagttcaaaggggacgagattctggcagccaccatgaaggccccggagaagaagaaagtggacaagctgaacgctgcccactattccacagggaaggtcagcgcttccttcacctccaccgcgatggtcccggagaccacacatgaagcagctgccatcgacgaggatgtgctgcgctaccagtttgtgaagaagaagggctacgtgcggctgcacaccaacaagggcgacctcaacctggagctgcactgcgacctgacaccaaaaacctgcgaaaacttcatcaggctttgcaagaagcattattacgatggcaccatcttccacagatccatccggaactttgtgatccaagggggcgaccccacaggcacaggcacgggtggggagtcatactgggggaagcccttcaaagacgagttccggcccaacctctcgcacacgggccgcggcatcctcagcatggccaactccgggcccaacagcaacaggtctcaattcttcatcacgtttcgctcctgtgcctacctggacaagaagcataccatctttggacgggttgttgggggctttgacgtactgacagccatggagaatgtggagagtgaccccaaaactgaccgccctaaggaggagatccgcattgatgccactacagtgttcgtggacccctatgaggaggccgatgcccagattgcgcaggagcggaagacacagctcaaggtagccccggagaccaaagtgaagagcagccagccccaggcagggagccagggcccccagaccttccgccagggcgtgggcaagtacatcaacccagcagccacgaagcgagcagcagaggaagagccctcaaccagtgccactgtccccatgtccaagaagaagcccagtcggggttttggggacttcagctcctggtagcagcaggttggccgctgtggaccttggtggggttgcagggctgggggcccatgtccacatctccatttccagcctttctagcctgccctctgctgccagccaataaattgcttgcctgctgcctgcatcccctttcctggcccctgggagcccacagccttcccatcccttaacctgttgccaagggccttggccctgtttccaggacctggcccagccagagcccactgctgggaccttcaagcacaaggcctgccctacacccaggctggtgcctcaggcctctcctctagtaggcaggccaggttagtgaggaaggactgtgtctccagattgtggtttcctctttaagacagggtcttgctctgttgcccaggctccagtgcagtggtgtgatcatggctcactgcagcctcgacctcctgggctcaagcaatcctcctgcctcagcctcgcaagtagctgggactacagccgtgcaccactacatccagctgtatatgtctggttttcttacccctacttctgtcatcttctcagggacagcctatttatacaaccagtgtggtcccctgaccaacgccattacctgggacaagttttcagaccccagacttactgagcctaagcctctgcagggtgggcttctcggtctgttttgacaaaacttcaggggcttctgaaggctggtgttggacggcagcattgagtttcctgccgtgccctgcctgagctctcagggccctgctcacctgctctggctgtgaaccacctgggcttcatctcaagcctgcctggcgtctctgtgcccctgtgagaatcttgaggggacccacactgggttgaggccagtgtctcctgctgtgagaacaagtggatgtccctctccccgccctcctgctgaagtggccttgctgctctcaggcccggccactgggctccaagactctgctcctcctgtcagtcactgactctgatggccttgggccggctgcatcagcagcccttaaagaaagacccctccctcaacccccatttttctgttaaatgtgcccctggctggctttttcttcgtcttcagcccaggccagtggtcagtgttctcatgtcatggactctccttgcctgacacttgcctcttgggctccctgttgccctcaggccaccccccacttctagttcttcacactaagccctaacttaggccttgttcttggttttctcatttttgttgccccaaatcttgaacctgtcagcaacttgcaggctgtacctctgcccttccttttctcatcaatcactgatgctgaagctgcaggcctgagccctttgtctccctggatgctgggtggcgcctcatctgcatctctgcctcaccccatccactgccacaggctgcctgatgaccactagaggtatgtctgcccctcgtcaccctgctgcacaccaatctgtggcccttcatcatgctaagaacaagaactgcgccatggctggctccttctcttctccagcccatccctctgcagcctgtcatccctgtctgtgaccattggtcgggcccctgggctctagagtgacttttgacgccctccatccctcccgccaggcactgtcctccgcaaggcctggtgcagccctggcagtaactggcttgtaagaggctcagacaccaagctgggcctgcagaggaggggcacagtaggacacagtgactgcccaggtgtccacacacctgtaggcctctgagccagcgtccagggtacaggtgcgggtggtggggatgaaggcctgaccagggagggagaagcaggtttggagaggaccctgtgcccaccctgacagacaccctggctggccctgactgactgtattctctggccacattcaagtcccccattggtgggggcagagaagtaggaccaggccatccttggctccagagctcgaagaccccaagacagccctctgctctcagcggcgccacagagagcctgggctcagccttctgcatcaggacatggcctcgtccactgagggcacgatttaaacatttgacatcagaagctttatttgtaaacctcacacagataaggaccaagggctggcggtgtggccagaggacaggggaagctgaaggccccgtgcttgagctcggcagtcctgctccttgcagtgaagccaccatgggtgaccgtccagcctcacccggtggcctgcacagtgagggaagggcttcagggccatctgctcccagggcaggggacaggccaccaaggacctttggcaaatgaaggtttacatttctgtagtttgtttgttttagagcttaatttgtagttttttagctattaaaaccatttgaatttttaacgacctgatgagggcatcaggtaaattaaaggattttgggaaga

SEQ ID NO: 405435 - DNA, 5813 bp, Homo sapiens
ggaactcggctgcggctccatggtctgagttgtcagccgttgttttttcgtgctcgctagtcgccgccgccgctccgccatggggaagcgacagcaccaaaaggacaaaatgtacattacctgtgctgaatacactcacttttatggtggcaagaagccagatctcccacaaacaaattttcgtcgtttaccttttgaccactgcagtctctctctgcagccctttgtctacccagtctgcactcccgatggcatcgtctttgacttactgaacattgttccatggcttaagaagtacgggaccaaccccagcaatggagagaagctggacgggaggtccctgatcaagctgaacttttccaagaacagtgaggggaagtaccactgcccagtgctgtttaccgtgttcaccaacaacacccacatcgtggctgtgaggacgaccggcaacgtctacgcctatgaggcagtggaacagctaaatatcaaggccaagaacttccgggacctgctgaccgacgagcccttctcccggcaggacatcatcaccctccaggaccccaccaatttggacaagttcaatgtctctaacttctatcatgtgaagaataacatgaaaataatagacccagatgaagagaaggccaaacaggacccgtcttattatctgaaaaatacaaatgccgagacccgagagaccctgcaggagctctacaaggagttcaaaggggacgagattctggcagccaccatgaaggccccggagaagaagaaagtggacaagctgaacgctgcccactattccacagggaaggtcagcgcttccttcacctccaccgcgatggtcccggagaccacacatgaagcagctgccatcgacgaggatgtgctgcgctaccagtttgtgaagaagaagggctacgtgcggctgcacaccaacaagggcgacctcaacctggagctgcactgcgacctgacaccaaaaacctgcgaaaacttcatcaggctttgcaagaagcattattacgatggcaccatcttccacagatccatccggaactttgtgatccaagggggcgaccccacaggcacaggcacgggtggggagtcatactgggggaagcccttcaaagacgagttccggcccaacctctcgcacacgggccgcggcatcctcagcatggccaactccgggcccaacagcaacaggtctcaattcttcatcacgtttcgctcctgtgcctacctggacaagaagcataccatctttggacgggttgttgggggctttgacgtactgacagccatggagaatgtggagagtgaccccaaaactgaccgccctaaggaggagatccgcattgatgccactacagtgttcgtggacccctatgaggaggccgatgcccaggtgagggggcacgatgccaccacctaggagggtctgggctagtgcacttttccaccccaagcctagcatctgtcctgcccgaggtgctgccggttagccagcgcctgttgtgccacagattgcgcaggagcggaagacacagctcaaggtagccccggagaccaaagtgaagagcagccagccccaggcagggagccagggcccccagaccttccgccagggcgtgggcaagtacatcaacccagcagccacccaataaattgcttgcctgctgcctgcatcccctttcctggcccctgggagcccacagccttcccatcccttaacctgttgccaagggccttggccctgtttccaggacctggcccagccagagcccactgctgggaccttcaagcacaaggcctgccctacacccaggctggtgcctcaggcctctcctctagtaggcaggccaggttagtgaggaaggactgtgtctccagattgtggtttcctctttaagacagggtcttgctctgttgcccaggctccagtgcagtggtgtgatcatggctcactgcagcctcgacctcctgggctcaagcaatcctcctgcctcagcctcgcaagtagctgggactacagccgtgcaccactacatccagctgtatatgtctggttttcttacccctacttctgtcatcttctcagggacagcctatttatacaaccagtgtggtcccctgaccaacgccattacctgggacaagttttcagaccccagacttactgagcctaagcctctgcagggtgggcttctcggtctgttttgacaaaacttcaggggcttctgaaggctggtgttggacggcagcattgagtttcctgccgtgccctgcctgagctctcagggccctgctcacctgctctggctgtgaaccacctgggcttcatctcaagcctgcctggcgtctctgtgcccctgtgagaatcttgaggggacccacactgggttgaggccagtgtctcctgctgtgagaacaagtggatgtccctctccccgccctcctgctgaagtggccttgctgctctcaggcccggccactgggctccaagactctgctcctcctgtcagtcactgactctgatggccttgggccggctgcatcagcagcccttaaagaaagacccctccctcaacccccatttttctgttaaatgtgcccctggctggctttttcttcgtcttcagcccaggccagtggtcagtgttctcatgtcatggactctccttgcctgacacttgcctcttgggctccctgttgccctcaggccaccccccacttctagttcttcacactaagccctaacttaggccttgttcttggttttctcatttttgttgccccaaatcttgaacctgtcagcaacttgcaggctgtacctctgcccttccttttctcatcaatcactgatgctgaagctgcaggcctgagccctttgtctccctggatgctgggtggcgcctcatctgcatctctgcctcaccccatccactgccacaggctgcctgatgaccactagaggtatgtctgcccctcgtcaccctgctgcacaccaatctgtggcccttcatcatgctaagaacaagaactgcgccatggctggctccttctcttctccagcccatccctctgcagcctgtcatccctgtctgtgaccattggtcgggcccctgggctctagagtgacttttgacgccctccatccctcccgccaggcactgtcctccgcaaggcctggtgcagccctggcagtaactggcttgtaagaggctcagacaccaagctgggcctgcagaggaggggcacagtaggacacagtgactgcccaggtgtccacacacctgtaggcctctgagccagcgtccagggtacaggtgcgggtggtggggatgaaggcctgaccagggagggagaagcaggtttggagaggaccctgtgcccaccctgacagacaccctggctggccctgactgactgtattctctggccacattcaagtcccccattggtgggggcagagaagtaggaccaggccatccttggctccagagctcgaagaccccaagacagccctctgctctcagcggcgccacagagagcctgggctcagccttctgcatcaggacatggcctcgtccactgagggcacgatttaaacatttgacatcagaagctttatttgtaaacctcacacagataaggaccaagggctggcggtgtggccagaggacaggggaagctgaaggccccgtgcttgagctcggcagtcctgctccttgcagtgaagccaccatgggtgaccgtccagcctcacccggtggcctgcacagtgagggaagggcttcagggccatctgctcccagggcaggggacaggccaccaaggacctttggcaaatgaaggtttacatttctgtagtttgtttgttttagagcttaatttgtagttttttagctattaaaaccatttgaatttttaacgacctgatgagggcatcaggtaaattaaaggattttgggaagattcttattttcaattctaatatctgacagatgccatcaagaataagcattaaggtataaaaaatactgtgtgtataaaacaatgccaaaccacattcctacagcaaatgcactgtgccatttataaccctgacatcacctcccaaggctctcaaggaagatttattttaaataacttaaatagaagtcctagatgatattgtttaggaatttaagagggtggtggatatggtcctgtgaatagcacttcccctgaagccagctcatggtctgttcatttggtttaaaaatgagcttgtattttgcagaagcccaacaaaaaaaaagtgataaaagtgttgttggtataaattacaaaaaaaaaaaaaaaaaaatacaaaagtcataagactactagtaaaaaatgttcaatcaatgccgtcacaaaagacagtacaaaaaccaaagtgcccaaatagaaggagcagcgaacttgcccaaaacagaaaagctctaaatagaactttagtatatacaaaaaccactcggtagagttttagaagtttcttccatgtaagtgaagcatcttgagtcactcaggacttggctgtcctcgcacccgtggcaggctggggacggcacggacctccaactgtttcccctagtccccggggcatcggaggctgggttcccacatgggagaggaatgaagactcactcaaagggaagggtcagtttaagataagttttcagtgaactccttcttccacccgggaaggtgtctttcagcctcttcacagtctcaagacaattgactgaagccacaggcattgctaacttcatgggccagcttgtgggcggagcctcttcaggcttgagaccatggcagcaagagccctgcagcgtgcagtgacccctgcgctctgggtggctgcacgcgagctcaggaggacaggatgtgctgggccagcctaaaccctcgggggagactagcgcagggataaagcagcttgcagggccatagccggatgtggaggcttccaagacagtacaaagatttccttcctttcctaagtggaagatgtgctttaaaggaacttctgcctctgtcactcctgctgagtggatgcatctcagtgccatgcccaccagggcagcggcatttcccacctgccaaggcttccaggcttgggcaaagagatggcacccaaaggcatgctgtgtgtgggcagtgagctcgagtgggcacagcccagtgcctgcctggaccgcaggtctgggtttaggaagggctgaagtcgggggaggtgtgaagctgggcaggtggccacgttcttattgtcagccagctcgcactcttgcccctagactagccttgtctgaaggcagcttcagagccacttgccaggctgagaactatccgggctcagtgctctcctatctgctgcccctcggtccccctgcctgccctctgccctgagacaagttactaaatgttgaaaaccaaacttatctgggagtggtttttgacctccatcctctgcaaagtggcctaaacccttatggggtgcccactcctggtggagggcaggtggatgagtggattgtaatttataataaaatatatggcagaaacacaggccttaggagattgcacaggcccctctatcagttcaagtgacatgggacagcaccacgcagggacgggcaacgcgtctagcaggccaggcgtcttcatgcacaaaggctaaacttgttgctttaaccttttctgaacaaattttaaacattctggcaaatgtcaagttttgaagtttttcctgtgggttctggcctctttcatatgcaaaaata

SEQ ID NO: 405436 - DNA, 6305 bp, Homo sapiens
ggaactcggctgcggctccatggtctgagttgtcagccgttgttttttcgtgctcgctagtcgccgccgccgctccgccatggggaagcgacagcaccaaaaggacaaaatgtacattacctgtgctgaatacactcacttttatggtggcaagaagccaggtaaggcatgcagtctttctgttccccgttgggggagtggtattaaggaactgtgtcttcaggatacagtgagctgtaaaaatagacaacaagaacacggaaactatggtagacgaatgggctgaggacacagttcatgaaagagaaatatactcaagatagaagaacctgcttcatcttagtggtgatttttgtaaaatgtaatttaaaatattccccgatgctgggagctaagtaaaaaataaataagtaaataaaatacaaaattacatgtacatttaaatgttttttctctatcaagtttataaggaataaaaagaatgataatattttcagctgtcaaaactatcaagactacaataacaagagcactgtcataattttaatggaagtaaaaagtatgcacttttcccaatctcccacaaacaaattttcgtcgtttaccttttgaccactgcagtctctctctgcagccctttgtctacccagtctgcactcccgatggcatcgtctttgacttactgaacattgttccatggcttaagaagtacgggaccaaccccagcaatggagagaagctggacgggaggtccctgatcaagctgaacttttccaagaacagtgaggggaagtaccactgcccagtgctgtttaccgtgttcaccaacaacacccacatcgtggctgtgaggacgaccggcaacgtctacgcctatgaggcagtggaacagctaaatatcaaggccaagaacttccgggacctgctgaccgacgagcccttctcccggcaggacatcatcaccctccaggaccccaccaatttggacaagttcaatgtctctaacttctatcatgtgaagaataacatgaaaataatagacccagatgaagagaaggccaaacaggacccgtcttattatctgaaaaatacaaatgccgagacccgagagaccctgcaggagctctacaaggagttcaaaggggacgagattctggcagccaccatgaaggccccggagaagaagaaagtggacaagctgaacgctgcccactattccacagggaaggtcagcgcttccttcacctccaccgcgatggtcccggagaccacacatgaagcagctgccatcgacgaggatgtgctgcgctaccagtttgtgaagaagaagggctacgtgcggctgcacaccaacaagggcgacctcaacctggagctgcactgcgacctgacaccaaaaacctgcgaaaacttcatcaggctttgcaagaagcattattacgatggcaccatcttccacagatccatccggaactttgtgatccaagggggcgaccccacaggcacaggcacgggtggggagtcatactgggggaagcccttcaaagacgagttccggcccaacctctcgcacacgggccgcggcatcctcagcatggccaactccgggcccaacagcaacaggtctcaattcttcatcacgtttcgctcctgtgcctacctggacaagaagcataccatctttggacgggttgttgggggctttgacgtactgacagccatggagaatgtggagagtgaccccaaaactgaccgccctaaggaggagatccgcattgatgccactacagtgttcgtggacccctatgaggaggccgatgcccagattgcgcaggagcggaagacacagctcaaggtagccccggagaccaaagtgaagagcagccagccccaggcagggagccagggcccccagaccttccgccagggcgtgggcaagtacatcaacccagcagccacgaagcgagcagcagaggaagagccctcaaccagtgccactgtccccatgtccaagaagaagcccagtcggggttttggggacttcagctcctggtagcagcaggttggccgctgtggaccttggtggggttgcagggctgggggcccatgtccacatctccatttccagcctttctagcctgccctctgctgccagccaataaattgcttgcctgctgcctgcatcccctttcctggcccctgggagcccacagccttcccatcccttaacctgttgccaagggccttggccctgtttccaggacctggcccagccagagcccactgctgggaccttcaagcacaaggcctgccctacacccaggctggtgcctcaggcctctcctctagtaggcaggccaggttagtgaggaaggactgtgtctccagattgtggtttcctctttaagacagggtcttgctctgttgcccaggctccagtgcagtggtgtgatcatggctcactgcagcctcgacctcctgggctcaagcaatcctcctgcctcagcctcgcaagtagctgggactacagccgtgcaccactacatccagctgtatatgtctggttttcttacccctacttctgtcatcttctcagggacagcctatttatacaaccagtgtggtcccctgaccaacgccattacctgggacaagttttcagaccccagacttactgagcctaagcctctgcagggtgggcttctcggtctgttttgacaaaacttcaggggcttctgaaggctggtgttggacggcagcattgagtttcctgccgtgccctgcctgagctctcagggccctgctcacctgctctggctgtgaaccacctgggcttcatctcaagcctgcctggcgtctctgtgcccctgtgagaatcttgaggggacccacactgggttgaggccagtgtctcctgctgtgagaacaagtggatgtccctctccccgccctcctgctgaagtggccttgctgctctcaggcccggccactgggctccaagactctgctcctcctgtcagtcactgactctgatggccttgggccggctgcatcagcagcccttaaagaaagacccctccctcaacccccatttttctgttaaatgtgcccctggctggctttttcttcgtcttcagcccaggccagtggtcagtgttctcatgtcatggactctccttgcctgacacttgcctcttgggctccctgttgccctcaggccaccccccacttctagttcttcacactaagccctaacttaggccttgttcttggttttctcatttttgttgccccaaatcttgaacctgtcagcaacttgcaggctgtacctctgcccttccttttctcatcaatcactgatgctgaagctgcaggcctgagccctttgtctccctggatgctgggtggcgcctcatctgcatctctgcctcaccccatccactgccacaggctgcctgatgaccactagaggtatgtctgcccctcgtcaccctgctgcacaccaatctgtggcccttcatcatgctaagaacaagaactgcgccatggctggctccttctcttctccagcccatccctctgcagcctgtcatccctgtctgtgaccattggtcgggcccctgggctctagagtgacttttgacgccctccatccctcccgccaggcactgtcctccgcaaggcctggtgcagccctggcagtaactggcttgtaagaggctcagacaccaagctgggcctgcagaggaggggcacagtaggacacagtgactgcccaggtgtccacacacctgtaggcctctgagccagcgtccagggtacaggtgcgggtggtggggatgaaggcctgaccagggagggagaagcaggtttggagaggaccctgtgcccaccctgacagacaccctggctggccctgactgactgtattctctggccacattcaagtcccccattggtgggggcagagaagtaggaccaggccatccttggctccagagctcgaagaccccaagacagccctctgctctcagcggcgccacagagagcctgggctcagccttctgcatcaggacatggcctcgtccactgagggcacgatttaaacatttgacatcagaagctttatttgtaaacctcacacagataaggaccaagggctggcggtgtggccagaggacaggggaagctgaaggccccgtgcttgagctcggcagtcctgctccttgcagtgaagccaccatgggtgaccgtccagcctcacccggtggcctgcacagtgagggaagggcttcagggccatctgctcccagggcaggggacaggccaccaaggacctttggcaaatgaaggtttacatttctgtagtttgtttgttttagagcttaatttgtagttttttagctattaaaaccatttgaatttttaacgacctgatgagggcatcaggtaaattaaaggattttgggaagattcttattttcaattctaatatctgacagatgccatcaagaataagcattaaggtataaaaaatactgtgtgtataaaacaatgccaaaccacattcctacagcaaatgcactgtgccatttataaccctgacatcacctcccaaggctctcaaggaagatttattttaaataacttaaatagaagtcctagatgatattgtttaggaatttaagagggtggtggatatggtcctgtgaatagcacttcccctgaagccagctcatggtctgttcatttggtttaaaaatgagcttgtattttgcagaagcccaacaaaaaaaaagtgataaaagtgttgttggtataaattacaaaaaaaaaaaaaaaaaaatacaaaagtcataagactactagtaaaaaatgttcaatcaatgccgtcacaaaagacagtacaaaaaccaaagtgcccaaatagaaggagcagcgaacttgcccaaaacagaaaagctctaaatagaactttagtatatacaaaaaccactcggtagagttttagaagtttcttccatgtaagtgaagcatcttgagtcactcaggacttggctgtcctcgcacccgtggcaggctggggacggcacggacctccaactgtttcccctagtccccggggcatcggaggctgggttcccacatgggagaggaatgaagactcactcaaagggaagggtcagtttaagataagttttcagtgaactccttcttccacccgggaaggtgtctttcagcctcttcacagtctcaagacaattgactgaagccacaggcattgctaacttcatgggccagcttgtgggcggagcctcttcaggcttgagaccatggcagcaagagccctgcagcgtgcagtgacccctgcgctctgggtggctgcacgcgagctcaggaggacaggatgtgctgggccagcctaaaccctcgggggagactagcgcagggataaagcagcttgcagggccatagccggatgtggaggcttccaagacagtacaaagatttccttcctttcctaagtggaagatgtgctttaaaggaacttctgcctctgtcactcctgctgagtggatgcatctcagtgccatgcccaccagggcagcggcatttcccacctgccaaggcttccaggcttgggcaaagagatggcacccaaaggcatgctgtgtgtgggcagtgagctcgagtgggcacagcccagtgcctgcctggaccgcaggtctgggtttaggaagggctgaagtcgggggaggtgtgaagctgggcaggtggccacgttcttattgtcagccagctcgcactcttgcccctagactagccttgtctgaaggcagcttcagagccacttgccaggctgagaactatccgggctcagtgctctcctatctgctgcccctcggtccccctgcctgccctctgccctgagacaagttactaaatgttgaaaaccaaacttatctgggagtggtttttgacctccatcctctgcaaagtggcctaaacccttatggggtgcccactcctggtggagggcaggtggatgagtggattgtaatttataataaaatatatggcagaaacacaggccttaggagattgcacaggcccctctatcagttcaagtgacatgggacagcaccacgcagggacgggcaacgcgtctagcaggccaggcgtcttcatgcacaaaggctaaacttgttgctttaaccttttctgaacaaattttaaacattctggcaaatgtcaagttttgaagtttttcctgtgggttctggcctctttcatatgcaaaaata

SEQ ID NO: 405437 - DNA, 6241 bp, Homo sapiens
ctcatcaccccctggcacctggggctgccttgcttgcctaaagccaagtacattacctgtgctgaatacactcacttttatggtggcaagaagccaggtaaggcatgcagtctttctgttccccgttgggggagtggtattaaggaactgtgtcttcaggatacagtgagctgtaaaaatagacaacaagaacacggaaactatggtagacgaatgggctgaggacacagttcatgaaagagaaatatactcaagatagaagaacctgcttcatcttagtggtgatttttgtaaaatgtaatttaaaatattccccgatgctgggagctaagtaaaaaataaataagtaaataaaatacaaaattacatgtacatttaaatgttttttctctatcaagtttataaggaataaaaagaatgataatattttcagctgtcaaaactatcaagactacaataacaagagcactgtcataattttaatggaagtaaaaagtatgcacttttcccaatctcccacaaacaaattttcgtcgtttaccttttgaccactgcagtctctctctgcagccctttgtctacccagtctgcactcccgatggcatcgtctttgacttactgaacattgttccatggcttaagaagtacgggaccaaccccagcaatggagagaagctggacgggaggtccctgatcaagctgaacttttccaagaacagtgaggggaagtaccactgcccagtgctgtttaccgtgttcaccaacaacacccacatcgtggctgtgaggacgaccggcaacgtctacgcctatgaggcagtggaacagctaaatatcaaggccaagaacttccgggacctgctgaccgacgagcccttctcccggcaggacatcatcaccctccaggaccccaccaatttggacaagttcaatgtctctaacttctatcatgtgaagaataacatgaaaataatagacccagatgaagagaaggccaaacaggacccgtcttattatctgaaaaatacaaatgccgagacccgagagaccctgcaggagctctacaaggagttcaaaggggacgagattctggcagccaccatgaaggccccggagaagaagaaagtggacaagctgaacgctgcccactattccacagggaaggtcagcgcttccttcacctccaccgcgatggtcccggagaccacacatgaagcagctgccatcgacgaggatgtgctgcgctaccagtttgtgaagaagaagggctacgtgcggctgcacaccaacaagggcgacctcaacctggagctgcactgcgacctgacaccaaaaacctgcgaaaacttcatcaggctttgcaagaagcattattacgatggcaccatcttccacagatccatccggaactttgtgatccaagggggcgaccccacaggcacaggcacgggtggggagtcatactgggggaagcccttcaaagacgagttccggcccaacctctcgcacacgggccgcggcatcctcagcatggccaactccgggcccaacagcaacaggtctcaattcttcatcacgtttcgctcctgtgcctacctggacaagaagcataccatctttggacgggttgttgggggctttgacgtactgacagccatggagaatgtggagagtgaccccaaaactgaccgccctaaggaggagatccgcattgatgccactacagtgttcgtggacccctatgaggaggccgatgcccagattgcgcaggagcggaagacacagctcaaggtagccccggagaccaaagtgaagagcagccagccccaggcagggagccagggcccccagaccttccgccagggcgtgggcaagtacatcaacccagcagccacgaagcgagcagcagaggaagagccctcaaccagtgccactgtccccatgtccaagaagaagcccagtcggggttttggggacttcagctcctggtagcagcaggttggccgctgtggaccttggtggggttgcagggctgggggcccatgtccacatctccatttccagcctttctagcctgccctctgctgccagccaataaattgcttgcctgctgcctgcatcccctttcctggcccctgggagcccacagccttcccatcccttaacctgttgccaagggccttggccctgtttccaggacctggcccagccagagcccactgctgggaccttcaagcacaaggcctgccctacacccaggctggtgcctcaggcctctcctctagtaggcaggccaggttagtgaggaaggactgtgtctccagattgtggtttcctctttaagacagggtcttgctctgttgcccaggctccagtgcagtggtgtgatcatggctcactgcagcctcgacctcctgggctcaagcaatcctcctgcctcagcctcgcaagtagctgggactacagccgtgcaccactacatccagctgtatatgtctggttttcttacccctacttctgtcatcttctcagggacagcctatttatacaaccagtgtggtcccctgaccaacgccattacctgggacaagttttcagaccccagacttactgagcctaagcctctgcagggtgggcttctcggtctgttttgacaaaacttcaggggcttctgaaggctggtgttggacggcagcattgagtttcctgccgtgccctgcctgagctctcagggccctgctcacctgctctggctgtgaaccacctgggcttcatctcaagcctgcctggcgtctctgtgcccctgtgagaatcttgaggggacccacactgggttgaggccagtgtctcctgctgtgagaacaagtggatgtccctctccccgccctcctgctgaagtggccttgctgctctcaggcccggccactgggctccaagactctgctcctcctgtcagtcactgactctgatggccttgggccggctgcatcagcagcccttaaagaaagacccctccctcaacccccatttttctgttaaatgtgcccctggctggctttttcttcgtcttcagcccaggccagtggtcagtgttctcatgtcatggactctccttgcctgacacttgcctcttgggctccctgttgccctcaggccaccccccacttctagttcttcacactaagccctaacttaggccttgttcttggttttctcatttttgttgccccaaatcttgaacctgtcagcaacttgcaggctgtacctctgcccttccttttctcatcaatcactgatgctgaagctgcaggcctgagccctttgtctccctggatgctgggtggcgcctcatctgcatctctgcctcaccccatccactgccacaggctgcctgatgaccactagaggtatgtctgcccctcgtcaccctgctgcacaccaatctgtggcccttcatcatgctaagaacaagaactgcgccatggctggctccttctcttctccagcccatccctctgcagcctgtcatccctgtctgtgaccattggtcgggcccctgggctctagagtgacttttgacgccctccatccctcccgccaggcactgtcctccgcaaggcctggtgcagccctggcagtaactggcttgtaagaggctcagacaccaagctgggcctgcagaggaggggcacagtaggacacagtgactgcccaggtgtccacacacctgtaggcctctgagccagcgtccagggtacaggtgcgggtggtggggatgaaggcctgaccagggagggagaagcaggtttggagaggaccctgtgcccaccctgacagacaccctggctggccctgactgactgtattctctggccacattcaagtcccccattggtgggggcagagaagtaggaccaggccatccttggctccagagctcgaagaccccaagacagccctctgctctcagcggcgccacagagagcctgggctcagccttctgcatcaggacatggcctcgtccactgagggcacgatttaaacatttgacatcagaagctttatttgtaaacctcacacagataaggaccaagggctggcggtgtggccagaggacaggggaagctgaaggccccgtgcttgagctcggcagtcctgctccttgcagtgaagccaccatgggtgaccgtccagcctcacccggtggcctgcacagtgagggaagggcttcagggccatctgctcccagggcaggggacaggccaccaaggacctttggcaaatgaaggtttacatttctgtagtttgtttgttttagagcttaatttgtagttttttagctattaaaaccatttgaatttttaacgacctgatgagggcatcaggtaaattaaaggattttgggaagattcttattttcaattctaatatctgacagatgccatcaagaataagcattaaggtataaaaaatactgtgtgtataaaacaatgccaaaccacattcctacagcaaatgcactgtgccatttataaccctgacatcacctcccaaggctctcaaggaagatttattttaaataacttaaatagaagtcctagatgatattgtttaggaatttaagagggtggtggatatggtcctgtgaatagcacttcccctgaagccagctcatggtctgttcatttggtttaaaaatgagcttgtattttgcagaagcccaacaaaaaaaaagtgataaaagtgttgttggtataaattacaaaaaaaaaaaaaaaaaaatacaaaagtcataagactactagtaaaaaatgttcaatcaatgccgtcacaaaagacagtacaaaaaccaaagtgcccaaatagaaggagcagcgaacttgcccaaaacagaaaagctctaaatagaactttagtatatacaaaaaccactcggtagagttttagaagtttcttccatgtaagtgaagcatcttgagtcactcaggacttggctgtcctcgcacccgtggcaggctggggacggcacggacctccaactgtttcccctagtccccggggcatcggaggctgggttcccacatgggagaggaatgaagactcactcaaagggaagggtcagtttaagataagttttcagtgaactccttcttccacccgggaaggtgtctttcagcctcttcacagtctcaagacaattgactgaagccacaggcattgctaacttcatgggccagcttgtgggcggagcctcttcaggcttgagaccatggcagcaagagccctgcagcgtgcagtgacccctgcgctctgggtggctgcacgcgagctcaggaggacaggatgtgctgggccagcctaaaccctcgggggagactagcgcagggataaagcagcttgcagggccatagccggatgtggaggcttccaagacagtacaaagatttccttcctttcctaagtggaagatgtgctttaaaggaacttctgcctctgtcactcctgctgagtggatgcatctcagtgccatgcccaccagggcagcggcatttcccacctgccaaggcttccaggcttgggcaaagagatggcacccaaaggcatgctgtgtgtgggcagtgagctcgagtgggcacagcccagtgcctgcctggaccgcaggtctgggtttaggaagggctgaagtcgggggaggtgtgaagctgggcaggtggccacgttcttattgtcagccagctcgcactcttgcccctagactagccttgtctgaaggcagcttcagagccacttgccaggctgagaactatccgggctcagtgctctcctatctgctgcccctcggtccccctgcctgccctctgccctgagacaagttactaaatgttgaaaaccaaacttatctgggagtggtttttgacctccatcctctgcaaagtggcctaaacccttatggggtgcccactcctggtggagggcaggtggatgagtggattgtaatttataataaaatatatggcagaaacacaggccttaggagattgcacaggcccctctatcagttcaagtgacatgggacagcaccacgcagggacgggcaacgcgtctagcaggccaggcgtcttcatgcacaaaggctaaacttgttgctttaaccttttctgaacaaattttaaacattctggcaaatgtcaagttttgaagtttttcctgtgggttctggcctctttcatatgcaaaaata

SEQ ID NO: 405438 - DNA, 5841 bp, Homo sapiens
ggaactcggctgcggctccatggtctgagttgtcagccgttgttttttcgtgctcgctagtcgccgccgccgctccgccatggggaagcgacagcaccaaaaggacaaaatatctcccacaaacaaattttcgtcgtttaccttttgaccactgcagtctctctctgcagccctttgtctacccagtctgcactcccgatggcatcgtctttgacttactgaacattgttccatggcttaagaagtacgggaccaaccccagcaatggagagaagctggacgggaggtccctgatcaagctgaacttttccaagaacagtgaggggaagtaccactgcccagtgctgtttaccgtgttcaccaacaacacccacatcgtggctgtgaggacgaccggcaacgtctacgcctatgaggcagtggaacagctaaatatcaaggccaagaacttccgggacctgctgaccgacgagcccttctcccggcaggacatcatcaccctccaggaccccaccaatttggacaagttcaatgtctctaacttctatcatgtgaagaataacatgaaaataatagacccagatgaagagaaggccaaacaggacccgtcttattatctgaaaaatacaaatgccgagacccgagagaccctgcaggagctctacaaggagttcaaaggggacgagattctggcagccaccatgaaggccccggagaagaagaaagtggacaagctgaacgctgcccactattccacagggaaggtcagcgcttccttcacctccaccgcgatggtcccggagaccacacatgaagcagctgccatcgacgaggatgtgctgcgctaccagtttgtgaagaagaagggctacgtgcggctgcacaccaacaagggcgacctcaacctggagctgcactgcgacctgacaccaaaaacctgcgaaaacttcatcaggctttgcaagaagcattattacgatggcaccatcttccacagatccatccggaactttgtgatccaagggggcgaccccacaggcacaggcacgggtggggagtcatactgggggaagcccttcaaagacgagttccggcccaacctctcgcacacgggccgcggcatcctcagcatggccaactccgggcccaacagcaacaggtctcaattcttcatcacgtttcgctcctgtgcctacctggacaagaagcataccatctttggacgggttgttgggggctttgacgtactgacagccatggagaatgtggagagtgaccccaaaactgaccgccctaaggaggagatccgcattgatgccactacagtgttcgtggacccctatgaggaggccgatgcccagattgcgcaggagcggaagacacagctcaaggtagccccggagaccaaagtgaagagcagccagccccaggcagggagccagggcccccagaccttccgccagggcgtgggcaagtacatcaacccagcagccacgaagcgagcagcagaggaagagccctcaaccagtgccactgtccccatgtccaagaagaagcccagtcggggttttggggacttcagctcctggtagcagcaggttggccgctgtggaccttggtggggttgcagggctgggggcccatgtccacatctccatttccagcctttctagcctgccctctgctgccagccaataaattgcttgcctgctgcctgcatcccctttcctggcccctgggagcccacagccttcccatcccttaacctgttgccaagggccttggccctgtttccaggacctggcccagccagagcccactgctgggaccttcaagcacaaggcctgccctacacccaggctggtgcctcaggcctctcctctagtaggcaggccaggttagtgaggaaggactgtgtctccagattgtggtttcctctttaagacagggtcttgctctgttgcccaggctccagtgcagtggtgtgatcatggctcactgcagcctcgacctcctgggctcaagcaatcctcctgcctcagcctcgcaagtagctgggactacagccgtgcaccactacatccagctgtatatgtctggttttcttacccctacttctgtcatcttctcagggacagcctatttatacaaccagtgtggtcccctgaccaacgccattacctgggacaagttttcagaccccagacttactgagcctaagcctctgcagggtgggcttctcggtctgttttgacaaaacttcaggggcttctgaaggctggtgttggacggcagcattgagtttcctgccgtgccctgcctgagctctcagggccctgctcacctgctctggctgtgaaccacctgggcttcatctcaagcctgcctggcgtctctgtgcccctgtgagaatcttgaggggacccacactgggttgaggccagtgtctcctgctgtgagaacaagtggatgtccctctccccgccctcctgctgaagtggccttgctgctctcaggcccggccactgggctccaagactctgctcctcctgtcagtcactgactctgatggccttgggccggctgcatcagcagcccttaaagaaagacccctccctcaacccccatttttctgttaaatgtgcccctggctggctttttcttcgtcttcagcccaggccagtggtcagtgttctcatgtcatggactctccttgcctgacacttgcctcttgggctccctgttgccctcaggccaccccccacttctagttcttcacactaagccctaacttaggccttgttcttggttttctcatttttgttgccccaaatcttgaacctgtcagcaacttgcaggctgtacctctgcccttccttttctcatcaatcactgatgctgaagctgcaggcctgagccctttgtctccctggatgctgggtggcgcctcatctgcatctctgcctcaccccatccactgccacaggctgcctgatgaccactagaggtatgtctgcccctcgtcaccctgctgcacaccaatctgtggcccttcatcatgctaagaacaagaactgcgccatggctggctccttctcttctccagcccatccctctgcagcctgtcatccctgtctgtgaccattggtcgggcccctgggctctagagtgacttttgacgccctccatccctcccgccaggcactgtcctccgcaaggcctggtgcagccctggcagtaactggcttgtaagaggctcagacaccaagctgggcctgcagaggaggggcacagtaggacacagtgactgcccaggtgtccacacacctgtaggcctctgagccagcgtccagggtacaggtgcgggtggtggggatgaaggcctgaccagggagggagaagcaggtttggagaggaccctgtgcccaccctgacagacaccctggctggccctgactgactgtattctctggccacattcaagtcccccattggtgggggcagagaagtaggaccaggccatccttggctccagagctcgaagaccccaagacagccctctgctctcagcggcgccacagagagcctgggctcagccttctgcatcaggacatggcctcgtccactgagggcacgatttaaacatttgacatcagaagctttatttgtaaacctcacacagataaggaccaagggctggcggtgtggccagaggacaggggaagctgaaggccccgtgcttgagctcggcagtcctgctccttgcagtgaagccaccatgggtgaccgtccagcctcacccggtggcctgcacagtgagggaagggcttcagggccatctgctcccagggcaggggacaggccaccaaggacctttggcaaatgaaggtttacatttctgtagtttgtttgttttagagcttaatttgtagttttttagctattaaaaccatttgaatttttaacgacctgatgagggcatcaggtaaattaaaggattttgggaagattcttattttcaattctaatatctgacagatgccatcaagaataagcattaaggtataaaaaatactgtgtgtataaaacaatgccaaaccacattcctacagcaaatgcactgtgccatttataaccctgacatcacctcccaaggctctcaaggaagatttattttaaataacttaaatagaagtcctagatgatattgtttaggaatttaagagggtggtggatatggtcctgtgaatagcacttcccctgaagccagctcatggtctgttcatttggtttaaaaatgagcttgtattttgcagaagcccaacaaaaaaaaagtgataaaagtgttgttggtataaattacaaaaaaaaaaaaaaaaaaatacaaaagtcataagactactagtaaaaaatgttcaatcaatgccgtcacaaaagacagtacaaaaaccaaagtgcccaaatagaaggagcagcgaacttgcccaaaacagaaaagctctaaatagaactttagtatatacaaaaaccactcggtagagttttagaagtttcttccatgtaagtgaagcatcttgagtcactcaggacttggctgtcctcgcacccgtggcaggctggggacggcacggacctccaactgtttcccctagtccccggggcatcggaggctgggttcccacatgggagaggaatgaagactcactcaaagggaagggtcagtttaagataagttttcagtgaactccttcttccacccgggaaggtgtctttcagcctcttcacagtctcaagacaattgactgaagccacaggcattgctaacttcatgggccagcttgtgggcggagcctcttcaggcttgagaccatggcagcaagagccctgcagcgtgcagtgacccctgcgctctgggtggctgcacgcgagctcaggaggacaggatgtgctgggccagcctaaaccctcgggggagactagcgcagggataaagcagcttgcagggccatagccggatgtggaggcttccaagacagtacaaagatttccttcctttcctaagtggaagatgtgctttaaaggaacttctgcctctgtcactcctgctgagtggatgcatctcagtgccatgcccaccagggcagcggcatttcccacctgccaaggcttccaggcttgggcaaagagatggcacccaaaggcatgctgtgtgtgggcagtgagctcgagtgggcacagcccagtgcctgcctggaccgcaggtctgggtttaggaagggctgaagtcgggggaggtgtgaagctgggcaggtggccacgttcttattgtcagccagctcgcactcttgcccctagactagccttgtctgaaggcagcttcagagccacttgccaggctgagaactatccgggctcagtgctctcctatctgctgcccctcggtccccctgcctgccctctgccctgagacaagttactaaatgttgaaaaccaaacttatctgggagtggtttttgacctccatcctctgcaaagtggcctaaacccttatggggtgcccactcctggtggagggcaggtggatgagtggattgtaatttataataaaatatatggcagaaacacaggccttaggagattgcacaggcccctctatcagttcaagtgacatgggacagcaccacgcagggacgggcaacgcgtctagcaggccaggcgtcttcatgcacaaaggctaaacttgttgctttaaccttttctgaacaaattttaaacattctggcaaatgtcaagttttgaagtttttcctgtgggttctggcctctttcatatgcaaaaata

SEQ ID NO: 405439 - DNA, 4964 bp, Homo sapiens
ggaactcggctgcggctccatggtctgagttgtcagccgttgttttttcgtgctcgctagtcgccgccgccgctccgccatggggaagcgacagcaccaaaaggacaaaatgtacattacctgtgctgaatacactcacttttatggtggcaagaagccagatctcccacaaacaaattttcgtcgtttaccttttgaccactgcagtctctctctgcagccctttgtctacccagtctgcactcccgatggcatcgtctttgacttactgaacattgttccatggcttaagaagtacgggaccaaccccagcaatggagagaagctggacgggaggtccctgatcaagctgaacttttccaagaacagtgaggggaagtaccactgcccagtgctgtttaccgtgttcaccaacaacacccacatcgtggctgtgaggacgaccggcaacgtctacgcctatgaggcagtggaacagctaaatatcaaggccaagaacttccgggacctgctgaccgacgagcccttctcccggcaggacatcatcaccctccaggaccccaccaatttggacaagttcaatgtctctaacttctatcatgtgaagaataacatgaaaataatagacccagatgaagagaaggccaaacaggacccgtcttattatctgaaaaatacaaatgccgagacccgagagaccctgcaggagctctacaaggagttcaaaggggacgagattctggcagccaccatgaaggccccggagaagaagaaagtggacaagctgaacgctgcccactattccacagggaaggtcagcgcttccttcacctccaccgcgatggtcccggagaccacacatgaagcagctgccatcgacgaggatgtgctgcgctaccagtttgtgaagaagaagggctacgtgcggctgcacaccaacaagggcgacctcaacctggagctgcactgcgacctgacaccaaaaacctgcgaaaacttcatcaggctttgcaagaagcattattacgatggcaccatcttccacagatccatccggaactttgtgatccaagggggcgaccccacaggcacaggcacgggtggggagtcatactgggggaagcccttcaaagacgagttccggcccaacctctcgcacacgggccgcggcatcctcagcatggccaactccgggcccaacagcaacaggtctcaattcttcatcacgtttcgctcctgtgcctacctggacaagaagcataccatctttggacgggttgttgggggctttgacgtactgacagccatggagaatgtggagagtgaccccaaaactgaccgccctaaggaggagatccgcattgatgccactacagtgttcgtggacccctatgaggaggccgatgcccagattgcgcaggagcggaagacacagctcaaggtagccccggagaccaaagtgaagagcagccagccccaggcagggagccagggcccccagaccttccgccagggcgtgggcaagtacatcaacccagcagccacgtgagtgccgcggggctggcctccctgtttcccatggtgtttcctagggctgactgaggtctgagggtcagacccagaggggcaagcaagctatgggcactggtcccggccgtgggcttgtgctgtgtggcctctgcagccgagggactgcctctgaaggcctggccggggcctctgtgggtggaagagatcaaattcagggggatgtgggagcagcaggtgggaggggttgggcctacaccgggagggctgtatggagacacagacaagtcaggaggggctgagggagggtgtgggctcccagcggcttcttctcttcccaggaagcgagcagcagaggaagagccctcaaccagtgccactgtccccatgtccaagaagaagcccagtcggggttttggggacttcagctcctggtagcagcagcaacttgcaggctgtacctctgcccttccttttctcatcaatcactgatgctgaagctgcaggcctgagccctttgtctccctggatgctgggtggcgcctcatctgcatctctgcctcaccccatccactgccacaggctgcctgatgaccactagaggtatgtctgcccctcgtcaccctgctgcacaccaatctgtggcccttcatcatgctaagaacaagaactgcgccatggctggctccttctcttctccagcccatccctctgcagcctgtcatccctgtctgtgaccattggtcgggcccctgggctctagagtgacttttgacgccctccatccctcccgccaggcactgtcctccgcaaggcctggtgcagccctggcagtaactggcttgtaagaggctcagacaccaagctgggcctgcagaggaggggcacagtaggacacagtgactgcccaggtgtccacacacctgtaggcctctgagccagcgtccagggtacaggtgcgggtggtggggatgaaggcctgaccagggagggagaagcaggtttggagaggaccctgtgcccaccctgacagacaccctggctggccctgactgactgtattctctggccacattcaagtcccccattggtgggggcagagaagtaggaccaggccatccttggctccagagctcgaagaccccaagacagccctctgctctcagcggcgccacagagagcctgggctcagccttctgcatcaggacatggcctcgtccactgagggcacgatttaaacatttgacatcagaagctttatttgtaaacctcacacagataaggaccaagggctggcggtgtggccagaggacaggggaagctgaaggccccgtgcttgagctcggcagtcctgctccttgcagtgaagccaccatgggtgaccgtccagcctcacccggtggcctgcacagtgagggaagggcttcagggccatctgctcccagggcaggggacaggccaccaaggacctttggcaaatgaaggtttacatttctgtagtttgtttgttttagagcttaatttgtagttttttagctattaaaaccatttgaatttttaacgacctgatgagggcatcaggtaaattaaaggattttgggaagattcttattttcaattctaatatctgacagatgccatcaagaataagcattaaggtataaaaaatactgtgtgtataaaacaatgccaaaccacattcctacagcaaatgcactgtgccatttataaccctgacatcacctcccaaggctctcaaggaagatttattttaaataacttaaatagaagtcctagatgatattgtttaggaatttaagagggtggtggatatggtcctgtgaatagcacttcccctgaagccagctcatggtctgttcatttggtttaaaaatgagcttgtattttgcagaagcccaacaaaaaaaaagtgataaaagtgttgttggtataaattacaaaaaaaaaaaaaaaaaaatacaaaagtcataagactactagtaaaaaatgttcaatcaatgccgtcacaaaagacagtacaaaaaccaaagtgcccaaatagaaggagcagcgaacttgcccaaaacagaaaagctctaaatagaactttagtatatacaaaaaccactcggtagagttttagaagtttcttccatgtaagtgaagcatcttgagtcactcaggacttggctgtcctcgcacccgtggcaggctggggacggcacggacctccaactgtttcccctagtccccggggcatcggaggctgggttcccacatgggagaggaatgaagactcactcaaagggaagggtcagtttaagataagttttcagtgaactccttcttccacccgggaaggtgtctttcagcctcttcacagtctcaagacaattgactgaagccacaggcattgctaacttcatgggccagcttgtgggcggagcctcttcaggcttgagaccatggcagcaagagccctgcagcgtgcagtgacccctgcgctctgggtggctgcacgcgagctcaggaggacaggatgtgctgggccagcctaaaccctcgggggagactagcgcagggataaagcagcttgcagggccatagccggatgtggaggcttccaagacagtacaaagatttccttcctttcctaagtggaagatgtgctttaaaggaacttctgcctctgtcactcctgctgagtggatgcatctcagtgccatgcccaccagggcagcggcatttcccacctgccaaggcttccaggcttgggcaaagagatggcacccaaaggcatgctgtgtgtgggcagtgagctcgagtgggcacagcccagtgcctgcctggaccgcaggtctgggtttaggaagggctgaagtcgggggaggtgtgaagctgggcaggtggccacgttcttattgtcagccagctcgcactcttgcccctagactagccttgtctgaaggcagcttcagagccacttgccaggctgagaactatccgggctcagtgctctcctatctgctgcccctcggtccccctgcctgccctctgccctgagacaagttactaaatgttgaaaaccaaacttatctgggagtggtttttgacctccatcctctgcaaagtggcctaaacccttatggggtgcccactcctggtggagggcaggtggatgagtggattgtaatttataataaaatatatggcagaaacacaggccttaggagattgcacaggcccctctatcagttcaagtgacatgggacagcaccacgcagggacgggcaacgcgtctagcaggccaggcgtcttcatgcacaaaggctaaacttgttgctttaaccttttctgaacaaattttaaacattctggcaaatgtcaagttttgaagtttttcctgtgggttctggcctctttcatatgcaaaaata

SEQ ID NO: 405440 - DNA, 5393 bp, Homo sapiens
ggagcaggtcggacgccgtatcattttcttcttccggcaggacatcatcaccctccaggaccccaccaatttggacaagttcaatgtctctaacttctatcatgtgaagaataacatgaaaataatagacccagatgaagagaaggccaaacaggacccgtcttattatctgaaaaatacaaatgccgagacccgagagaccctgcaggagctctacaaggagttcaaaggggacgagattctggcagccaccatgaaggccccggagaagaagaaagtggacaagctgaacgctgcccactattccacagggaaggtcagcgcttccttcacctccaccgcgatggtcccggagaccacacatgaagcagctgccatcgacgaggatgtgctgcgctaccagtttgtgaagaagaagggctacgtgcggctgcacaccaacaagggcgacctcaacctggagctgcactgcgacctgacaccaaaaacctgcgaaaacttcatcaggctttgcaagaagcattattacgatggcaccatcttccacagatccatccggaactttgtgatccaagggggcgaccccacaggcacaggcacgggtggggagtcatactgggggaagcccttcaaagacgagttccggcccaacctctcgcacacgggccgcggcatcctcagcatggccaactccgggcccaacagcaacaggtctcaattcttcatcacgtttcgctcctgtgcctacctggacaagaagcataccatctttggacgggttgttgggggctttgacgtactgacagccatggagaatgtggagagtgaccccaaaactgaccgccctaaggaggagatccgcattgatgccactacagtgttcgtggacccctatgaggaggccgatgcccagattgcgcaggagcggaagacacagctcaaggtagccccggagaccaaagtgaagagcagccagccccaggcagggagccagggcccccagaccttccgccagggcgtgggcaagtacatcaacccagcagccacgaagcgagcagcagaggaagagccctcaaccagtgccactgtccccatgtccaagaagaagcccagtcggggttttggggacttcagctcctggtagcagcaggttggccgctgtggaccttggtggggttgcagggctgggggcccatgtccacatctccatttccagcctttctagcctgccctctgctgccagccaataaattgcttgcctgctgcctgcatcccctttcctggcccctgggagcccacagccttcccatcccttaacctgttgccaagggccttggccctgtttccaggacctggcccagccagagcccactgctgggaccttcaagcacaaggcctgccctacacccaggctggtgcctcaggcctctcctctagtaggcaggccaggttagtgaggaaggactgtgtctccagattgtggtttcctctttaagacagggtcttgctctgttgcccaggctccagtgcagtggtgtgatcatggctcactgcagcctcgacctcctgggctcaagcaatcctcctgcctcagcctcgcaagtagctgggactacagccgtgcaccactacatccagctgtatatgtctggttttcttacccctacttctgtcatcttctcagggacagcctatttatacaaccagtgtggtcccctgaccaacgccattacctgggacaagttttcagaccccagacttactgagcctaagcctctgcagggtgggcttctcggtctgttttgacaaaacttcaggggcttctgaaggctggtgttggacggcagcattgagtttcctgccgtgccctgcctgagctctcagggccctgctcacctgctctggctgtgaaccacctgggcttcatctcaagcctgcctggcgtctctgtgcccctgtgagaatcttgaggggacccacactgggttgaggccagtgtctcctgctgtgagaacaagtggatgtccctctccccgccctcctgctgaagtggccttgctgctctcaggcccggccactgggctccaagactctgctcctcctgtcagtcactgactctgatggccttgggccggctgcatcagcagcccttaaagaaagacccctccctcaacccccatttttctgttaaatgtgcccctggctggctttttcttcgtcttcagcccaggccagtggtcagtgttctcatgtcatggactctccttgcctgacacttgcctcttgggctccctgttgccctcaggccaccccccacttctagttcttcacactaagccctaacttaggccttgttcttggttttctcatttttgttgccccaaatcttgaacctgtcagcaacttgcaggctgtacctctgcccttccttttctcatcaatcactgatgctgaagctgcaggcctgagccctttgtctccctggatgctgggtggcgcctcatctgcatctctgcctcaccccatccactgccacaggctgcctgatgaccactagaggtatgtctgcccctcgtcaccctgctgcacaccaatctgtggcccttcatcatgctaagaacaagaactgcgccatggctggctccttctcttctccagcccatccctctgcagcctgtcatccctgtctgtgaccattggtcgggcccctgggctctagagtgacttttgacgccctccatccctcccgccaggcactgtcctccgcaaggcctggtgcagccctggcagtaactggcttgtaagaggctcagacaccaagctgggcctgcagaggaggggcacagtaggacacagtgactgcccaggtgtccacacacctgtaggcctctgagccagcgtccagggtacaggtgcgggtggtggggatgaaggcctgaccagggagggagaagcaggtttggagaggaccctgtgcccaccctgacagacaccctggctggccctgactgactgtattctctggccacattcaagtcccccattggtgggggcagagaagtaggaccaggccatccttggctccagagctcgaagaccccaagacagccctctgctctcagcggcgccacagagagcctgggctcagccttctgcatcaggacatggcctcgtccactgagggcacgatttaaacatttgacatcagaagctttatttgtaaacctcacacagataaggaccaagggctggcggtgtggccagaggacaggggaagctgaaggccccgtgcttgagctcggcagtcctgctccttgcagtgaagccaccatgggtgaccgtccagcctcacccggtggcctgcacagtgagggaagggcttcagggccatctgctcccagggcaggggacaggccaccaaggacctttggcaaatgaaggtttacatttctgtagtttgtttgttttagagcttaatttgtagttttttagctattaaaaccatttgaatttttaacgacctgatgagggcatcaggtaaattaaaggattttgggaagattcttattttcaattctaatatctgacagatgccatcaagaataagcattaaggtataaaaaatactgtgtgtataaaacaatgccaaaccacattcctacagcaaatgcactgtgccatttataaccctgacatcacctcccaaggctctcaaggaagatttattttaaataacttaaatagaagtcctagatgatattgtttaggaatttaagagggtggtggatatggtcctgtgaatagcacttcccctgaagccagctcatggtctgttcatttggtttaaaaatgagcttgtattttgcagaagcccaacaaaaaaaaagtgataaaagtgttgttggtataaattacaaaaaaaaaaaaaaaaaaatacaaaagtcataagactactagtaaaaaatgttcaatcaatgccgtcacaaaagacagtacaaaaaccaaagtgcccaaatagaaggagcagcgaacttgcccaaaacagaaaagctctaaatagaactttagtatatacaaaaaccactcggtagagttttagaagtttcttccatgtaagtgaagcatcttgagtcactcaggacttggctgtcctcgcacccgtggcaggctggggacggcacggacctccaactgtttcccctagtccccggggcatcggaggctgggttcccacatgggagaggaatgaagactcactcaaagggaagggtcagtttaagataagttttcagtgaactccttcttccacccgggaaggtgtctttcagcctcttcacagtctcaagacaattgactgaagccacaggcattgctaacttcatgggccagcttgtgggcggagcctcttcaggcttgagaccatggcagcaagagccctgcagcgtgcagtgacccctgcgctctgggtggctgcacgcgagctcaggaggacaggatgtgctgggccagcctaaaccctcgggggagactagcgcagggataaagcagcttgcagggccatagccggatgtggaggcttccaagacagtacaaagatttccttcctttcctaagtggaagatgtgctttaaaggaacttctgcctctgtcactcctgctgagtggatgcatctcagtgccatgcccaccagggcagcggcatttcccacctgccaaggcttccaggcttgggcaaagagatggcacccaaaggcatgctgtgtgtgggcagtgagctcgagtgggcacagcccagtgcctgcctggaccgcaggtctgggtttaggaagggctgaagtcgggggaggtgtgaagctgggcaggtggccacgttcttattgtcagccagctcgcactcttgcccctagactagccttgtctgaaggcagcttcagagccacttgccaggctgagaactatccgggctcagtgctctcctatctgctgcccctcggtccccctgcctgccctctgccctgagacaagttactaaatgttgaaaaccaaacttatctgggagtggtttttgacctccatcctctgcaaagtggcctaaacccttatggggtgcccactcctggtggagggcaggtggatgagtggattgtaatttataataaaatatatggcagaaacacaggccttaggagattgcacaggcccctctatcagttcaagtgacatgggacagcaccacgcagggacgggcaacgcgtctagcaggccaggcgtcttcatgcacaaaggctaaacttgttgctttaaccttttctgaacaaattttaaacattctggcaaatgtcaagttttgaagtttttcctgtgggttctggcctctttcatatgcaaaaata

SEQ ID NO: 405441 - DNA, 3788 bp, Homo sapiens
ggaactcggctgcggctccatggtctgagttgtcagccgttgttttttcgtgctcgctagtcgccgccgccgctccgccatggggaagcgacagcaccaaaaggacaaaatgtacattacctgtgctgaatacactcacttttatggtggcaagaagccagatctcccacaaacaaattttcgtcgtttaccttttgaccactgcagtctctctctgcagccctttgtctacccagtctgcactcccgatggcatcgtctttgacttactgaacattgttccatggcttaagaagtacgggaccaaccccagcaatggagagaagctggacgggaggtccctgatcaagctgaacttttccaagaacagtgaggggaagtaccactgcccagtgctgtttaccgtgttcaccaacaacacccacatcgtggctgtgaggacgaccggcaacgtctacgcctatgaggcagtggaacagctaaatatcaaggccaagaacttccgggacctgctgaccgacgagcccttctcccggcaggacatcatcaccctccaggaccccaccaatttggacaagttcaatgtctctaacttctatcatgtgaagaataacatgaaaataatagacccagatgaagagaaggccaaacaggacccgtcttattatctgaaaaatacaaatgccgagacccgagagaccctgcaggagctctacaaggagttcaaaggggacgagattctggcagccaccatgaaggccccggagaagaagaaagtggacaagctgaacgctgcccactattccacagggaaggtcagcgcttccttcacctccaccgcgatggtcccggagaccacacatgaagcagctgccatcgacgaggatgtgctgcgctaccagtttgtgaagaagaagggctacgtgcggctgcacaccaacaagggcgacctcaacctggagctgcactgcgacctgacaccaaaaacctgcgaaaacttcatcaggctttgcaagaagcattattacgatggcaccatcttccacagatccatccggaactttgtgatccaagggggcgaccccacaggcacaggcacgggtggggagtcatactgggggaagcccttcaaagacgagttccggcccaacctctcgcacacgggccgcggcatcctcagcatggccaactccgggcccaacagcaacaggtctcaattcttcatcacgtttcgctcctgtgcctacctggacaagaagcataccatctttggacgggttgttgggggctttgacgtactgacagccatggagaatgtggagagtgaccccaaaactgaccgccctaaggaggagatccgcattgatgccactacagtgttcgtggacccctatgaggaggccgatgcccagattgcgcaggagcggaagacacagctcaaggtagccccggagaccaaagtgaagagcagccagccccaggcagggagccagggcccccagaccttccgccagggcgtgggcaagtacatcaacccagcagccacgaagcgagcagcagaggaagagccctcaaccagtgccactgtccccatgtccaagaagaagcccagtcggggttttggggacttcagctcctggtagcagcaggttggccgctgtggaccttggtggggttgcagggctgggggcccatgtccacatctccatttccagcctttctagcctgccctctgctgccagccaataaattgcttgcctgctgcctgcatcccctttcctggcccctgggagcccacagccttcccatcccttaacctgttgccaagggccttggccctgtttccaggacctggcccagccagagcccactgctgggaccttcaagcacaaggcctgccctacacccaggctggtgcctcaggcctctcctctagtaggcaggccaggttagtgaggaaggactgtgtctccagattgtggtttcctctttaagacagggtcttgctctgttgcccaggctccagtgcagtggtgtgatcatggctcactgcagcctcgacctcctgggctcaagcaatcctcctgcctcagcctcgcaagtagctgggactacagccgtgcaccactacatccagctgtatatgtctggttttcttacccctacttctgtcatcttctcagggacagcctatttatacaaccagtgtggtcccctgaccaacgccattacctgggacaagttttcagaccccagacttactgagcctaagcctctgcagggtgggcttctcggtctgttttgacaaaacttcaggggcttctgaaggctggtgttggacggcagcattgagtttcctgccgtgccctgcctgagctctcagggccctgctcacctgctctggctgtgaaccacctgggcttcatctcaagcctgcctggcgtctctgtgcccctgtgagaatcttgaggggacccacactgggttgaggccagtgtctcctgctgtgagaacaagtggatgtccctctccccgccctcctgctgaagtggccttgctgctctcaggcccggccactgggctccaagactctgctcctcctgtcagtcactgactctgatggccttgggccggctgcatcagcagcccttaaagaaagacccctccctcaacccccatttttctgttaaatgtgcccctggctggctttttcttcgtcttcagcccaggccagtggtcagtgttctcatgtcatggactctccttgcctgacacttgcctcttgggctccctgttgccctcaggccaccccccacttctagttcttcacactaagccctaacttaggccttgttcttggttttctcatttttgttgccccaaatcttgaacctgtcagcaacttgcaggctgtacctctgcccttccttttctcatcaatcactgatgctgaagctgcaggcctgagccctttgtctccctggatgctgggtggcgcctcatctgcatctctgcctcaccccatccactgccacaggctgcctgatgaccactagaggtatgtctgcccctcgtcaccctgctgcacaccaatctgtggcccttcatcatgctaagaacaagaactgcgccatggctggctccttctcttctccagcccatccctctgcagcctgtcatccctgtctgtgaccattggtcgggcccctgggctctagagtgacttttgacgccctccatccctcccgccaggcactgtcctccgcaaggcctggtgcagccctggcagtaactggcttgtaagaggctcagacaccaagctgggcctgcagaggaggggcacagtaggacacagtgactgcccaggtgtccacacacctgtaggcctctgagccagcgtccagggtacaggtgcgggtggtggggatgaaggcctgaccagggagggagaagcaggtttggagaggaccctgtgcccaccctgacagacaccctggctggccctgactgactgtattctctggccacattcaagtcccccattggtgggggcagagaagtaggaccaggccatccttggctccagagctcgaagaccccaagacagccctctgctctcagcggcgccacagagagcctgggctcagccttctgcatcaggacatggcctcgtccactgaggccgattacattgctcgaagcttttgtaactcccgataggccaggtggggtttggcgagacgggactgagccgtgtgctcggcgtctggggaccctgtggccgggtcc

SEQ ID NO: 405442 - DNA, 3929 bp, Homo sapiens
ggaactcggctgcggctccatggtctgagttgtcagccgttgttttttcgtgctcgctagtcgccgccgccgctccgccatggggaagcgacagcaccaaaaggacaaaatgtacattacctgtgctgaatacactcacttttatggtggcaagaagccagatctcccacaaacaaattttcgtcgtttaccttttgaccactgcagtctctctctgcagccctttgtctacccagtctgcactcccgatggcatcgtctttgacttactgaacattgttccatggcttaagaagtacgggaccaaccccagcaatggagagaagctggacgggaggtccctgatcaagctgaacttttccaagaacagtgaggggaagtaccactgcccagtgctgtttaccgtgttcaccaacaacacccacatcgtggctgtgaggacgaccggcaacgtctacgcctatgaggcagtggaacagctaaatatcaaggccaagaacttccgggacctgctgaccgacgagcccttctcccggcaggacatcatcaccctccaggaccccaccaatttggacaagttcaatgtctctaacttctatcatgtgaagaataacatgaaaataatagacccagatgaagagaaggccaaacaggacccgtcttattatctgaaaaatacaaatgccgagacccgagagaccctgcaggagctctacaaggagttcaaaggggacgagattctggcagccaccatgaaggccccggagaagaagaaagtggacaagctgaacgctgcccactattccacagggaaggtcagcgcttccttcacctccaccgcgatggtcccggagaccacacatgaagcagctgccatcgacgaggatgtgctgcgctaccagtttgtgaagaagaagggctacgtgcggctgcacaccaacaagggcgacctcaacctggagctgcactgcgacctgacaccaaaaacctgcgaaaacttcatcaggctttgcaagaagcattattacgatggcaccatcttccacagatccatccggaactttgtgatccaagggggcgaccccacaggcacaggcacgggtggggagtcatactgggggaagcccttcaaagacgagttccggcccaacctctcgcacacgggccgcggcatcctcagcatggccaactccgggcccaacagcaacaggtctcaattcttcatcacgtttcgctcctgtgcctacctggacaagaagcataccatctttggacgggttgttgggggctttgacgtactgacagccatggagaatgtggagagtgaccccaaaactgaccgccctaaggaggagatccgcattgatgccactacagtgttcgtggacccctatgaggaggccgatgcccagattgcgcaggagcggaagacacagctcaaggtagccccggagaccaaagtgaagagcagccagccccaggcagggaaagcaggtttggagaggaccctgtgcccaccctgacagacaccctggctggccctgactgactgtattctctggccacattcaagtcccccattggtgggggcagagaagtaggaccaggccatccttggctccagagctcgaagaccccaagacagccctctgctctcagcggcgccacagagagcctgggctcagccttctgcatcaggacatggcctcgtccactgagggcacgatttaaacatttgacatcagaagctttatttgtaaacctcacacagataaggaccaagggctggcggtgtggccagaggacaggggaagctgaaggccccgtgcttgagctcggcagtcctgctccttgcagtgaagccaccatgggtgaccgtccagcctcacccggtggcctgcacagtgagggaagggcttcagggccatctgctcccagggcaggggacaggccaccaaggacctttggcaaatgaaggtttacatttctgtagtttgtttgttttagagcttaatttgtagttttttagctattaaaaccatttgaatttttaacgacctgatgagggcatcaggtaaattaaaggattttgggaagattcttattttcaattctaatatctgacagatgccatcaagaataagcattaaggtataaaaaatactgtgtgtataaaacaatgccaaaccacattcctacagcaaatgcactgtgccatttataaccctgacatcacctcccaaggctctcaaggaagatttattttaaataacttaaatagaagtcctagatgatattgtttaggaatttaagagggtggtggatatggtcctgtgaatagcacttcccctgaagccagctcatggtctgttcatttggtttaaaaatgagcttgtattttgcagaagcccaacaaaaaaaaagtgataaaagtgttgttggtataaattacaaaaaaaaaaaaaaaaaaatacaaaagtcataagactactagtaaaaaatgttcaatcaatgccgtcacaaaagacagtacaaaaaccaaagtgcccaaatagaaggagcagcgaacttgcccaaaacagaaaagctctaaatagaactttagtatatacaaaaaccactcggtagagttttagaagtttcttccatgtaagtgaagcatcttgagtcactcaggacttggctgtcctcgcacccgtggcaggctggggacggcacggacctccaactgtttcccctagtccccggggcatcggaggctgggttcccacatgggagaggaatgaagactcactcaaagggaagggtcagtttaagataagttttcagtgaactccttcttccacccgggaaggtgtctttcagcctcttcacagtctcaagacaattgactgaagccacaggcattgctaacttcatgggccagcttgtgggcggagcctcttcaggcttgagaccatggcagcaagagccctgcagcgtgcagtgacccctgcgctctgggtggctgcacgcgagctcaggaggacaggatgtgctgggccagcctaaaccctcgggggagactagcgcagggataaagcagcttgcagggccatagccggatgtggaggcttccaagacagtacaaagatttccttcctttcctaagtggaagatgtgctttaaaggaacttctgcctctgtcactcctgctgagtggatgcatctcagtgccatgcccaccagggcagcggcatttcccacctgccaaggcttccaggcttgggcaaagagatggcacccaaaggcatgctgtgtgtgggcagtgagctcgagtgggcacagcccagtgcctgcctggaccgcaggtctgggtttaggaagggctgaagtcgggggaggtgtgaagctgggcaggtggccacgttcttattgtcagccagctcgcactcttgcccctagactagccttgtctgaaggcagcttcagagccacttgccaggctgagaactatccgggctcagtgctctcctatctgctgcccctcggtccccctgcctgccctctgccctgagacaagttactaaatgttgaaaaccaaacttatctgggagtggtttttgacctccatcctctgcaaagtggcctaaacccttatggggtgcccactcctggtggagggcaggtggatgagtggattgtaatttataataaaatatatggcagaaacacaggccttaggagattgcacaggcccctctatcagttcaagtgacatgggacagcaccacgcagggacgggcaacgcgtctagcaggccaggcgtcttcatgcacaaaggctaaacttgttgctttaaccttttctgaacaaattttaaacattctggcaaatgtcaagttttgaagtttttcctgtgggttctggcctctttcatatgcaaaaata

SEQ ID NO: 405443 - DNA, 3628 bp, Homo sapiens
  misc_feature (96)..(96): n is a, c, g, or t
gggctgcaggaattcggcacgagtgggcctgcagaggaggggcacagtaggacacagtgactgcccaggtgtccacacacctgtaggcctctgagncagcgtccagggtacaggtgcgggtggtggggatgaaggcctgaccagggagggagaagcaggtttggagaggaccctgtgcccaccccaacagcaacaggtctcaattcttcatcacgtttcgctcctgtgcctacctggacaagaagcataccatctttggacgggttgttgggggctttgacgtactgacagccatggagaatgtggagagtgaccccaaaactgaccgccctaaggaggagatccgcattgatgccactacagtgttcgtggacccctatgaggaggccgatgcccagattgcgcaggagcggaagacacagctcaaggtagccccggagaccaaagtgaagagcagccagccccaggcagggagccagggcccccagaccttccgccagggcgtgggcaagtacatcaacccagcagccacgaagcgagcagcagaggaagagccctcaaccagtgccactgtccccatgtccaagaagaagcccagtcggggttttggggacttcagctcctggtagcagcagcaacttgcaggctgtacctctgcccttccttttctcatcaatcactgatgctgaagctgcaggcctgagccctttgtctccctggatgctgggtggcgcctcatctgcatctctgcctcaccccatccactgccacaggctgcctgatgaccactagaggtatgtctgcccctcgtcaccctgctgcacaccaatctgtggcccttcatcatgctaagaacaagaactgcgccatggctggctccttctcttctccagcccatccctctgcagcctgtcatccctgtctgtgaccattggtcgggcccctgggctctagagtgacttttgacgccctccatccctcccgccaggcactgtcctccgcaaggcctggtgcagccctggcagtaactggcttgtaagaggctcagacaccaagctgggcctgcagaggaggggcacagtaggacacagtgactgcccaggtgtccacacacctgtaggcctctgagccagcgtccagggtacaggtgcgggtggtggggatgaaggcctgaccagggagggagaagcaggtttggagaggaccctgtgcccaccctgacagacaccctggctggccctgactgactgtattctctggccacattcaagtcccccattggtgggggcagagaagtaggaccaggccatccttggctccagagctcgaagaccccaagacagccctctgctctcagcggcgccacagagagcctgggctcagccttctgcatcaggacatggcctcgtccactgagggcacgatttaaacatttgacatcagaagctttatttgtaaacctcacacagataaggaccaagggctggcggtgtggccagaggacaggggaagctgaaggccccgtgcttgagctcggcagtcctgctccttgcagtgaagccaccatgggtgaccgtccagcctcacccggtggcctgcacagtgagggaagggcttcagggccatctgctcccagggcaggggacaggccaccaaggacctttggcaaatgaaggtttacatttctgtagtttgtttgttttagagcttaatttgtagttttttagctattaaaaccatttgaatttttaacgacctgatgagggcatcaggtaaattaaaggattttgggaagattcttattttcaattctaatatctgacagatgccatcaagaataagcattaaggtataaaaaatactgtgtgtataaaacaatgccaaaccacattcctacagcaaatgcactgtgccatttataaccctgacatcacctcccaaggctctcaaggaagatttattttaaataacttaaatagaagtcctagatgatattgtttaggaatttaagagggtggtggatatggtcctgtgaatagcacttcccctgaagccagctcatggtctgttcatttggtttaaaaatgagcttgtattttgcagaagcccaacaaaaaaaaagtgataaaagtgttgttggtataaattacaaaaaaaaaaaaaaaaaaatacaaaagtcataagactactagtaaaaaatgttcaatcaatgccgtcacaaaagacagtacaaaaaccaaagtgcccaaatagaaggagcagcgaacttgcccaaaacagaaaagctctaaatagaactttagtatatacaaaaaccactcggtagagttttagaagtttcttccatgtaagtgaagcatcttgagtcactcaggacttggctgtcctcgcacccgtggcaggctggggacggcacggacctccaactgtttcccctagtccccggggcatcggaggctgggttcccacatgggagaggaatgaagactcactcaaagggaagggtcagtttaagataagttttcagtgaactccttcttccacccgggaaggtgtctttcagcctcttcacagtctcaagacaattgactgaagccacaggcattgctaacttcatgggccagcttgtgggcggagcctcttcaggcttgagaccatggcagcaagagccctgcagcgtgcagtgacccctgcgctctgggtggctgcacgcgagctcaggaggacaggatgtgctgggccagcctaaaccctcgggggagactagcgcagggataaagcagcttgcagggccatagccggatgtggaggcttccaagacagtacaaagatttccttcctttcctaagtggaagatgtgctttaaaggaacttctgcctctgtcactcctgctgagtggatgcatctcagtgccatgcccaccagggcagcggcatttcccacctgccaaggcttccaggcttgggcaaagagatggcacccaaaggcatgctgtgtgtgggcagtgagctcgagtgggcacagcccagtgcctgcctggaccgcaggtctgggtttaggaagggctgaagtcgggggaggtgtgaagctgggcaggtggccacgttcttattgtcagccagctcgcactcttgcccctagactagccttgtctgaaggcagcttcagagccacttgccaggctgagaactatccgggctcagtgctctcctatctgctgcccctcggtccccctgcctgccctctgccctgagacaagttactaaatgttgaaaaccaaacttatctgggagtggtttttgacctccatcctctgcaaagtggcctaaacccttatggggtgcccactcctggtggagggcaggtggatgagtggattgtaatttataataaaatatatggcagaaacacaggccttaggagattgcacaggcccctctatcagttcaagtgacatgggacagcaccacgcagggacgggcaacgcgtctagcaggccaggcgtcttcatgcacaaaggctaaacttgttgctttaaccttttctgaacaaattttaaacattctggcaaatgtcaagttttgaagtttttcctgtgggttctggcctctttcatatgcaaaaata

SEQ ID NO: 405444 - DNA, 2767 bp, Homo sapiens
ggaactcggctgcggctccatggtctgagttgtcagccgttgttttttcgtgctcgctagtcgccgccgccgctccgccatggggaagcgacagcaccaaaaggacaaaatgtacattacctgtgctgaatacactcacttttatggtggcaagaagccagatctcccacaaacaaattttcgtcgtttaccttttgaccactgcagtctctctctgcagccctttgtctacccagtctgcactcccgatggcatcgtctttgacttactgaacattgttccatggcttaagaagtacgggaccaaccccagcaatggagagaagctggacgggaggtccctgatcaagctgaacttttccaagaacagtgaggggaagtaccactgcccagtgctgtttaccgtgttcaccaacaacacccacatcgtggctgtgaggacgaccggcaacgtctacgcctatgaggcagtggaacagctaaatatcaaggccaagaacttccgggacctgctgaccgacgagcccttctcccggcaggacatcatcaccctccaggaccccaccaatttggacaagttcaatgtctctaacttctatcatgtgaagaataacatgaaaataatagacccagatgaagagaaggccaaacaggacccgtcttattatctgaaaaatacaaatgccgagacccgagagaccctgcaggagctctacaaggagttcaaaggggacgagattctggcagccaccatgaaggccccggagaagaagaaagtggacaagctgaacgctgcccactattccacagggaaggtcagcgcttccttcacctccaccgcgatggtcccggagaccacacatgaagcagctgccatcgacgaggatgtgctgcgctaccagtttgtgaagaagaagggctacgtgcggctgcacaccaacaagggcgacctcaacctggagctgcactgcgacctgacaccaaaaacctgcgaaaacttcatcaggctttgcaagaagcattattacgatggcaccatcttccacagatccatccggaactttgtgatccaagggggcgaccccacaggcacaggcacgggtggggagtcatactgggggaagcccttcaaagacgagttccggcccaacctctcgcacacgggccgcggcatcctcagcatggccaactccgggcccaacagcaacaggtctcaattcttcatcacgtttcgctcctgtgcctacctggacaagaagcataccatctttggacgggttgttgggggctttgacgtactgacagccatggagaatgtggagagtgaccccaaaactgaccgccctaaggaggagatccgcattgatgccactacagtgttcgtggacccctatgaggaggccgatgcccagattgcgcaggagcggaagacacagctcaaggtagccccggagaccaaagtgaagagcagccagccccaggcagggagccagggcccccagaccttccgccagggcgtgggcaagtacatcaacccagcagccacgaagcgagcagcagaggaagagccctcaaccagtgccactgtccccatgtccaagaagaagcccagtcggggttttggggacttcagctcctggtagcagcagcaacttgcaggctgtacctctgcccttccttttctcatcaatcactgatgctgaagctgcaggcctgagccctttgtctccctggatgctgggtggcgcctcatctgcatctctgcctcaccccatccactgccacaggctgcctgatgaccactagaggtatgtctgcccctcgtcaccctgctgcacaccaatctgtggcccttcatcatgctaagaacaagaactgcgccatggctggctccttctcttctccagcccatccctctgcagcctgtcatccctgtctgtgaccattggtcgggcccctgggctctagagtgacttttgacgccctccatccctcccgccaggcactgtcctccgcaaggcctggtgcagccctggcagtaactggcttgtaagaggctcagacaccaagctgggcctgcagaggaggggcacagtaggacacagtgactgcccaggtgtccacacacctgtaggcctctgagccagcgtccagggtacaggtgcgggtggtggggatgaaggcctgaccagggagggagaagcaggtttggagaggaccctgtgcccaccctgacagacaccctggctggccctgactgactgtattctctggccacattcaagtcccccattggtgggggcagagaagtaggaccaggccatccttggctccagagctcgaagaccccaagacagccctctgctctcagcggcgccacagagagcctgggctcagccttctgcatcaggacatggcctcgtccactgagggcacgatttaaacatttgacatcagaagctttatttgtaaacctcacacagataaggaccaagggctggcggtgtggccagaggacaggggaagctgaaggccccgtgcttgagctcggcagtcctgctccttgcagtgaagccaccatgggtgaccgtccagcctcacccggtggcctgcacagtgagggaagggcttcagggccatctgctcccagggcaggggacaggccaccaaggacctttggcaaatgaaggtttacatttctgtagtttgtttgttttagagcttaatttgtagttttttagctattaaaaccatttgaatttttaacg

SEQ ID NO: 405445 - DNA, 839 bp, Homo sapiens
ggaactcggctgcggctccatggtctgagttgtcagccgttgttttttcgtgctcgctagtcgccgccgccgctccgccatggggaagcgacagcaccaaaaggacaaaatgtacattacctgtgctgaatacactcacttttatggtggcaagaagccagatctcccacaaacaaattttcgtcgtttaccttttgaccactgcagtctctctctgcagccctttgtctacccagtctgcactcccgatggcatcgtctttgacttactgaacattgttccatggcttaagaagtacgggaccaaccccagcaatggagagaagctggacgggaggtccctgatcaagctgaacttttccaagaacagtgaggggaagtaccactgcccagtgctgtttaccgtgttcaccaacaacacccacatcgtggctgtgaggacgaccggcaacgtctacgcctatgaggcagtggaacagctaaatatcaaggccaagaacttccgggacctgctgaccgacgagcccttctcccggcaggacatcatcaccctccaggaccccaccaatttggacaagttcaatgtctctaacttctatcatgtgaagaataacatgaaaataatagacccagatgaagagaaggccaaacaggacccgtcttattatctgaaaaatacaaatgcccaagtaaatactaccgtatggccaccataattgaacccccataactccttacactattcctcatcgacccaagttaaaaaatattaaacagcaaaagtagcagctagctcacctcaaaccagaaggcccatgaacaaaaagaaagacaagaaac

SEQ ID NO: 405446 - DNA, 833 bp, Homo sapiens
ggaactcggctgcggctccatggtctgagttgtcagccgttgttttttcgtgctcgctagtcgccgccgccgctccgccatggggaagcgacagcaccaaaaggacaaaatgtacattacctgtgctgaatacactcacttttatggtggcaagaagccaggtaaggcatgcagtctttctgttccccgttgggggagtggtattaaggaactgtgtcttcaggatacagtgagctgtaaaaatagacaacaagaacacggaaactatggtagacgaatgggctgaggacacagttcatgaaagagaaatatactcaagatagaagaacctgcttcatcttagtggtgatttttgtaaaatgtaatttaaaatattccccgatgctgggagctaagtaaaaaataaataagtaaataaaatacaaaattacatgtacatttaaatgttttttctctatcaagtttataaggaataaaaagaatgataatattttcagctgtcaaaactatcaagactacaataacaagagcactgtcataattttaatggaagtaaaaagtatgcacttttcccaatctcccacaaacaaattttcgtcgtttaccttttgaccactgcagtctctctctgcagccctttgtctacccagtctgcactcccgatggcatcgtctttgacttactgaacattgttccatggcttaagaagtacgggaccaaccccagcaatggagaggtactctttggggttcccaaacttgtcgattgtgctggcccccacacccacaaagtctgatctggcagttagccacgctgttagggcttacatcagg

SEQ ID NO: 405447 - DNA, 374 bp, Homo sapiens
tgaataatattaatccagcccctcaaggcagtcatctgtcttagagctattggaatcctggatcattgtgggaaatgaaagatacttcgatggaatcagcagccattgatccaatgccaactccaagactggaacgtcgcaatgatagttccaaggcggaaatttgacgtaattcttttcgacacagttttacaggtctggatgcccattttaattcttctgaaagcatgcctcctccttctggcttcaggactccatctccagcctcttgatctaaaaataatccccaaaccaaaaaattagatactatttcctcaaaattaggtattttaatcaaaacatcttaacataaatacattattatcacccaatat

SEQ ID NO: 405448 - DNA, 1243 bp, Homo sapiens
atcttcatccattagggtatctgagaataggcttggcatctgtggcatccttgtggacagggttcacatctgtgagaatggggctttgtctctgggatgtcaaagcggagggctggaaaatggcaaggggcatctggcacataggcgctccatgccattggtacccaggtggtcttaggagacagacacacaccagtacctaatgacaggatgagccaatcttggacctgcaaagggcacacagttgagctggggagatggataggtaaattgcagttaagagaaagtgtacttggaggagagtttctgaaaggaaggagcagggtctgtataatgtgcccttaagatctttctttcttgagtttccttgtcgcctgctcacgttcatggattagagtgagtccactcaagatcacctccaagaagccttcctgaccccccatctgatttagatgtctcagctctgagtttccatgacaccttgctcttaccattcctcccactgcactgtaattggcaaaagagagacccgaaacagcaccaggcatttcttactgggcccaaacaagggcaggagatgctgcctctgggggatttgtgtgtttattccaggcatgggaaggacaactgtggggcccacaggctgagtgaaccctcaagactgagcctcccatgactggtgccctgcagatcagcctgggccgtgactttccagcagggaaggatgtgtgatcagctgacggggtattatctttcattgtaaatgagtaaaatgacatcagtctcctgtgaggatggggcatgcgagtcacccagagtctcttaaatcccggactcactggacctgcagtgctaaagagcagagcacgggactgacacgtctctccagaacatctctccatcttaaactcacacacacacacacgcaaaacaacttttgctttttaaaatacaagtcatgccaagcacagtggctcacgcatataatcccaacactttgagaagccgagacgagaggatcacttcaggaatttaagaccagcctgggcaacaaagtgagaccctggctctacaaaaaactagccaggtatggtggcatgtgcctagggtctcagctacatgagaggctgaggcaggaagcagcactgtttgaagccaggaggtcgagctgcagtaagtcatgatcataccactgtactctagcctgggctggagtgagacccagagtgagactcggtctcag

SEQ ID NO: 405449 - DNA, 852 bp, Homo sapiens
atcttcatccattagggtatctgagaataggcttggcatctgtggcatccttgtggacagggttcacatctgtgagaatggggctttgtctctgggatgtcaaagcggagggctggaaaatggcaaggggcatctggcacataggcgctccatgccattggtacccaggtggtcttaggagacagacacacaccagtacctaatgacaggatgagccaatcttggacctgcaaagggcacacagttgagctggggagatggataggtaaattgcagttaagagaaagtgtacttggaggagagtttctgaaaggaaggagcagggtctgtataatgtgcccttaagatctttctttcttgagtttccttgtcgcctgctcacgttcatggattagagtgagtccactcaagatcacctccaagaagccttcctgaccccccatctgatttagatgtctcagctctgagtttccatgacaccttgctcttaccattcctcccactgcactgtaattggcaaaagagagacccgaaacagcaccaggcatttcttactgggcccaaacaagggcaggagatgctgcctctgggggatttgtgtgtttattccaggcatgggaaggacaactgtggggcccacaggctgagtgaaccctcaagactgagcctcccatgactggtgccctgcagatcagcctgggccgtgactttccagcagggaaggatgtgtgatcagctgaggcaggaagcagcactgtttgaagccaggaggtcgagctgcagtaagtcatgatcataccactgtactctagcctgggctggagtgagacccagagtgagactcggtctcag

SEQ ID NO: 405450 - DNA, 441 bp, Homo sapiens
ttatctataaattggaagctataatatttattccatcttgaacaacctagagaaatgaatgtttgcttcatttaattttttttgttttgagatggagcctcactctgtcacttaggctggagtgtagtagcatgatctcggctcactgcaacctctgcctcccagactcaagtgattttcctgccttggcctccttaaatgttggggttacaggcatgagccactgtgcccagcctgcaataatattttgataggaatctttttttctgaggggtaggtatcaataatgagcttaacatattcagcaaactgtagggtaaacagatatgctgtcatccaggctttgttgttccctttatagaacacaggcagagtagatttcgcataattttttttttaagagacaagatctctctccgttgcccagactggagtgcagtg

SEQ ID NO: 405451 - DNA, 895 bp, Homo sapiens
gaggtcaggagttggagaccatcctgggcaacttagcaagatccctatctcttaaaaaaaaaaaaaaaaggaagaagaagaaaaagcaaatgtaaacagcatgactacctctaaggctgagggagaacatccaagggagtaacagacttggaagagatctcaaccctgaggctaaaattcagacccccttggagaggacggggctgtagctagatggcagagaaattatatgtgtaaatgacagaggaattcactggagtgctgcagatagaggtggtggtgcagctgcaggtggggatggtgagctggaagccatctactggggtgaggtggaagcttattggagagtgagtgccaatggaactccataggtgacaccataagaacaaaatctacaacaaggagatctaggaagggcagctactgcctctctgctatgcctgcagtgtctctctagtgccctctgctgataagcctaacattgcaccagctggcaaatgagaaatgttcatgggatccagatccagatcagttaactccaaacaagaaaaagaaagattgctttggactaaggagcaataaattgataactggcacagtgttaccctcccttttttgtttttgtttttccattcacggctatactgtcaatatccattcatgctctatatgtatgattattggacattctatttttatacactccctggttttcttttcctttcattgttttggggctattttatagctctgaaagttgtagaaaactaataacaatgtaaaagatttttagttcatagaaatgaaaattatttgtgtctggtggaatatagtagattaaccaccctgtggttagaccattttccatcttttaaataaatgcattctagcattc

SEQ ID NO: 405452 - DNA, 1150 bp, Homo sapiens
cggccgcaacgcgcgcaggcggcggccgagtgcgcaggggccgcgcgcgcccgtcgctcgctagctggctggcaagctcagcacgccggctgcccgggacgccccgaggccacgccctccgcgcgaggccccgcccccacccccacctcccgagctgcggtaccgggttccgccccggcccgcgccctctagctggcgccacccaagcggcaagggacgtcgcggccctcccgggattggtgggaggatcgtgggggagcggcagctcaggacggaatacggcaatgaccgccccggtcgcgagggtgaccctgccccgggctgctgtgggggcgcaagaaccctttcactttacggcgagattaagctcagggtcaagttctgagcaaaaagtgtcaaggagcctttttgcaacctcctataatattgaaacagattctgtgccctttaaaggagataataactaacatctggggagcgctttacaatttagaaaaggcctttcacacacaggcctgtttcatcttcacaacaatcttataaaacagatatattgttcccatttcccaaataatgaaacggaagcgccgaaaagtaagtattgtgctcaatgtcacaggctactaagtggcatgggaaaccaggtctcctgaatctagcctccgggtttctgctctccaccagcccaacctcagaaaattctaataggtgcagggggctttggcaaatagacccatgggaagaaggggaaacttatgtctagttaagtcgctgcccgattcctgctgtaaacataccaaggaaagcaacaggctgtcttcattgtgttgtcgcaccttccttcctgaaagggacgcagaaagattacatcaaatggcccagatgagatttcgccgacagtattttatggtttaaaatgggtgaaattatttggatgaagaaaagcgccttacttaaatttaatatgatgtgtaatgtaaattggtataatgtgtgaaaataagcccctccctgccttctctgccttttctctttttaattttgtttgtctctactgctctgctcaactcttttattgtccacataattgaaaacctaattgatggatatttgcatttccaaattaaacctttggctacttgacttaatt

SEQ ID NO: 405453 - DNA, 598 bp, Homo sapiens
taacagagactggttcaagggagattcggacacatctccacctccaaagccaagtgccttcccgggatgatctgcataacaatttgcgggtgctggtggtggagaagctccgggaagagaaaactagccggacggtatcgaaccgcccgcaggcccgtcgcagctccattaatgcaactaccattacactaaggctggagtacaatggcaccatctcagctcgccgcaacctccacctcctgggttcaagcgattctcctgcctcagcctcccgagtagctgggattacaggttccaagtctcttcttcggcctctcaaacatggtaccatccctaatgaagtcaacgggtccagcatgacaggatggaagtacaagtgtcagcacctatgtgagtcccaagaggggaaattagaaacaaaaaggaagaagaggacataggccaggcacggcggctcacgcctgtaatcccaacactttgggaggccaaggtgggcagatcacctgaggtcaggagttcaagaccagcctggtcaacatggcaaaagcccatctctactaaaaaatacaaaaaattagccaggcgtggtggtgggagc

SEQ ID NO: 405454 - DNA, 1106 bp, Homo sapiens
cggccgcaacgcgcgcaggcggcggccgagtgcgcaggggccgcgcgcgcccgtcgctcgctagctggctggcaagctcagcacgccggctgcccgggacgccccgaggccacgccctccgcgcgaggccccgcccccacccccacctcccgagctgcggtaccgggttccgccccggcccgcgccctctagctggcgccacccaagcggcaagggacgtcgcggccctcccgggattggtgggaggatcgtgggggagcggcagctcaggacggaatacggcaatgaccgccccggtcgcgagggtgaccctgccccgggctgctgtgggggcgcaagaaccctttcactttacggcgagattaagctcagggtcaagttctgagcaaaaagtgtcaaggagcctttttgcaacctcctataatattgaaacagattctgtgccctttaaaggagataataactaacatctggggagcgctttacaatttagaaaaggcctttcacacacaggcctgtttcatcttcacaacaatcttataaaacagatatattgttcccatttcccaaataatgaaacggaagcgccgaaaatatctcctatagggctcttcaaactgtggtcaacttagtaaatgatgttgacagtggaagtgtgatcattttattttcctgcctttggaattgaagattgtaattttgcaaaaattttgttgaagatgatgtagctttggttcagagagttccaagtctcttcttcggcctctcaaacatggtaccatccctaatgaagtcaacgggtccagcatgacaggatggaagtacaagtgtcagcacctatggatcatacccagattgccctcagttccaataatcaccaagtgcacatctataagaagaacggagccgggcgctgtggctcacgcctataattccagcactttgagaggcctcggcaggtggatcacgagatcaggagttcaagaccagcctggccaagatggtgaaaccccatctctactaaaaatacaaaaattagccaggcatggtgtggcgggcgcctgtaatcccagctacccgggaggctgaggcaggagaattgctgg

SEQ ID NO: 405455 - DNA, 379 bp, Homo sapiens
tatctcctatagggctcttcaaactgtggtcaacttagtaaatgatgttgacagtggaagtgtgatcattttattttcctgcctttggaattgaagattgtaattttgcaaaaattttgttgaagatgatgtagctttggttcagagagtaagtcattccatttatatcaatattcttaaggcaatgtgctaggtgacgagccatattgatgacaaagacagagctcctattttcatgacattccagtgtggtggcagaaacaagcaagtaaataattccagtacacacttctgttgatttatttcgtgaatggtgactggctatttaaaaagactaaatcaaattaattttctgataatgaataaaaaaggatagcca

SEQ ID NO: 405456 - DNA, 1166 bp, Homo sapiens
cggccgcaacgcgcgcaggcggcggccgagtgcgcaggggccgcgcgcgcccgtcgctcgctagctggctggcaagctcagcacgccggctgcccgggacgccccgaggccacgccctccgcgcgaggccccgcccccacccccacctcccgagctgcggtaccgggttccgccccggcccgcgccctctagctggcgccacccaagcggcaagggacgtcgcggccctcccgggattggtgggaggatcgtgggggagcggcagctcaggacggaatacggcaatgaccgccccggtcgcgagggtgaccctgccccgggctgctgtgggggcgcaagaaccctttcactttacggcgagattaagctcagggtcaagttctgagcaaaaagtgtcaaggagcctttttgcaacctcctataatattgaaacagattctgtgccctttaaaggagataataactaacatctggggagcgctttacaatttagaaaaggcctttcacacacaggcctgtttcatcttcacaacaatcttataaaacagatatattgttcccatttcccaaataatgaaacggaagcgccgaaaatatctcctatagggctcttcaaactgtggtcaacttagtaaatgatgttgacagtggaagtgtgatcattttattttcctgcctttggaattgaagattgtaattttgcaaaaattttgttgaagatgatgtagctttggttcagagatttcactcttgttccccaggctggagtacaatggcaccatctcagctcgccgcaacctccacctcctgggttcaagcgattctcctgcctcagcctcccgagtagctgggattacaggttccaagtctcttcttcggcctctcaaacatggtaccatccctaatgaagtcaacgggtccagcatgacaggatggaagtacaagtgtcagcacctatgtgagtcccaagaggggaaattagaaacaaaaaggaagaagaggacataggccaggcacggcggctcacgcctgtaatcccaacactttgggaggccaaggtgggcagatcacctgaggtcaggagttcaagaccagcctggtcaacatggcaaaagcccatctctactaaaaaatacaaaaaattagccaggcgtggtggtgggagc

SEQ ID NO: 405457 - DNA, 1365 bp, Homo sapiens
cggccgcaacgcgcgcaggcggcggccgagtgcgcaggggccgcgcgcgcccgtcgctcgctagctggctggcaagctcagcacgccggctgcccgggacgccccgaggccacgccctccgcgcgaggccccgcccccacccccacctcccgagctgcggtaccgggttccgccccggcccgcgccctctagctggcgccacccaagcggcaagggacgtcgcggccctcccgggattggtgggaggatcgtgggggagcggcagctcaggacggaatacggcaatgaccgccccggtcgcgagggtgaccctgccccgggctgctgtgggggcgcaagaaccctttcactttacggcgagattaagctcagggtcaagttctgagcaaaaagtgtcaaggagcctttttgcaacctcctataatattgaaacagattctgtgccctttaaaggagataataactaacatctggggagcgctttacaatttagaaaaggcctttcacacacaggcctgtttcatcttcacaacaatcttataaaacagatatattgttcccatttcccaaataatgaaacggaagcgccgaaaatatctcctatagggctcttcaaactgtggtcaacttagtaaatgatgttgacagtggaagtgtgatcattttattttcctgcctttggaattgaagattgtaattttgcaaaaattttgttgaagatgatgtagctttggttcagagagttccaagtctcttcttcggcctctcaaacatggtaccatccctaatgaagtcaacgggtccagcatgacaggatggaagtacaagtgtcagcacctatgtgacaccataagaacaaaatctacaacaaggagatctaggaagggcagctactgcctctctgctatgcctgcagtgtctctctagtgccctctgctgataagcctaacattgcaccagctggcaaatgagaaatgttcatgggatccagatccagatcagttaactccaaacaagaaaaagaaagattgctttggactaaggagcaataaattgataactggcacagtgttaccctcccttttttgtttttgtttttccattcacggctatactgtcaatatccattcatgctctatatgtatgattattggacattctatttttatacactccctggttttcttttcctttcattgttttggggctattttatagctctgaaagttgtagaaaactaataacaatgtaaaagatttttagttcatagaaatgaaaattatttgtgtctggtggaatatagtagattaaccaccctgtggttagaccattttccatcttttaaataaatgcattctagcattc

SEQ ID NO: 405458 - DNA, 318 bp, Homo sapiens
ctagctcacccttggcatttaataattttataaaatttcagctgatttttaaattttctttcatggaagctgttgagtagccccttatttccctaattctttgactcagataagactattcttctgttttatctcttattatagaggtatgttcctctttggaatttaagtaatttggttggactgcaacctcaggtatctaatgtgctcaaaaaagttataattttatgggtttttttttttttgtctttatctcattgttagaatgggaacaatgttcttttcagctttctacatcttagccagaaacagaaatct

SEQ ID NO: 405459 - DNA, 744 bp, Homo sapiens
tcacactggctgttgtcagcggcctctgaggtttcaggctcttggcggtgaaggtcagagtgcagacctgagaccactgctcaccgacttcagactccagtttatctgtgccccagcttcctcacttagtctcagaagacttaggctgaggcctcagaaggagatctccatcctttgtccagagcagaacaggatggccatgtcccaggaatcattgaccttcaaggacgtgtttgtggacttcaccctggaggagtggcagcaactggactctgcccagaagaacctctacagggatgtcatgcttgagaactacagccacctggtgtccgtggggtatctagttgcgaagccagatgtgatcttcaggttgggaccaggtgaagagtcctggatggcagatggggggaccccggtacggacctgtgcaggtgaggagtacagtccttcagagattccagctgaaagcctgtggtatttaacaaggcccatcatcactggtggaatctgaacttcaagtctgatttccttggcacataattttctactaaaagctctgcacctggctgctgtgaatttccaaatctatcccaagtccctgtgtgtcacagtacaatccattaggatttggaagctgtattaatccattttcatgctgctgataaagacagacccgagactgagcaatttacaaaacaaagaggtttaatggacttacagttccatgtggctggggaggcctca

SEQ ID NO: 405460 - DNA, 753 bp, Homo sapiens
agccacctggtgtccgtggggtatctagttgcgaagccagatgtgatcttcaggctctggggggtgaatggtcagagtgcagacctgagaccactgctcaccgacttcagactccagtttatctgtgccccagcttcctcacttagtctcagaagacttaggctgaggcctcagaaggagatctccatcctttgtccagagcagaacaggatggccatgtcccaggaatcattgaccttcaaggacgtgtttgtggacttcaccctggaggagtggcagcaactggactctgcccagaagaacctctacagggatgtcatgcttgagaactacagccacctggtgtccgtggggtatctagttgcgaagccagatgtgatcttcaggttgggaccaggtgaagagtcctggatggcagatggggggaccccggtacggacctgtgcaggtgaggaagacagagtttcaccatgttgcccagactggtctcaaacacctggattcaagcaatccactcgccttggcctcccaaagtgctgggattacaggtcagtcaccacgaacaggggcactcggcatgctgccccagcactggagaagcagcgctgtgggggcaatctgtcacactctcagagtctgggacttgacttgctaccaacaactgctgtgcaattctgctgagcaggaatatcatgagctgttcaataatgacggacgcattggttgagatgaagtttccagtaaggaagtgac

SEQ ID NO: 405461 - DNA, 1324 bp, Homo sapiens
tcacactggctgttgtcagcggcctctgaggtttcaggctcttggcggtgaaggtcagagtgcagacctgagaccactgctcaccgacttcagactccagtttatctgtgccccagcttcctcacttagtctcagaagacttaggctgaggcctcagaaggagatctccatcctttgtccagagcagaacaggatggccatgtcccaggaatcattgaccttcaaggacgtgtttgtggacttcaccctggaggagtggcagcaactggactctgcccagaagaacctctacagggatgtcatgcttgagaactacagccacctggtgtccgtggggtatctagttgcgaagccagatgtgatcttcaggttgggaccaggtgaagagtcctggatggcagatggggggaccccggtacggacctgtgcaggtgaggaatgtatccatttttgcctcatgtattttgaagtgctgttattagaagtctggcaagttgatgagcagatagatcactacaaggaaagccaagacaaacttccttggcaagctgcattcataggcaaggaaacactgaaggatgaaagcggtcaagaatccagaacatgtagaaaaagcatttatctgagcacagaatttgattctgtaaggcaaagactccctaaatattattcgtgggaaaaggcattcaaaacatcatttaaactttcttggtcaaaatggaagctatgtaagaaagaaagatgatggatgtaaagcatattggaaagtatgcttccattataatcttcataaagctcaacctgcagagagattttttgaccctaatcaacgagggaaagccctccaccaaaagcaagcccttagaaaaagtcagagaagtcaaactggggagaaactctacaaatgtactgaatgtggaaaagtgtttatccagaaagcaaacttagttgtacatcaaagaactcacaccggagagaaaccttatgaatgctgcgaatgtgcaaaagccttcagccagaagtcaaccctcatagcacaccagagaactcacacaggggagaagccctatgaatgcagtgaatgtggaaaaacctttatccagaagtcaactctgattaaacataagaaaattcatatggagagagaccctataaatgcagtgtctgtgagaaagccttcagtaggaagtcaactctcattaaacatcagataattcatatgggagaaaccttatgaatgtaataaatgtgggaaatcttttagtgttaaatcaactctcattgtatgtcacagaacataaatgcataagttgcatgctattgt

SEQ ID NO: 405462 - DNA, 1323 bp, Homo sapiens
gagaccctataaatgcagtgtctctctccatatgaattttcttatgtttaatcagagttgacttctgattaaacataagaaaattcatatggagagagaccctataaatgcagtgtctgtgagaaagccttcagtaggaagtcaactctcattaaacatcagataattcatatgggagaaaccttatgaatgtaataaatgtgggaaatcttttagtgttaaatcaactctcattgtatgtcacagaacataaatgcataagttgcatgctattgtgaatagtgtgatgaaattttgcactgtcctgctctttcctgctcaggatgcaaatcagtgaatctttttttttttttttttttgagacagagtcttgctctgtcatccaaactggagtgcagtggcacaatcttggctcactgcaacctccgcctcttgggttcaaccgattctcctgcctcaacctcccaaatagttgggattacaggcacatgccaccatacgcagctaatttgtatttttagtagagacagggtttcaccatgttggccagcctggtcttgaactcctgacctcaagtgatccgcctgcctcagcctcccaaagtgctgggattacaggcatgagccactgcacccggcttgaatcatccttttgtccagtattatatccatgctgtatatgctacccgcccactagtcccttagctgtctcagttgtcagattgactgtcatgggattgcagtgcttgcattaaagctacccttattgtataatgaccccaaagtgcaagagtagtgatgttggcaatttgcatacaccaaaaataagttataaagtgcttccttaaagtgaaatggttaaagttcttgacttaataaagaaaaaaaatgtatgctgaggttgttaagatttacagtaagaatgaatcttctatccagaaattgtgaaggaggaaaaagaaacttgtgctagttttgctgtcacatctgaaactgcaaaagttgtggccacagtgcatcataagtgctaagacgaaaaagacattaaatttgcggatggaaggcgtgaatagaaatgggttctgacagcaatcaggttcggtactattcacagtttcaggcatccgctagggatcttggaacatatcccccatggataagggaggggtactgtaccttgtcatattgtgcattaaagaattcattgagtgtaatcatgtaagtctaacacacatttaaaaagctctcagatatcatttcgccttcggttgatgtaagaaaattcaaagctactcaaatcattcaataaatgataaaattattt

SEQ ID NO: 405463 - DNA, 2327 bp, Homo sapiens
tcacactggctgttgtcagcggcctctgaggtttcaggctcttggcggtgaaggtcagagtgcagacctgagaccactgctcaccgacttcagactccagtttatctgtgccccagcttcctcacttagtctcagaagacttaggctgaggcctcagaaggagatctccatcctttgtccagagcagaacaggatggccatgtcccaggaatcattgaccttcaaggacgtgtttgtggacttcaccctggaggagtggcagcaactggactctgcccagaagaacctctacagggatgtcatgcttgagaactacagccacctggtgtccgtggggtatctagttgcgaagccagatgtgatcttcaggttgggaccaggtgaagagtcctggatggcagatggggggaccccggtacggacctgtgcaggtgaggaaagtctggcaagttgatgagcagatagatcactacaaggaaagccaagacaaacttccttggcaagctgcattcataggcaaggaaacactgaaggatgaaagcggtcaagaatccagaacatgtagaaaaagcatttatctgagcacagaatttgattctgtaaggcaaagactccctaaatattattcgtgggaaaaggcattcaaaacatcatttaaactttcttggtcaaaatggaagctatgtaagaaagaaagatgatggatgtaaagcatattggaaagtatgcttccattataatcttcataaagctcaacctgcagagagattttttgaccctaatcaacgagggaaagccctccaccaaaagcaagcccttagaaaaagtcagagaagtcaaactggggagaaactctacaaatgtactgaatgtggaaaagtgtttatccagaaagcaaacttagttgtacatcaaagaactcacaccggagagaaaccttatgaatgctgcgaatgtgcaaaagccttcagccagaagtcaaccctcatagcacaccagagaactcacacaggggagaagccctatgaatgcagtgaatgtggaaaaacctttatccagaagtcaactctgattaaacataagaaaattcatatggagagagaccctataaatgcagtgtctgtgagaaagccttcagtaggaagtcaactctcattaaacatcagataattcatatgggagaaaccttatgaatgtaataaatgtgggaaatcttttagtgttaaatcaactctcattgtatgtcacagaacataaatgcataagttgcatgctattgtgaatagtgtgatgaaattttgcactgtcctgctctttcctgctcaggatgcaaatcagtgaatctttttttttttttttttttgagacagagtcttgctctgtcatccaaactggagtgcagtggcacaatcttggctcactgcaacctccgcctcttgggttcaaccgattctcctgcctcaacctcccaaatagttgggattacaggcacatgccaccatacgcagctaatttgtatttttagtagagacagggtttcaccatgttggccagcctggtcttgaactcctgacctcaagtgatccgcctgcctcagcctcccaaagtgctgggattacaggcatgagccactgcacccggcttgaatcatccttttgtccagtattatatccatgctgtatatgctacccgcccactagtcccttagctgtctcagttgtcagattgactgtcatgggattgcagtgcttgcattaaagctacccttattgtataatgaccccaaagtgcaagagtagtgatgttggcaatttgcatacaccaaaaataagttataaagtgcttccttaaagtgaaatggttaaagttcttgacttaataaagaaaaaaaatgtatgctgaggttgttaagatttacagtaagaatgaatcttctatccagaaattgtgaaggaggaaaaagaaacttgtgctagttttgctgtcacatctgaaactgcaaaagttgtggccacagtgcatcataagtgctaagacgaaaaagacattaaatttgcggatggaaggcgtgaatagaaatgggttctgacagcaatcaggttcggtactattcacagtttcaggcatccgctagggatcttggaacatatcccccatggataagggaggggtactgtaccttgtcatattgtgcattaaagaattcattgagtgtaatcatgtaagtctaacacacatttaaaaagctctcagatatcatttcgccttcggttgatgtaagaaaattcaaagctactcaaatcattcaataaatgataaaattattt

SEQ ID NO: 405464 - DNA, 1974 bp, Homo sapiens
tacttcacaggggggggggaccccggtacggacctgtgcagatgtatccatttttgcctcatgtattttgaagtgctgttattagaagtctggcaagttgatgagcagatagatcactacaaggaaagccaagacaaacttccttggcaagctgcattcataggcaaggaaacactgaaggatgaaagcggtcaagaatccagaacatgtagaaaaagcatttatctgagcacagaatttgattctgtaaggcaaagactccctaaatattattcgtgggaaaaggcattcaaaacatcatttaaactttcttggtcaaaatggaagctatgtaagaaagaaagatgatggatgtaaagcatattggaaagtatgcttccattataatcttcataaagctcaacctgcagagagattttttgaccctaatcaacgagggaaagccctccaccaaaagcaagcccttagaaaaagtcagagaagtcaaactggggagaaactctacaaatgtactgaatgtggaaaagtgtttatccagaaagcaaacttagttgtacatcaaagaactcacaccggagagaaaccttatgaatgctgcgaatgtgcaaaagccttcagccagaagtcaaccctcatagcacaccagagaactcacacaggggagaagccctatgaatgcagtgaatgtggaaaaacctttatccagaagtcaactctgattaaacataagaaaattcatatggagagagaccctataaatgcagtgtctgtgagaaagccttcagtaggaagtcaactctcattaaacatcagataattcatatgggagaaaccttatgaatgtaataaatgtgggaaatcttttagtgttaaatcaactctcattgtatgtcacagaacataaatgcataagttgcatgctattgtgaatagtgtgatgaaattttgcactgtcctgctctttcctgctcaggatgcaaatcagtgaatctttttttttttttttttttgagacagagtcttgctctgtcatccaaactggagtgcagtggcacaatcttggctcactgcaacctccgcctcttgggttcaaccgattctcctgcctcaacctcccaaatagttgggattacaggcacatgccaccatacgcagctaatttgtatttttagtagagacagggtttcaccatgttggccagcctggtcttgaactcctgacctcaagtgatccgcctgcctcagcctcccaaagtgctgggattacaggcatgagccactgcacccggcttgaatcatccttttgtccagtattatatccatgctgtatatgctacccgcccactagtcccttagctgtctcagttgtcagattgactgtcatgggattgcagtgcttgcattaaagctacccttattgtataatgaccccaaagtgcaagagtagtgatgttggcaatttgcatacaccaaaaataagttataaagtgcttccttaaagtgaaatggttaaagttcttgacttaataaagaaaaaaaatgtatgctgaggttgttaagatttacagtaagaatgaatcttctatccagaaattgtgaaggaggaaaaagaaacttgtgctagttttgctgtcacatctgaaactgcaaaagttgtggccacagtgcatcataagtgctaagacgaaaaagacattaaatttgcggatggaaggcgtgaatagaaatgggttctgacagcaatcaggttcggtactattcacagtttcaggcatccgctagggatcttggaacatatcccccatggataagggaggggtactgtaccttgtcatattgtgcattaaagaattcattgagtgtaatcatgtaagtctaacacacatttaaaaagctctcagatatcatttcgccttcggttgatgtaagaaaattcaaagctactcaaatcattcaataaatgataaaattattt

SEQ ID NO: 405465 - DNA, 1112 bp, Homo sapiens
ggcggcggcagcggcagcggcagcggcgctgagttttgtctcccgggccgtctgggcgcgcgcgggtgtcccagaatgaaatatgactgaggactctcagagaaactttcgttcagtatattatgagaaagtggggtttcgtggagttgaagaaaagaaatcattagaaattctcctaaaagatgaccgtctggatactgagaaactttgtacttttagtcagaggttccctctcccgtccatgtaccgtgcattggtatggaaggtgcttctaggaatcttgcctccacaccacgagtcccatgccaaggtgatgatgtatcgtaaggagcagtacttggatgtccttcatgccctgaaagtcgttcgctttgttagtgatgccacacctcaggctgaagtctatctccgcatgtatcagctggagtctgggaagttacctcgaagtccctcttttccactggagccagatgatgaagtgtttcttgccatagctaaagccatggaggaaatggtggaagatagtgtcgactgttactggatcacccgacgctttgtgaaccaattaaataccaagtaccgggattccttgccccagttgccaaaagcgtttgaacaatacttgaatctggaagatggcagactgctgactcatctgaggatgtgttccgcggcgcccaaacttccttatgatctctggttcaagaggtgctttgcgggatgtttgcctgaatccagtttacagagggtttgggataaagttgtgagtggatcctgtaagatcctagtttttgtagctgtcgaaattttattaacctttaaaataaaagttatggcactgaacagtgcagagaagataacaaagtttctggaaaatattccccaggacagctcagacgcgatcgtgagcaaggccattgacttgtggcacaaacactgtgggaccccggtccattcaagctgaacgcacccgctggttgtggaccgtctgccaggcaccacagtgagcattgtgttcttggcatgtgatctgggaaactgattgaataatacacttttcttgctttggtgctcaaagtggtttttttcccccaataaaattatttaattga

SEQ ID NO: 405466 - DNA, 502 bp, Homo sapiens
tgcttgacttcaattctggaggagatgttgtttccgccgggcggccccaaaaacttgcctgtatggatgggtgggggttcaaaaaagggtgcctttgacggggatagtttgccctggaaatcccacgtttaacaaagggtttgggataaagttgtgagtggatcctgtaagatcctagtttttgtagctgtcgaaattttattaacctttaaaataaaagttatggcactgaacagtgcagagaagataacaaagtttctggaaaatattccccaggacagctcagacgcgatcgtgagcaaggccattgacttgtggcacaaacactgtgggaccccggtccattcaagctgaacgcacccgctggttgtggaccgtctgccaggcaccacagtgagcattgtgttcttggcatgtgatctgggaaactgattgaataatacacttttcttgctttggtgctcaaagtggtttttttcccccaataaaattatttaattga

SEQ ID NO: 405467 - DNA, 1272 bp, Homo sapiens
ggcggcggcagcggcagcggcagcggcgctgagttttgtctcccgggccgtctgggcgcgcgcgggtgtcccaggtaccccgccgcctccctccttcccgcaggactcgtccctcctggccctgggccccaacggtgcccgcctgcccggcggtcggtcagcgcacagggcacggcttcctctgcttctcccggaccacttagtctcaacccgggtgtgtttgcactactagagaatgaaatatgactgaggactctcagagaaactttcgttcagtatattatgagaaagtggggtttcgtggagttgaagaaaagaaatcattagaaattctcctaaaagatgaccgtctggatactgagaaactttgtacttttagtcagaggttccctctcccgtccatgtaccgtgcattggtatggaaggtgcttctaggaatcttgcctccacaccacgagtcccatgccaaggtgatgatgtatcgtaaggagcagtacttggatgtccttcatgccctgaaagtcgttcgctttgttagtgatgccacacctcaggctgaagtctatctccgcatgtatcagctggagtctgggaagttacctcgaagtccctcttttccactggagccagatgatgaagtgtttcttgccatagctaaagccatggaggaaatggtggaagatagtgtcgactgttactggatcacccgacgctttgtgaaccaattaaataccaagtaccgggattccttgccccagttgccaaaagcgtttgaacaatacttgaatctggaagatggcagactgctgactcatctgaggatgtgttccgcggcgcccaaacttccttatgatctctggttcaagaggtgctttgcgggatgtttgcctgaatccagtttacagagggtttgggataaagttgtgagtggatcctgtaagatcctagtttttgtagctgtcgaaattttattaacctttaaaataaaagttatggcactgaacagtgcagagaagataacaaagtttctggaaaatattccccaggacagctcagacgcgatcgtgagcaaggccattgacttgtggcacaaacactgtgggaccccggtccattcaagctgaacgcacccgctggttgtggaccgtctgccaggcaccacagtgagcattgtgttcttggcatgtgatctgggaaactgattgaataatacacttttcttgctttggtgctcaaagtggtttttttcccccaataaaattatttaattga

SEQ ID NO: 405468 - DNA, 1252 bp, Homo sapiens
ggcggcggcagcggcagcggcagcggcgctgagttttgtctcccgggccgtctgggcgcgcgcgggtgtcccaggtaccccgccgcctccctccttcccgcaggactcgtccctcctggccctgggccccaacggtgcccgcctgcccggcggtcggtcagcgcacagggcacggcttcctctgcttctcccggaccacttagtctcaacccggaatgaaatatgactgaggactctcagagaaactttcgttcagtatattatgagaaagtggggtttcgtggagttgaagaaaagaaatcattagaaattctcctaaaagatgaccgtctggatactgagaaactttgtacttttagtcagaggttccctctcccgtccatgtaccgtgcattggtatggaaggtgcttctaggaatcttgcctccacaccacgagtcccatgccaaggtgatgatgtatcgtaaggagcagtacttggatgtccttcatgccctgaaagtcgttcgctttgttagtgatgccacacctcaggctgaagtctatctccgcatgtatcagctggagtctgggaagttacctcgaagtccctcttttccactggagccagatgatgaagtgtttcttgccatagctaaagccatggaggaaatggtggaagatagtgtcgactgttactggatcacccgacgctttgtgaaccaattaaataccaagtaccgggattccttgccccagttgccaaaagcgtttgaacaatacttgaatctggaagatggcagactgctgactcatctgaggatgtgttccgcggcgcccaaacttccttatgatctctggttcaagaggtgctttgcgggatgtttgcctgaatccagtttacagagggtttgggataaagttgtgagtggatcctgtaagatcctagtttttgtagctgtcgaaattttattaacctttaaaataaaagttatggcactgaacagtgcagagaagataacaaagtttctggaaaatattccccaggacagctcagacgcgatcgtgagcaaggccattgacttgtggcacaaacactgtgggaccccggtccattcaagctgaacgcacccgctggttgtggaccgtctgccaggcaccacagtgagcattgtgttcttggcatgtgatctgggaaactgattgaataatacacttttcttgctttggtgctcaaagtggtttttttcccccaataaaattatttaattga

SEQ ID NO: 405469 - DNA, 1676 bp, Homo sapiens
cttttttttaaatgggcattttgtaaaatgaaaaattaagttatataaaagtaaaatgccacgagttcctcacttatcttgctttaaaaaaataaatccccacactcattacgcgttttatgctgctgacttttttatttttaagacatctgctcccgaaagctcagagccctttagcatttcattttctaaacgaatcctaatctttcctgtgactgaatcggttcagaggatatcttttcaataaggaaggaagccctcccctgctcactggggacgtcgcagggtttttaaacctaaagatttactcttttgtgcacagacgctggaagcatttggactcacttttccccttcgtctttctctccctttctgtctttctgtgtctcctccaagaatgaaatatgactgaggactctcagagaaactttcgttcagtatattatgagaaagtggggtttcgtggagttgaagaaaagaaatcattagaaattctcctaaaagatgaccgtctggatactgagaaactttgtacttttagtcagaggttccctctcccgtccatgtaccgtgcattggtatggaaggtgcttctaggaatcttgcctccacaccacgagtcccatgccaaggtgatgatgtatcgtaaggagcagtacttggatgtccttcatgccctgaaagtcgttcgctttgttagtgatgccacacctcaggctgaagtctatctccgcatgtatcagctggagtctgggaagttacctcgaagtccctcttttccactggagccagatgatgaagtgtttcttgccatagctaaagccatggaggaaatggtggaagatagtgtcgactgttactggatcacccgacgctttgtgaaccaattaaataccaagtaccgggattccttgccccagttgccaaaagcgtttgaacaatacttgaatctggaagatggcagactgctgactcatctgaggatgtgttccgcggcgcccaaacttccttatgatctctggttcaagaggtgctttgcgggatgtttgcctgaatccagtttacagagggtttgggataaagttgtgagtggatcctgtaagatcctagtttttgtagctgtcgaaattttattaacctttaaaataaaagttatggcactgaacagtgcagagaagataacaaagtttctggaaaatattccccaggacagctcagacgcgatcgtgagcaaggccattgacttgtggcacaaacactgtgggaccccggtccattcaagctgaacgcacccgctggttgtggaccgtctgccaggcaccacagtgagcattgtgttcttggcatgtgatctgggaaactgattgaataatacacttttcttgctttggtgctcaaagtggtttttttcccccaataaaattatttaattgaaatgcctggtgttgctgtgttggcgagcagcatcttgcagttacatagaaatgtaaagttcatctctgaatagcatttcaaaagggttgttagaaaatagctccctgattttaaagcggtttagtcagggtgagtgggtgtgttaaccagcagtgcataactaagcctgccctgcctgtctctaattagcaccaagctagttactttcaaggtctgtttctagaataagagtgacttccttt

SEQ ID NO: 405470 - DNA, 1589 bp, Homo sapiens
cttttttttaaatgggcattttgtaaaatgaaaaattaagttatataaaagtaaaatgccacgagttcctcacttatcttgctttaaaaaaataaatccccacactcattacgcgttttatgctgctgacttttttatttttaagacatctgctcccgaaagctcagagccctttagcatttcattttctaaacgaatcctaatctttcctgtgactgaatcggttcagaggatatcttttcaataaggaaggaagccctcccctgctcactggggacgtcgcagggtttttaaacctaaagatttactcttttgtgcacagacgctggaagcatttgggtgaggcagtgcagtgctttttgggaaatgcatcagatcttttctgttcttgaaacgccaaatctaacttggtctttttttggatgaattaccgccagtattatgaaggttactgtgaaggaacttgagaccactgaactttttgagttcttgcgactcacttttccccttcgtctttctctccctttctgtctttctgtgtctcctccaagaatgaaatatgactgaggactctcagagaaactttcgttcagtatattatgagaaagtggggtttcgtggagttgaagaaaagaaatcattagaaattctcctaaaagatgaccgtctggatactgagaaactttgtacttttagtcagaggttccctctcccgtccatgtaccgtgcattggtatggaaggtgcttctaggaatcttgcctccacaccacgagtcccatgccaaggtgatgatgtatcgtaaggagcagtacttggatgtccttcatgccctgaaagtcgttcgctttgttagtgatgccacacctcaggctgaagtctatctccgcatgtatcagctggagtctgggaagttacctcgaagtccctcttttccactggagccagatgatgaagtgtttcttgccatagctaaagccatggaggaaatggtggaagatagtgtcgactgttactggatcacccgacgctttgtgaaccaattaaataccaagtaccgggattccttgccccagttgccaaaagcgtttgaacaatacttgaatctggaagatggcagactgctgactcatctgaggatgtgttccgcggcgcccaaacttccttatgatctctggttcaagaggtgctttgcgggatgtttgcctgaatccagtttacagagggtttgggataaagttgtgagtggatcctgtaagatcctagtttttgtagctgtcgaaattttattaacctttaaaataaaagttatggcactgaacagtgcagagaagataacaaagtttctggaaaatattccccaggacagctcagacgcgatcgtgagcaaggccattgacttgtggcacaaacactgtgggaccccggtccattcaagctgaacgcacccgctggttgtggaccgtctgccaggcaccacagtgagcattgtgttcttggcatgtgatctgggaaactgattgaataatacacttttcttgctttggtgctcaaagtggtttttttcccccaataaaattatttaattga

SEQ ID NO: 405471 - DNA, 1575 bp, Homo sapiens
cttttttttaaatgggcattttgtaaaatgaaaaattaagttatataaaagtaaaatgccacgagttcctcacttatcttgctttaaaaaaataaatccccacactcattacgcgttttatgctgctgacttttttatttttaagacatctgctcccgaaagctcagagccctttagcatttcattttctaaacgaatcctaatctttcctgtgactgaatcggttcagaggatatcttttcaataaggaaggaagccctcccctgctcactggggacgtcgcagggtttttaaacctaaagatttactcttttgtgcacagacgctggaagcatttggactcacttttccccttcgtctttctctccctttctgtctttctgtgtctcctccaagaatgaaatatgactgaggactctcagagaaactttcgttcagtatattatgagaaagtggggtttcgtggagttgaagaaaagaaatcattagaaattctcctaaaagatgaccgtctggatactgagaaactttgtacttttagtcagaggttccctctcccgtccatgtaccgtgcattggtatggaaggtgcttctaggaatcttgcctccacaccacgagtcccatgccaaggtgatgatgtatcgtaaggagcagtacttggatgtccttcatgccctgaaagtcgttcgctttgttagtgatgccacacctcaggctgaagtctatctccgcatgtatcagctggagtctgggaagttacctcgaagtccctcttttccactggagccagatgatgaagtgtttcttgccatagctaaagccatggaggaaatggtggaagatagtgtcgactgttactggatcacccgacgctttgtgaaccaattaaataccaagtaccgggattccttgccccagttgccaaaagcgtttgaacaatacttgaatctggaagatggcagactgctgactcatctgaggatgtgttccgcggcgcccaaacttccttatgatctctggttcaagaggtgctttgcgggatgtttgcctgaatccagtttacagagggtttgggataaagttgtgagtggatcctgtaagatcctagtttttgtagctgtcgaaattttattaacctttaaaataaaagttatggcactgaacagtgcagagaagataacaaagtttctggaaaatattccccaggacagctcagacgcgatcgtgagcaaggccattgacttgtggcacaaacactgtgggaccccggtccattcaagctgaacgcacccgctggttgtggaccgtctgccaggcaccacagtgagcattgtgttcttggcatgtgatctgggaaactgattgaataatacacttttcttgctttggtgctcaaagtggtttttccccataacttttactgaaacaacaacaaaaaaaaaaaaattggggcggccaaaagttaaactgtggggggccaggtagaatgtaacgtccaaggcacaggggtacaaaagcggcgggtaaggtgtggaagcaacaaaccggggggaaggaggagtacgactccgtt

SEQ ID NO: 405472 - DNA, 1508 bp, Homo sapiens
cttttttttaaatgggcattttgtaaaatgaaaaattaagttatataaaagtaaaatgccacgagttcctcacttatcttgctttaaaaaaataaatccccacactcattacgcgttttatgctgctgacttttttatttttaagacatctgctcccgaaagctcagagccctttagcatttcattttctaaacgaatcctaatctttcctgtgactgaatcggttcagaggatatcttttcaataaggaaggaagccctcccctgctcactggggacgtcgcagggtttttaaacctaaagatttactcttttgtgcacagacgctggaagcatttgggtgaggcagtgcagtgctttttgggaaatgcatcagatcttttctgttcttgaaacgccaaatctaacttggtctttttttggatgaattaccgccagtattatgaaggttactgtgaaggaacttgagaccactgaactttttgagttcttgcgactcacttttccccttcgtctttctctccctttctgtctttctgtgtctcctccaagaatgaaatatgactgaggactctcagagaaactttcgttcagtatattatgagaaagtggggtttcgtggagttgaagaaaagaaatcattagaaattctcctaaaagatgaccgtctgggaatcttgcctccacaccacgagtcccatgccaaggtgatgatgtatcgtaaggagcagtacttggatgtccttcatgccctgaaagtcgttcgctttgttagtgatgccacacctcaggctgaagtctatctccgcatgtatcagctggagtctgggaagttacctcgaagtccctcttttccactggagccagatgatgaagtgtttcttgccatagctaaagccatggaggaaatggtggaagatagtgtcgactgttactggatcacccgacgctttgtgaaccaattaaataccaagtaccgggattccttgccccagttgccaaaagcgtttgaacaatacttgaatctggaagatggcagactgctgactcatctgaggatgtgttccgcggcgcccaaacttccttatgatctctggttcaagaggtgctttgcgggatgtttgcctgaatccagtttacagagggtttgggataaagttgtgagtggatcctgtaagatcctagtttttgtagctgtcgaaattttattaacctttaaaataaaagttatggcactgaacagtgcagagaagataacaaagtttctggaaaatattccccaggacagctcagacgcgatcgtgagcaaggccattgacttgtggcacaaacactgtgggaccccggtccattcaagctgaacgcacccgctggttgtggaccgtctgccaggcaccacagtgagcattgtgttcttggcatgtgatctgggaaactgattgaataatacacttttcttgctttggtgctcaaagtggtttttttcccccaataaaattatttaattga

SEQ ID NO: 405473 - DNA, 1171 bp, Homo sapiens
ggcggcggcagcggcagcggcagcggcgctgagttttgtctcccgggccgtctgggcgcgcgcgggtgtcccaggtaccccgccgcctccctccttcccgcaggactcgtccctcctggccctgggccccaacggtgcccgcctgcccggcggtcggtcagcgcacagggcacggcttcctctgcttctcccggaccacttagtctcaacccggaatgaaatatgactgaggactctcagagaaactttcgttcagtatattatgagaaagtggggtttcgtggagttgaagaaaagaaatcattagaaattctcctaaaagatgaccgtctgggaatcttgcctccacaccacgagtcccatgccaaggtgatgatgtatcgtaaggagcagtacttggatgtccttcatgccctgaaagtcgttcgctttgttagtgatgccacacctcaggctgaagtctatctccgcatgtatcagctggagtctgggaagttacctcgaagtccctcttttccactggagccagatgatgaagtgtttcttgccatagctaaagccatggaggaaatggtggaagatagtgtcgactgttactggatcacccgacgctttgtgaaccaattaaataccaagtaccgggattccttgccccagttgccaaaagcgtttgaacaatacttgaatctggaagatggcagactgctgactcatctgaggatgtgttccgcggcgcccaaacttccttatgatctctggttcaagaggtgctttgcgggatgtttgcctgaatccagtttacagagggtttgggataaagttgtgagtggatcctgtaagatcctagtttttgtagctgtcgaaattttattaacctttaaaataaaagttatggcactgaacagtgcagagaagataacaaagtttctggaaaatattccccaggacagctcagacgcgatcgtgagcaaggccattgacttgtggcacaaacactgtgggaccccggtccattcaagctgaacgcacccgctggttgtggaccgtctgccaggcaccacagtgagcattgtgttcttggcatgtgatctgggaaactgattgaataatacacttttcttgctttggtgctcaaagtggtttttttcccccaataaaattatttaattga

SEQ ID NO: 405474 - DNA, 1348 bp, Homo sapiens
ggcggcggcagcggcagcggcagcggcgctgagttttgtctcccgggccgtctgggcgcgcgcgggtgtcccaggtaccccgccgcctccctccttcccgcaggactcgtccctcctggccctgggccccaacggtgcccgcctgcccggcggtcggtcagcgcacagggcacggcttcctctgcttctcccggaccacttagtctcaacccggaatgaaatatgactgaggactctcagagaaactttcgttcagtatattatgagaaagtggggtttcgtggagttgaagaaaagaaatcattagaaattctcctaaaagatgaccgtctggatactgagaaactttgtacttttagtcagaggttccctctcccgtccatgtaccgtgcattggtatggaaggtgcttctaggaatcttgcctccacaccacgagtcccatgccaaggtgatgatgtatcgtaaggagcagtacttggatgtccttcatgccctgaaagtcgttcgctttgttagtgatgccacacctcaggctgaagtctatctccgcatgtatcagctggagtctgggaagttacctcgaagtccctcttttccactgaagctgggaagtccaggattcaggggctacatctggtgaaggccttcttgctgatgactctctgcagggtcctgaggtggcacaggctatcacatggagccagatgatgaagtgtttcttgccatagctaaagccatggaggaaatggtggaagatagtgtcgactgttactggatcacccgacgctttgtgaaccaattaaataccaagtaccgggattccttgccccagttgccaaaagcgtttgaacaatacttgaatctggaagatggcagactgctgactcatctgaggatgtgttccgcggcgcccaaacttccttatgatctctggttcaagaggtgctttgcgggatgtttgcctgaatccagtttacagagggtttgggataaagttgtgagtggatcctgtaagatcctagtttttgtagctgtcgaaattttattaacctttaaaataaaagttatggcactgaacagtgcagagaagataacaaagtttctggaaaatattccccaggacagctcagacgcgatcgtgagcaaggccattgacttgtggcacaaacactgtgggaccccggtccattcaagctgaacgcacccgctggttgtggaccgtctgccaggcaccacagtgagcattgtgttcttggcatgtgatctgggaaactgattgaataatacacttttcttgctttggtgctcaaagtggtttttttcccccaataaaattatttaattga

SEQ ID NO: 405475 - DNA, 739 bp, Homo sapiens
ggcggcggcagcggcagcggcagcggcgctgagttttgtctcccgggccgtctgggcgcgcgcgggtgtcccaggtaccccgccgcctccctccttcccgcaggactcgtccctcctggccctgggccccaacggtgcccgcctgcccggcggtcggtcagcgcacagggcacggcttcctctgcttctcccggaccacttagtctcaacccgggtgtgtttgcactactagagactcacttttccccttcgtctttctctccctttctgtctttctgtgtctcctccaagaatgaaatatgactgaggactctcagagaaactttcgttcagtatattatgagaaagtggggtttcgtggagttgaagaaaagaaatcattagaaattctcctaaaagatgaccgtctggatactgagaaactttgtacttttagtcagaggttccctctcccgtccatgtaccgtgcattggtatggaaggtgcttctaggaatcttgcctccacaccacgagtcccatgccaaggtgatgatgtatcgtaaggagcagtacttggatgtccttcatgccctgaaagtcgttcgctttgttagtgatgccacacctcaggctgaagtctatctccgcatgtatcagctggagtctgggaagttacctcgaagtccctcttttccactgagccaggcctaagttcagagccagggtcgggtggagccctaagttcagagccagggggt

SEQ ID NO: 405476 - DNA, 1434 bp, Homo sapiens
cttttttttaaatgggcattttgtaaaatgaaaaattaagttatataaaagtaaaatgccacgagttcctcacttatcttgctttaaaaaaataaatccccacactcattacgcgttttatgctgctgacttttttatttttaagacatctgctcccgaaagctcagagccctttagcatttcattttctaaacgaatcctaatctttcctgtgactgaatcggttcagaggatatcttttcaataaggaaggaagccctcccctgctcactggggacgtcgcagggtttttaaacctaaagatttactcttttgtgcacagacgctggaagcatttggactcacttttccccttcgtctttctctccctttctgtctttctgtgtctcctccaagaatgaaatatgactgaggactctcagagaaactttcgttcagtatattatgagaaagtggggtttcgtggagttgaagaaaagaaatcattagaaattctcctaaaagatgaccgtctggatactgagaaactttgtacttttagtcagaggttccctctcccgtccatgtaccgtgcattggtatggaaggtgcttctaggaatcttgcctccacaccacgagtcccatgccaaggtgatgatgtatcgtaaggagcagtacttggatgtccttcatgccctgaaagtcgttcgctttgttagtgatgccacacctcaggctgaagtctatctccgcatgtatcagctggagtctgggaagttacctcgaagtccctcttttccactggagccagatgatgaagtgtttcttgccatagctaaagccatggaggaaatggtggaagatagtgtcgactgttactggatcacccgacgctttgtgaaccaattaaataccaagtaccgggattccttgccccagttgccaaaagcgtttgaacaatacttgaatctggaagatggcagactgctgactcatctgaggatgtgttccgcggcgcccaaacttccttatgatctctggttcaagaggtgctttgcgggatgtttgcctgaatccagtttacagagggtttgggataaagttgtgagtggatcctgtaagatcctagtttttgtagctgtcgaaattttattaacctttaaaataaaagttatggcactgaacagtgcagagaagataacaaagtttctggaaaatattccccaggacagctcagacgcgatcgtgagcaaggccattgacttgtggcacaaacactgtgggaccccggtccattcaagctgaacgcacccgctggttgtggaccgtctgccaggcaccacagtgagcattgtgttcttggcatgtgatctgggaaactgattgaataatacacttttcttgctttggtgctcaaagtggtttttttcccccaataaaattatttaattga

SEQ ID NO: 405477 - DNA, 1336 bp, Homo sapiens
caacagggaccgaccaaatcgtcatgcagctgtttggatgctttaaaaaaataaatccccacactcattacgcgttttatgctgctgacttttttatttttaagacatctgctcccgaaagctcagagccctttagcatttcattttctaaacgaatcctaatctttcctgtgactgaatcggttcagaggatatcttttcaataaggaaggaagccctcccctgctcactggggacgtcgcagggtttttaaacctaaagatttactcttttgtgcacagacgctggaagcatttggaatgaaatatgactgaggactctcagagaaactttcgttcagtatattatgagaaagtggggtttcgtggagttgaagaaaagaaatcattagaaattctcctaaaagatgaccgtctggatactgagaaactttgtacttttagtcagaggttccctctcccgtccatgtaccgtgcattggtatggaaggtgcttctaggaatcttgcctccacaccacgagtcccatgccaaggtgatgatgtatcgtaaggagcagtacttggatgtccttcatgccctgaaagtcgttcgctttgttagtgatgccacacctcaggctgaagtctatctccgcatgtatcagctggagtctgggaagttacctcgaagtccctcttttccactggagccagatgatgaagtgtttcttgccatagctaaagccatggaggaaatggtggaagatagtgtcgactgttactggatcacccgacgctttgtgaaccaattaaataccaagtaccgggattccttgccccagttgccaaaagcgtttgaacaatacttgaatctggaagatggcagactgctgactcatctgaggatgtgttccgcggcgcccaaacttccttatgatctctggttcaagaggtgctttgcgggatgtttgcctgaatccagtttacagagggtttgggataaagttgtgagtggatcctgtaagatcctagtttttgtagctgtcgaaattttattaacctttaaaataaaagttatggcactgaacagtgcagagaagataacaaagtttctggaaaatattccccaggacagctcagacgcgatcgtgagcaaggccattgacttgtggcacaaacactgtgggaccccggtccattcaagctgaacgcacccgctggttgtggaccgtctgccaggcaccacagtgagcattgtgttcttggcatgtgatctgggaaactgattgaataatacacttttcttgctttggtgctcaaagtggtttttttcccccaataaaattatttaattga

SEQ ID NO: 405478 - DNA, 1234 bp, Homo sapiens
cactattacagtctgcttcttatttcccgtgaagagaatgtttcgggtgtctattcccaaggaggacaaaagcttcttgttgctatgggagccgccccactgttatctcaagccatgtgcatcatggatatcctgtagctcagtccacacatctagcaattccccacttcgtgggcagcggctatcacattaacggaatgaaatatgactgaggactctcagagaaactttcgttcagtatattatgagaaagtggggtttcgtggagttgaagaaaagaaatcattagaaattctcctaaaagatgaccgtctggatactgagaaactttgtacttttagtcagaggttccctctcccgtccatgtaccgtgcattggtatggaaggtgcttctaggaatcttgcctccacaccacgagtcccatgccaaggtgatgatgtatcgtaaggagcagtacttggatgtccttcatgccctgaaagtcgttcgctttgttagtgatgccacacctcaggctgaagtctatctccgcatgtatcagctggagtctgggaagttacctcgaagtccctcttttccactggagccagatgatgaagtgtttcttgccatagctaaagccatggaggaaatggtggaagatagtgtcgactgttactggatcacccgacgctttgtgaaccaattaaataccaagtaccgggattccttgccccagttgccaaaagcgtttgaacaatacttgaatctggaagatggcagactgctgactcatctgaggatgtgttccgcggcgcccaaacttccttatgatctctggttcaagaggtgctttgcgggatgtttgcctgaatccagtttacagagggtttgggataaagttgtgagtggatcctgtaagatcctagtttttgtagctgtcgaaattttattaacctttaaaataaaagttatggcactgaacagtgcagagaagataacaaagtttctggaaaatattccccaggacagctcagacgcgatcgtgagcaaggccattgacttgtggcacaaacactgtgggaccccggtccattcaagctgaacgcacccgctggttgtggaccgtctgccaggcaccacagtgagcattgtgttcttggcatgtgatctgggaaactgattgaataatacacttttcttgctttggtgctcaaagtggtttttttcccccaataaaattatttaattga

SEQ ID NO: 405479 - DNA, 1191 bp, Homo sapiens
ggcggcggcagcggcagcggcagcggcgctgagttttgtctcccgggccgtctgggcgcgcgcgggtgtcccaggtaccccgccgcctccctccttcccgcaggactcgtccctcctggccctgggccccaacggtgcccgcctgcccggcggtcggtcagcgcacagggcacggcttcctctgcttctcccggaccacttagtctcaacccgggtgtgtttgcactactagagaatgaaatatgactgaggactctcagagaaactttcgttcagtatattatgagaaagtggggtttcgtggagttgaagaaaagaaatcattagaaattctcctaaaagatgaccgtctgggaatcttgcctccacaccacgagtcccatgccaaggtgatgatgtatcgtaaggagcagtacttggatgtccttcatgccctgaaagtcgttcgctttgttagtgatgccacacctcaggctgaagtctatctccgcatgtatcagctggagtctgggaagttacctcgaagtccctcttttccactggagccagatgatgaagtgtttcttgccatagctaaagccatggaggaaatggtggaagatagtgtcgactgttactggatcacccgacgctttgtgaaccaattaaataccaagtaccgggattccttgccccagttgccaaaagcgtttgaacaatacttgaatctggaagatggcagactgctgactcatctgaggatgtgttccgcggcgcccaaacttccttatgatctctggttcaagaggtgctttgcgggatgtttgcctgaatccagtttacagagggtttgggataaagttgtgagtggatcctgtaagatcctagtttttgtagctgtcgaaattttattaacctttaaaataaaagttatggcactgaacagtgcagagaagataacaaagtttctggaaaatattccccaggacagctcagacgcgatcgtgagcaaggccattgacttgtggcacaaacactgtgggaccccggtccattcaagctgaacgcacccgctggttgtggaccgtctgccaggcaccacagtgagcattgtgttcttggcatgtgatctgggaaactgattgaataatacacttttcttgctttggtgctcaaagtggtttttttcccccaataaaattatttaattga

SEQ ID NO: 405480 - DNA, 1088 bp, Homo sapiens
ggcggcggcagcggcagcggcagcggcgctgagttttgtctcccgggccgtctgggcgcgcgcgggtgtcccagactcacttttccccttcgtctttctctccctttctgtctttctgtgtctcctccaagaatgaaatatgactgaggactctcagagaaactttcgttcagtatattatgagaaagtggggtttcgtggagttgaagaaaagaaatcattagaaattctcctaaaagatgaccgtctgggaatcttgcctccacaccacgagtcccatgccaaggtgatgatgtatcgtaaggagcagtacttggatgtccttcatgccctgaaagtcgttcgctttgttagtgatgccacacctcaggctgaagtctatctccgcatgtatcagctggagtctgggaagttacctcgaagtccctcttttccactggagccagatgatgaagtgtttcttgccatagctaaagccatggaggaaatggtggaagatagtgtcgactgttactggatcacccgacgctttgtgaaccaattaaataccaagtaccgggattccttgccccagttgccaaaagcgtttgaacaatacttgaatctggaagatggcagactgctgactcatctgaggatgtgttccgcggcgcccaaacttccttatgatctctggttcaagaggtgctttgcgggatgtttgcctgaatccagtttacagagggtttgggataaagttgtgagtggatcctgtaagatcctagtttttgtagctgtcgaaattttattaacctttaaaataaaagttatggcactgaacagtgcagagaagataacaaagtttctggaaaatattccccaggacagctcagacgcgatcgtgagcaaggccattgacttgtggcacaaacactgtgggaccccggtccattcaagctgaacgcacccgctggttgtggaccgtctgccaggcaccacagtgagcattgtgttcttggcatgtgatctgggaaactgattgaataatacacttttcttgctttggtgctcaaagtggtttttttcccccaataaaattatttaattga

SEQ ID NO: 405481 - DNA, 1134 bp, Homo sapiens
ggcggcggcagcggcagcggcagcggcgctgagttttgtctcccgggccgtctgggcgcgcgcgggtgtcccaggtaccccgccgcctccctccttcccgcaggactcgtccctcctggccctgggccccaacggtgcccgcctgcccggcggtcggtcagcgcacagggcacggcttcctctgcttctcccggaccacttagtctcaacccgggtgtgtttgcactactagagaatgaaatatgactgaggactctcagagaaactttcgttcagtatattatgagaaagtggggtttcgtggagttgaagaaaagaaatcattagaaattctcctaaaagatgaccgtctggatactgagaaactttgtacttttagtcagaggttccctctcccgtccatgtaccgtgcattggtatggaaggtgcttctaggaatcttgcctccacaccacgagtcccatgccaaggtgatgatgtatcgtaaggagcagtacttggatgtccttcatgccctgaaagtcgttcgctttgttagtgatgccacacctcaggctgaagtctatctccgcatgtatcagctggagtctgggaagttacctcgaagtccctcttttccactgccaaaagcgtttgaacaatacttgaatctggaagatggcagactgctgactcatctgaggatgtgttccgcggcgcccaaacttccttatgatctctggttcaagaggtgctttgcgggatgtttgcctgaatccagtttacagagggtttgggataaagttgtgagtggatcctgtaagatcctagtttttgtagctgtcgaaattttattaacctttaaaataaaagttatggcactgaacagtgcagagaagataacaaagtttctggaaaatattccccaggacagctcagacgcgatcgtgagcaaggccattgacttgtggcacaaacactgtgggaccccggtccattcaagctgaacgcacccgctggttgtggaccgtctgccaggcaccacagtgagcattgtgttcttggcatgtgatctgggaaactgattgaataatacacttttcttgctttggtgctcaaagtggtttttttcccccaataaaattatttaattga

SEQ ID NO: 405482 - DNA, 354 bp, Homo sapiens
caccgagggccttgttctactaggaaataagccccagtttatgcttcgttgtttctgtgtgtgtaaataagatgaaggaaagcacagaaagaaaaggagaggcgaaaccctccattctcacaatcaaatctaaattgtataatgtcctccaagttttagagtgacagcagtcattgccaaaagtgtggtgtggtcagatcagacaagcgttggttgttagaacactttaaagaacacttagaaaccgacaggtctcacgcacgggaccctccctaaaagctggcacacgtagggtttcttttgtgcagttaagaaaataggctctttccctaagtctcagagcagcagctcctg

SEQ ID NO: 405483 - DNA, 6548 bp, Homo sapiens
gtcggggccgctttgcaggtccctagtcaggaccgagcaggggagtaggataggaatccccgccgcacctttgtacgagcctgaccccttccgtgggtttgttcctgggtcgccgtcaagctgcggtctctcctcccccgcccttcagccccgcggtctccaggggcggcgccctgggtctggaacgcggttgccaccgaggaggcggcggccctgcgtctggaacgccgttgccaccgaggaggcggcggccccgagcgcgcctggaagccccgggcaaccggccagggtcgggcacaggtggggtccgtcaggccgcccggggctcctctgtcccagctctgcggcccagggggtgacgtgatggcggcagcggtgctgacggaccgggcccaggtgtctgtgacctttgatgatgtggctgtgactttcaccaaggaggagtgggggcagctggacctagctcagcggaccctgtaccaggaggtgatgctggaaaactgtgggctcctggtgtctctggggtgtcctgttcccaaagctgagctgatctgccacctagagcatgggcaggagccatggaccaggaaggaagacctctcccaagacacctgtccaggcgacaaaggaaaacctaagaccacagaacctaccacttgtgagccagccttgtcagagggaatctcacttcagggacaagtgacacaaggaaactcagtggactcacagttggggcaagccgaggatcaggatgggctatcagaaatgcaggaaggacacttcagaccaggaatagatccccaggagaagtctcctgggaagatgagccctgaatgtgatggtttagggacagctgatggtgtgtgttcaaggattggacaggagcaagtctctccaggagatagagtccgtagccataactcatgtgagtcaggtaaagatcccatgattcaggaagaggaaaataactttaaatgcagtgaatgtggaaaagtatttaacaagaaacacctccttgctggacatgagaaaattcactctggagttaagccctatgaatgcacagaatgtgggaaaacctttattaagagcacacatctcctgcaacatcacatgatccacactggggagaggccctatgagtgcatggagtgtggaaaggccttcaaccgcaagtcataccttacccagcaccagcggattcacagtggagagaagccttacaagtgcaatgaatgcggaaaggccttcacccaccgctccaattttgtcttgcataacaggagacacactggagaaaaatcctttgtgtgcacagaatgtggccaagtctttcgacataggccaggctttctccggcactatgttgtccacagtggtgagaatccctatgagtgcttggagtgtggcaaggtcttcaaacacaggtcatatctcatgtggcaccagcagactcataccggggagaagccctatgagtgcagtgaatgtgggaaggtcttcttggagagtgcagccctgattcaccactatgtcatccacactggagagaagccctttgagtgcctcgagtgtgggaaggctttcaaccaccgatcctacctcaagaggcaccagcggattcacactggggagaagcccttcgtgtgcagtgaatgtggaaaggccttcacccactgctctacttttatcttgcataaaagggcccacactggagaaaagcctttcgagtgcaaagagtgtgggaaagcctttagcaatcggaaggacctcattcgccacttcagcatccacactggagagaagccctatgagtgcgtggagtgtggaaaggccttcacccgcatgtcgggcctcacgaggcacaagcggattcatagtggagagaagccctatgaatgtgttgagtgtgggaaatcgttttgctggagcacaaacctcattcgacatgccattatccacactggagagaagccctataaatgtagtgaatgtggaaaggccttcagtcgcagctcgtccctcactcagcatcaaaggatgcatactgggaaaaatcccatcagtgtaacagatgtgggaagaccttttacaagtggacaaacctcagttacccttcgagaacttcttttagggaaggactttttgaatgtaaccactgaggcaaatattttgccagaggaaacatcttcctctgcatctgatcaaccataccaaagagaaaccccacaagtgtcttcactgtgagaaaaccttctgttgctgaatattacttgtcatctgaagagtcatattagaaattcgttcagtctagagccttattctccatctgataatttatcctggagagagacccagtggttattgtgcacataggagaaccttcagctgcatctttctccttagtttacagtgcaattttatctcaggaattatttttaaaaggaggaggggacatagaaaaaatgaaatgcaagcacacatcttttcaggcttctctgccaagcctatggcgctttgtcatggatttcttagtgtatttgggggaagggaaatgtttcaaggtaaagaaccttgaccctttatgtgcttgtatgtacatttattgctatccagtgtcagaacagttagtttaggaaaagtatgcaaactttaatcgcacatcttctgtattccacaatagtacttactcttgagaagcataactttatgacaacttagggggcttgagccatgaaatactcacgtttaagtcagtaaggatacacatgttaacattcaggcttttgtcttgatgcccgtcttttggtttacgtcatcattgtagccatatggtaaatttttatttgttaaatttttaaaaattacttagctcaaaatgtcagtggtaaatttttaaattgagtaaagtgattcttctttgctcttatttaaaatcgacagcatttctagttcctttgacattccatataatttttaggattagtttgtacttatttacaaaacagtcttgttcagatttttacagaaattgagttaagtctgtggattaatctgttaagaattggtatctttactatgttgggtcttgtagttcatgagtgcaggagtaggcctcttaatttataatagttaagcattccttaaagtatttcattaatgttaaaaattttcagcgtatagatccctatgcatttttgttagaatttgcatcctagggtgcttttttgtttgtgtgtgtgtgtaatttgagtgattgtaaatggcattgatgtttgaactttgaattgcacacaatttttggtagtatacagaaatataatatttttggacattgttttgctaccctgcaaccttattgagttcacttattatttttagctatttctttcgacagaatccttggaattttctatatagaaatgtcatctgcaaatacagaccattttttatctttcatcttacctgtaatcctagcactttgagaccactaaggcgggtggatcacctgaggccaggagttcgagaccagcctggccaacatggcaaaaccctgtctactaaaaatacaaaaattagccgggcatggtggcgtgtgcctgtggtcccagctgctggggggctgaggcaggaggatcagttgaacgtgggaggcagaggttgcagtgagctgagatctcaccactgcactccagcctgggcagcagagcgagactctgtctcaacaacaacaacaaaaagtcctgaacatgattgtggaagtgtgttgctctttcaagttctatcactttttgtttgcaaagttcaaagctgtattgtttggtacatatacatgtaggtttgccaagtctttgtggtgaattgactcttctgtcattatgtgatgtcatttttttgccttttaatagtcttgtcaatactttacctgatgttctcatagtgactcctgcatattttgattaatgtttgcatggttaatatttcttcattttattttaaagcttacctgtatcattacttatgaagtcagtttctttgaacagcatatactcaggccatgctttttttattcattctgcatatgtctctcttaattggtatgttgaaatgatttacattaaaataattattgatattttagggcttaagtgtgcccttaaatgatttttgtgttcttttttattgttcctctgttatttggggttgtttactagtcttcctataggttacttcaccttttttttttttaataatttgatttgatacatatgtagtgttttttagtatagatcctccttgacttatgatggggttatgtcacaataaacccattgcaagttgaaaatactatgtcaaatatgcatttaatacacctaccctgctgaacatcatagccgatcttgccttcagaatgctcagaaaatttacattagcctgcagttgggcaaaatcatctaacacaaggcctactttataataaagttactgcaaagaattttaaataaaaattcaagtgtggtttctactgaatgcatgtcgcattcgcaccattgtaaagtcaagtagtaagtcgaaccatcctaagtcagggactgtctgtatatatctgcattttttagtgattgttctactattacagtgtaaatatataacttatgacagtttaataagttatcagcaatttagcactttacttccattaggttcctttagcttacctactaatgtaactatcttaagtaatagtaattcctcttcaaaaattgagcgctatgttgcaagatgtaatttttcttttccttttttttgagaccaagtctcactctgtcacccacgctggagtgctgtgatgcgatctcggctctctgcaacctctgcctcccgggttcaagcaattaactgcctcagcttccctagtaatggattacaggcgcccgccaccacgcctggctaatttttgtatttttagtagagacggggtttcaccatcttggccaggttggtcttgaactcttgacctcatgatccacccgcctcggccccccaaagtgctggggttacaggtgtgagccactgcacccggccacaagatgtaatttttactttatctctcacacgtattttacaaaacgtcatgagaaacattgtctcttgaccttttttttttttttttttttaaagagacagagtctcactctgtcacccaggctggagtgcagtggcacgatctgggctcactgcaacctccgcctcctgggttcgggcgattctcctgcctcagcctcctgagtagctgggattacaggtgtgcgccgccacacccagctaattttgtatttttagtagagacggggtttcaccatgttgctcaggctggtctcaaactcctgaccttgtgatccgccaaccttggcctgtcgacctctttacccattccattgttcattcttctttcttgaaatcccaaaccttctattaacatttcttttcagttatacactgaactttactgtagcctttcttctagagtaacaaatgttctttgttttccttcctctaaagatgtctttatgtttccttcattcccaaagaatatttttgtggaatataagattcagagttggcagttgttttcttttagacttcagagatgtatctctctgttctgtacattattgtttaatataagaaacctactaccattcaaataatcattccctattttacaatgcatcagttctgtcaagcttcattcaaagtgtttttcattgtctctagtgttcagaagtttgggctgtgatgtgcgtggcatggaagtttttgggtgtattctatttggcgctccctggtgcttgcccagctttttgatctgtaggattatgccttttgcaaaatttggggaactttcaactattatttcttcaaatattttttcaccccccagtcttgtcttttttagggacttcaataacatgagtggcagatcttgttttacactcccatgggtccttcaggctctcatcttttttctttttccagtctattttctgtcttgttaatattgattaatttttattgaccttccatggtcctcactgattgttttctttgtcatacctaatctgttgagtttgtgcagtgagttttcattttggttttgtattttccagttgtttaatttccattgggtgggttcttttgtacaccttctgtttctttgcttattttttaacgccaaagaaagactctcagagaatagacaactatattccaaagtcatggttctctggtggtttgtcttgacatttgaatagaaatgttaaactatctgggggaatagaaagcccacagtcttctgagttgtgctacaccaatatttctatgaacagatcttacaactgagagtgatctgcagatttttcagagtcatgttctccatggaatgtttgtaaaattccctagctctctgcactgagctgagatcgtgccactgcactccagcctgggcaacagagcgagactccatctcaaaaaaaaaaaagtcgact

SEQ ID NO: 405484 - DNA, 526 bp, Homo sapiens
aattctaatagtttttattttttgagacattctctcttagccatgaattatttaatagtatgcttaattttctggtgtttggcatatttgttactgatttctaatttgttccatgtttgatctgactgtttaaatgtgttaacatttttttatgacccaggatagggtctatcttgtttcgtatagctgcttgaaaagaatgggtgttctgctgttactgggtggagtttctataaatgtctctatgatcctgctcattgttattcaagtcagctatgtccttgctgattttctgtccagcatttctgtcagttgctgagaggggtgttgaaccactgcacccggccacaagatgtaatttttactttatctctcacacgtattttacaaaacgtcatgagaaacattgtctcttgaccttttttttttttttttttttaaagagacagagtctcactctgtcacccagtgcactccagcctgggcaacagagcgagactccatctcaaaaaaaaaaaagtcgact

SEQ ID NO: 405485 - DNA, 3136 bp, Homo sapiens
ctgtctgtaatatcgcattttttagtgattgttctactattacagtgtaaatatatatcttatgatagttttataagttatcagcgatttagcactgtacttccattaggttcctttagcttacctactaatgttactatcttaagttatagtaattcctcttctaaaattgagcgctattttgcaagatgtaatttgtcttttccttttttttgagaccaagtctcactctgtcacccacgcagaggttgcagtgagctgagatctcaccactgcactccagcctgggcagcagagcgagactctgtctcaacaacaacaacaaaaagtcctgaacatgattgtggaagtgtgttgctctttcaagttctatcactttttgtttgcaaagttcaaagctgtattgtttggtacatatacatgtaggtttgccaagtctttgtggtgaattgactcttctgtcattatgtgatgtcatttttttgccttttaatagtcttgtcaatactttacctgatgttctcatagtgactcctgcatattttgattaatgtttgcatggttaatatttcttcattttattttaaagcttacctgtatcattacttatgaagtcagtttctttgaacagcatatactcaggccatgctttttttattcattctgcatatgtctctcttaattggtatgttgaaatgatttacattaaaataattattgatattttagggcttaagtgtgcccttaaatgatttttgtgttcttttttattgttcctctgttatttggggttgtttactagtcttcctataggttacttcaccttttttttttttaataatttgatttgatacatatgtagtgttttttagtatagatcctccttgacttatgatggggttatgtcacaataaacccattgcaagttgaaaatactatgtcaaatatgcatttaatacacctaccctgctgaacatcatagccgatcttgccttcagaatgctcagaaaatttacattagcctgcagttgggcaaaatcatctaacacaaggcctactttataataaagttactgcaaagaattttaaataaaaattcaagtgtggtttctactgaatgcatgtcgcattcgcaccattgtaaagtcaagtagtaagtcgaaccatcctaagtcagggactgtctgtatatatctgcattttttagtgattgttctactattacagtgtaaatatataacttatgacagtttaataagttatcagcaatttagcactttacttccattaggttcctttagcttacctactaatgtaactatcttaagtaatagtaattcctcttcaaaaattgagcgctatgttgcaagatgtaatttttcttttccttttttttgagaccaagtctcactctgtcacccacgctggagtgctgtgatgcgatctcggctctctgcaacctctgcctcccgggttcaagcaattaactgcctcagcttccctagtaatggattacaggcgcccgccaccacgcctggctaatttttgtatttttagtagagacggggtttcaccatcttggccaggttggtcttgaactcttgacctcatgatccacccgcctcggccccccaaagtgctggggttacaggtgtgagccactgcacccggccacaagatgtaatttttactttatctctcacacgtattttacaaaacgtcatgagaaacattgtctcttgaccttttttttttttttttttttaaagagacagagtctcactctgtcacccaggctggagtgcagtggcacgatctgggctcactgcaacctccgcctcctgggttcgggcgattctcctgcctcagcctcctgagtagctgggattacaggtgtgcgccgccacacccagctaattttgtatttttagtagagacggggtttcaccatgttgctcaggctggtctcaaactcctgaccttgtgatccgccaaccttggcctgtcgacctctttacccattccattgttcattcttctttcttgaaatcccaaaccttctattaacatttcttttcagttatacactgaactttactgtagcctttcttctagagtaacaaatgttctttgttttccttcctctaaagatgtctttatgtttccttcattcccaaagaatatttttgtggaatataagattcagagttggcagttgttttcttttagacttcagagatgtatctctctgttctgtacattattgtttaatataagaaacctactaccattcaaataatcattccctattttacaatgcatcagttctgtcaagcttcattcaaagtgtttttcattgtctctagtgttcagaagtttgggctgtgatgtgcgtggcatggaagtttttgggtgtattctatttggcgctccctggtgcttgcccagctttttgatctgtaggattatgccttttgcaaaatttggggaactttcaactattatttcttcaaatattttttcaccccccagtcttgtcttttttagggacttcaataacatgagtggcagatcttgttttacactcccatgggtccttcaggctctcatcttttttctttttccagtctattttctgtcttgttaatattgattaatttttattgaccttccatggtcctcactgattgttttctttgtcatacctaatctgttgagtttgtgcagtgagttttcattttggttttgtattttccagttgtttaatttccattgggtgggttcttttgtacaccttctgtttctttgcttattttttaacgccaaagaaagactctcagagaatagacaactatattccaaagtcatggttctctggtggtttgtcttgacatttgaatagaaatgttaaactatctgggggaatagaaagcccacagtcttctgagttgtgctacaccaatatttctatgaacagatcttacaactgagagtgatctgcagatttttcagagtcatgttctccatggaatgtttgtaaaattccctagctctctgcactgagctgagatcgtgccactgcactccagcctgggcaacagagcgagactccatctcaaaaaaaaaaaagtcgact

SEQ ID NO: 405486 - DNA, 2893 bp, Homo sapiens
  misc_feature (42)..(42): n is a, c, g, or t
  misc_feature (47)..(47): n is a, c, g, or t
gcacgagaaaatggttcgggccagtgagaagatagctgtctnctgtntgttgtttttcactctgtctcaacaacaacaacaaaaagtcctgaacatgattgtggaagtgtgttgctctttcaagttctatcactttttgtttgcaaagttcaaagctgtattgtttggtacatatacatgtaggtttgccaagtctttgtggtgaattgactcttctgtcattatgtgatgtcatttttttgccttttaatagtcttgtcaatactttacctgatgttctcatagtgactcctgcatattttgattaatgtttgcatggttaatatttcttcattttattttaaagcttacctgtatcattacttatgaagtcagtttctttgaacagcatatactcaggccatgctttttttattcattctgcatatgtctctcttaattggtatgttgaaatgatttacattaaaataattattgatattttagggcttaagtgtgcccttaaatgatttttgtgttcttttttattgttcctctgttatttggggttgtttactagtcttcctataggttacttcaccttttttttttttaataatttgatttgatacatatgtagtgttttttagtatagatcctccttgacttatgatggggttatgtcacaataaacccattgcaagttgaaaatactatgtcaaatatgcatttaatacacctaccctgctgaacatcatagccgatcttgccttcagaatgctcagaaaatttacattagcctgcagttgggcaaaatcatctaacacaaggcctactttataataaagttactgcaaagaattttaaataaaaattcaagtgtggtttctactgaatgcatgtcgcattcgcaccattgtaaagtcaagtagtaagtcgaaccatcctaagtcagggactgtctgtatatatctgcattttttagtgattgttctactattacagtgtaaatatataacttatgacagtttaataagttatcagcaatttagcactttacttccattaggttcctttagcttacctactaatgtaactatcttaagtaatagtaattcctcttcaaaaattgagcgctatgttgcaagatgtaatttttcttttccttttttttgagaccaagtctcactctgtcacccacgctggagtgctgtgatgcgatctcggctctctgcaacctctgcctcccgggttcaagcaattaactgcctcagcttccctagtaatggattacaggcgcccgccaccacgcctggctaatttttgtatttttagtagagacggggtttcaccatcttggccaggttggtcttgaactcttgacctcatgatccacccgcctcggccccccaaagtgctggggttacaggtgtgagccactgcacccggccacaagatgtaatttttactttatctctcacacgtattttacaaaacgtcatgagaaacattgtctcttgaccttttttttttttttttttttaaagagacagagtctcactctgtcacccaggctggagtgcagtggcacgatctgggctcactgcaacctccgcctcctgggttcgggcgattctcctgcctcagcctcctgagtagctgggattacaggtgtgcgccgccacacccagctaattttgtatttttagtagagacggggtttcaccatgttgctcaggctggtctcaaactcctgaccttgtgatccgccaaccttggcctgtcgacctctttacccattccattgttcattcttctttcttgaaatcccaaaccttctattaacatttcttttcagttatacactgaactttactgtagcctttcttctagagtaacaaatgttctttgttttccttcctctaaagatgtctttatgtttccttcattcccaaagaatatttttgtggaatataagattcagagttggcagttgttttcttttagacttcagagatgtatctctctgttctgtacattattgtttaatataagaaacctactaccattcaaataatcattccctattttacaatgcatcagttctgtcaagcttcattcaaagtgtttttcattgtctctagtgttcagaagtttgggctgtgatgtgcgtggcatggaagtttttgggtgtattctatttggcgctccctggtgcttgcccagctttttgatctgtaggattatgccttttgcaaaatttggggaactttcaactattatttcttcaaatattttttcaccccccagtcttgtcttttttagggacttcaataacatgagtggcagatcttgttttacactcccatgggtccttcaggctctcatcttttttctttttccagtctattttctgtcttgttaatattgattaatttttattgaccttccatggtcctcactgattgttttctttgtcatacctaatctgttgagtttgtgcagtgagttttcattttggttttgtattttccagttgtttaatttccattgggtgggttcttttgtacaccttctgtttctttgcttattttttaacgccaaagaaagactctcagagaatagacaactatattccaaagtcatggttctctggtggtttgtcttgacatttgaatagaaatgttaaactatctgggggaatagaaagcccacagtcttctgagttgtgctacaccaatatttctatgaacagatcttacaactgagagtgatctgcagatttttcagagtcatgttctccatggaatgtttgtaaaattccctagctctctgcactgagctgagatcgtgccactgcactccagcctgggcaacagagcgagactccatctcaaaaaaaaaaaagtcgact

SEQ ID NO: 405487 - DNA, 2761 bp, Homo sapiens
ggaatagtgagaaaggccatccttacctggttcctgatagtaggggggacaatgttcagttttttgtttttttgttttttgtttgagacagggtctcgctctgtcacccaggctggagtgcagtggcacgatcttgtctcaccatagccttaagttcctgggctcaagtgatccccccacctcagccctcaccaccccccagtagctggtactacaagcatgcaccaccagtcccagctaatttttgtattttttggtagagacagggtttcaccatggtgcccaggctggtcttgaactcctgggctcaagcaacctgcttgcctgggtctcccaaagtgctgggattacaggcgtgagccacagtgcacagcatgttcagtttttcatcatgaagtataatgtaagttttataaaacatatgtcctctataagggtaaaaaatttcctctgttcccagttttctgagactctgtgttgctatgaataagtgtggaattttgttcagtactttttctccaccagttgatgtcattatgctattttccttctacatcctattgatggaatgtattgctttgatcaagttttgaatattgagccagccttgcatccttagaataaaccatacttgtttgtagagtataattgtttttatatatcatttgacatcattccctttgtttgtattttgttgaggaaatattcctctaatttattggctaataatgtgtagttcttttttcttttgtttcttatgttctaaatgtcttatgtgtggttttgatgtctaggtgatcttgacctttcaacatgaattggaaggagttctcttctaatttttggaagactgtgtagaattggtgttatttgttcttgtcatgtttgatgacctctagtcaaccattgggccagagatttttcttctggaggcttttaaattacatatttattttattggataggtagaactattcgaagtatctatttcttgtgtaataaattttgatagtctgtcctgttgaaggaatatttcatctgtatttgtagcactcccttattcttttgatagcaggatctgcacttctttttatttttaatatttaaaatgtgcatactcattttatgattgagtcttcttagacatttatcagttttattgcgcatcatgctgaaagatgtaatttttgcttcatctctcacttcagagaactagcactttatattaatgatttgtctctattcttgatttctttgatttctgctctgatcggtattatattccactgcacccggccacaagatgtaatttttactttatctctcacacgtattttacaaaacgtcatgagaaacattgtctcttgaccttttttttttttttttttttaaagagacagagtctcactctgtcacccaggctggagtgcagtggcacgatctgggctcactgcaacctccgcctcctgggttcgggcgattctcctgcctcagcctcctgagtagctgggattacaggtgtgcgccgccacacccagctaattttgtatttttagtagagacggggtttcaccatgttgctcaggctggtctcaaactcctgaccttgtgatccgccaaccttggcctgtcgacctctttacccattccattgttcattcttctttcttgaaatcccaaaccttctattaacatttcttttcagttatacactgaactttactgtagcctttcttctagagtaacaaatgttctttgttttccttcctctaaagatgtctttatgtttccttcattcccaaagaatatttttgtggaatataagattcagagttggcagttgttttcttttagacttcagagatgtatctctctgttctgtacattattgtttaatataagaaacctactaccattcaaataatcattccctattttacaatgcatcagttctgtcaagcttcattcaaagtgtttttcattgtctctagtgttcagaagtttgggctgtgatgtgcgtggcatggaagtttttgggtgtattctatttggcgctccctggtgcttgcccagctttttgatctgtaggattatgccttttgcaaaatttggggaactttcaactattatttcttcaaatattttttcaccccccagtcttgtcttttttagggacttcaataacatgagtggcagatcttgttttacactcccatgggtccttcaggctctcatcttttttctttttccagtctattttctgtcttgttaatattgattaatttttattgaccttccatggtcctcactgattgttttctttgtcatacctaatctgttgagtttgtgcagtgagttttcattttggttttgtattttccagttgtttaatttccattgggtgggttcttttgtacaccttctgtttctttgcttattttttaacgccaaagaaagactctcagagaatagacaactatattccaaagtcatggttctctggtggtttgtcttgacatttgaatagaaatgttaaactatctgggggaatagaaagcccacagtcttctgagttgtgctacaccaatatttctatgaacagatcttacaactgagagtgatctgcagatttttcagagtcatgttctccatggaatgtttgtaaaattccctagctctctgcactgagctgagatcgtgccactgcactccagcctgggcaacagagcgagactccatctcaaaaaaaaaaaagtcgact

SEQ ID NO: 405488 - DNA, 739 bp, Homo sapiens
gctttggttgtatttggctctttctaacttttcaaggtggggttttagattattgatttgagatttttttgcttttttaatgtaagcattacattgtataaatttacctcatatcactattggtttgatcccacaagttttaatgttttcattacattttaattctaatagtttttattttttgagacattctctcttagccatgaattatttaatagtatgcttaattttctggtgtttggcatatttgttactgatttctaatttgttccatgtttgatctgactgtttaaatgtgttaacatttttttatgacccaggatagggtctatcttgtttcgtatagctgcttgaaaagaatgggtgttctgctgttactgggtggagtttctataaatgtctctatgatcctgctcattgttattcaagtcagctatgtccttgctgattttctgtccagcatttctgtcagttgctgagaggggtgttgaagtcctgaacataggccgggtgcagtggctcacgcctgtaatcctagcactttgagaccactaaggcgggtggatcacctgaggccaggagttcgagaccagcctggccaacatggcaaaaccctgtctactaaaaatacaaaaattagccgggcatggtggcgtgtgcctgtggtcccagctgctggggggctgaggcaggaggatcagttgaacgtgggaggcagaggttgcagtgagctgagatc

SEQ ID NO: 405489 - DNA, 731 bp, Homo sapiens
gtcggggccgctttgcaggtccctagtcaggaccgagcaggggagtaggataggaatccccgccgcacctttgtacgagcctgaccccttccgtgggtttgttcctgggtcgccgtcaagctgcggtctctcctcccccgcccttcagccccgcggtctccaggggcggcgccctgggtctggaacgcggttgccaccgaggaggcggcggccctgcgtctggaacgccgttgccaccgaggaggcggcggccccgagcgcgcctggaagccccgggcaaccggccagggtcgggcacaggtggggtccgtcaggccgcccggggctcctctgtcccagctctgcggcccagggggtgacgtgatggcggcagcggtgctgacggaccgggcccaggtgtctgtgacctttgatgatgtggctgtgactttcaccaaggaggagtgggggcagctggacctagctcagcggaccctgtaccaggaggtgatgctggaaaactgtgggctcctggtgtctctggcacctttacagacacacccaggatcaatacgttgcatccttcaatccaatcaagttgacacattaataaaaatcccagagcacactgagcattgaatactttctctttaaatttaacgactgttactggtgggaagtattattgtattgatccagaaataaaggctcagagaaatgaaatgatgtttttgaggtaacagctgtcaagt

SEQ ID NO: 405490 - DNA, 424 bp, Homo sapiens
catggtaaagttggtcttctcttaaattgaattccctcaaaaaaggtacttttaaataaatcacattttcttctgaaccccaaaagcatatggaactatcactattaaaataattagtaaacctgggcgttgggaagtacgagagagctcacgtgttggtcactaaagaccagaggccagcattagcttctcagctccaggccctgagtaggagcggggaagatctctgtactcctgagagatcactcgattcccagccctgagttcccctcccagagcactgatgtgggccgggcaggactgcatgcatttgcatctattttagcttcttactgtcaagcgcaaaggaaaaacacctggattctccaatcagaaaggtatttatctcataataagccaatgggaatcagcataatgcaagttg

SEQ ID NO: 405491 - DNA, 2041 bp, Homo sapiens
gaattcggcacgaggttagcaataaggctggagaaggaaaagccggcgcgcccgcggcccgcgcgatttcccgccgagcccgcgtccccggcggcgggcgggctccgggggcgcccgggccgcggcggcgcggcggcgcgagctgcgcctccgggccggtgaatcatcccggcagacaccaagagccgcggcagcagagaggagcgctgaaacatggctgaagcggccacgggctttctggagcagctcaagtcctgcatagtttggtcttggacgtatctgtggaccgtgtggttcttcatcgtgctattcctggtctacatcctgcgggtgcctttgaaaatcaacgacaacttgagcacagtgagcatgtttttgaacacattaacaccgaagttctacgtggccctaacaggcacttcctcactaatatcagggcttattttgatatttgaatggtggtattttcgcaaatacggaacttcattcattgaacaagtctcagtaagccacttgcgcccccttctgggaggggttgacaacaactcttccaacaattctaattccagtaacggggactcagattccaataggcaaagtgtctcagaatgcaaagtatggcgaaatccactaaatttatttaggggtgctgaatacaatcggtatacttgggtgacaggacgagagcctcttacttactatgacatgaatctctctgcccaagaccaccagacattctttacttgtgactcggaccatctgcgtcccgcagatgcaataatgcagaaagcctggagagagagaaacccccaagctaggatttctgcagctcatgaagccttggagataaatgagtgtgcaactgcttatattctcttggctgaagaggaagcaacaaccattgctgaagcagaaaaattatttaagcaggccctgaaggctggagatggctgttaccgacgctctcagcagctacaacatcatggatcccagtatgaagcccaacatagacgagacaccaatgtcttggtgtacatcaaaagaaggctagcaatgtgtgccagaagactcgggaggaccagggaagcagtgaaaatgatgagagatttaatgaaggagttcccccttctgagtatgttcaatatccatgaaaaccttttagaagcccttctggaactacaagcatatgctgatgttcaggcagtcttagcaaagtatgatgatataagcttaccaaagtcagcaacaatatgctacacagctgctttgctcaaagcaagagctgtctctgacaaattctctcctgaggctgcatctcggcgggggctgagcacagcagagatgaatgcagtagaggccattcatagagctgtggaattcaatcctcatgtgccaaaatacctactagaaatgaaaagcttaatcctacccccagaacatatcctgaagagaggagacagtgaagcaatagcatatgcattctttcatcttgcacactggaagagagtggaaggggctttgaatcttttgcattgtacgtgggaaggcacttttcggatgatcccttatcccttggaaaaggggcacctattttatccttacccaatctgtacagaaacagcagaccgagagctgcttccatctttccatgaagtctcagtttacccaaagaaggagcttcccttctttattctctttactgctggattatgttccttcacagccatgctggccctcctgacacatcagttcccggaacttatgggggtcttcgcaaaagctttcctcagcactttgtttgcccccttaaactttgtcatggagaaagtggagagcatcctcccatccagtctgtggcaccagctaacacggatctgagagaagccctgtcctccactcacctcacccgccgctgccaccatctcctctgtgccaactccttgtggaccgcaagaaagcatgactttgaaaaagggaagccattccgagattttaaaatgttcatggactattccatattaaaagctgtttttgttgtaca

SEQ ID NO: 405492 - DNA, 2901 bp, Homo sapiens
gaattcggcacgaggttagcaataaggctggagaaggaaaagccggcgcgcccgcggcccgcgcgatttcccgccgagcccgcgtccccggcggcgggcgggctccgggggcgcccgggccgcggcggcgcggcggcgcgagctgcgcctccgggccggtgaatcatcccggcagacaccaagagccgcggcagcagagaggagcgctgaaacatggctgaagcggccacgggctttctggagcagctcaagtcctgcatagtttggtcttggacgtatctgtggaccgtgtggttcttcatcgtgctattcctggtctacatcctgcgggtgcctttgaaaatcaacgacaacttgagcacagtgagcatgtttttgaacacattaacaccgaagttctacgtggccctaacaggcacttcctcactaatatcagggcttattttgatatttgaatggtggtattttcgcaaatacggaacttcattcattgaacaagtctcagtaagccacttgcgcccccttctgggaggggttgacaacaactcttccaacaattctaattccagtaacggggactcagattccaataggcaaagtgtctcagaatgcaaagtatggcgaaatccactaaatttatttaggggtgctgaatacaatcggtatacttgggtgacaggacgagagcctcttacttactatgacatgaatctctctgcccaagaccaccagacattctttacttgtgactcggaccatctgcgtcccgcagatgcaataatgcagaaagcctggagagagagaaacccccaagctaggatttctgcagctcatgaagccttggagataaatgaaattaggtccagagttgaagttcccctaattgcttcctctaccatctgggagataaaattgttaccaaagtgtgcaactgcttatattctcttggctgaagaggaagcaacaaccattgctgaagcagaaaaattatttaagcaggccctgaaggctggagatggctgttaccgacgctctcagcagctacaacatcatggatcccagtatgaagcccaacatagacgagacaccaatgtcttggtgtacatcaaaagaaggctagcaatgtgtgccagaagactcgggaggaccagggaagcagtgaaaatgatgagagatttaatgaaggagttcccccttctgagtatgttcaatatccatgaaaaccttttagaagcccttctggaactacaagcatatgctgatgttcaggcagtcttagcaaagtatgatgatataagcttaccaaagtcagcaacaatatgctacacagctgctttgctcaaagcaagagctgtctctgacaaattctctcctgaggctgcatctcggcgggggctgagcacagcagagatgaatgcagtagaggccattcatagagctgtggaattcaatcctcatgtgccaaaatacctactagaaatgaaaagcttaatcctacccccagaacatatcctgaagagaggagacagtgaagcaatagcatatgcattctttcatcttgcacactggaagagagtggaaggggctttgaatcttttgcattgtacgtgggaaggcacttttcggatgatcccttatcccttggaaaaggggcacctattttatccttacccaatctgtacagaaacagcagaccgagagctgcttccatctttccatgaagtctcagtttacccaaagaaggagcttcccttctttattctctttactgctggattatgttccttcacagccatgctggccctcctgacacatcagttcccggaacttatgggggtcttcgcaaaagctatgattgacattttctgctcggcagagttcagggactggaattgcaagagtattttcatgcgtgttgaagatgaactggaaatccctccggcacctcaatctcaacatttccaaaactgaactcatcacccctcttcccccaccaccaaaactgctcctcctcctgtattcctgacctccgccatccaccccgttgctcaagccggaaactcggcagcccttccaaactcttccctctctcactccccacatcccatcgtctcggccttcacaatctgtcagttctaacctcctaagcaactaggccttcagtaaatgtgattcacctcttctttccctccttttcccaaagcatccctcttagtctaggtccttgttgtttcttgcctgaactcctgccatagtcttaactggtctccttgcttcctgtcttatcctccaccgtctttcttttatactgacacaagaatggtctttctgaattgcacatgtgagcatgtcacttccctgcttaaatttctccagtggattcccagggacttcaggatcaagtcctagttgttcagcatggcatccaagactctttatgatctggcccttgcttacctctcagccttagctctcccaactcttgcacagtcactgctcttcagccatagtggatcactcaccattcccagatgtaccaggctctcgcacacctctgcacctttgcacgtgctgtttgctgtgcgtggaatgcccttcactgtcaccaccctgctcatccactctactaatgcctcttcattcttttatactcagctttctttaaagttcttctaagctgagttaggtgtctgtcctttatgatcccgcagtattccatgaatacgtatattctcacatttattgtactgtattataattgttgaaaacttgtctgtcccatttagaatgtgagctccttgagagcagaacggtgtcttcattatctctgtatccccaaggctttgcacagtgccttgctcatagtaggttttcaataaatgattattaaataaataataa

SEQ ID NO: 405493 - DNA, 2776 bp, Homo sapiens
gacctgccctgcgctagctacctagccctgcctcactgcatcccagaagaggcacgtcggccttcatttgcctagtggattttcaaaagcagctcttcggtttttggtgctgttaagagaccttgcatttcaatcacacgggagaaaactgaagctcgtaacaggagaatctggcagctggacacagcttggactgcattgtctggcttcatgacccctgctgtggagccggctcatcttttcactttcacatggacactctcctcgcttttctttctttttttttccccttttctttcttctaatttttaaaaagcagcctctggagccagccatgtttggcactgaatcttcagtgagcatgtttttgaacacattaacaccgaagttctacgtggccctaacaggcacttcctcactaatatcagggcttattttgatatttgaatggtggtattttcgcaaatacggaacttcattcattgaacaagtctcagtaagccacttgcgcccccttctgggaggggttgacaacaactcttccaacaattctaattccagtaacggggactcagattccaataggcaaagtgtctcagaatgcaaagtatggcgaaatccactaaatttatttaggggtgctgaatacaatcggtatacttgggtgacaggacgagagcctcttacttactatgacatgaatctctctgcccaagaccaccagacattctttacttgtgactcggaccatctgcgtcccgcagatgcaataatgcagaaagcctggagagagagaaacccccaagctaggatttctgcagctcatgaagccttggagataaatgagtgtgcaactgcttatattctcttggctgaagaggaagcaacaaccattgctgaagcagaaaaattatttaagcaggccctgaaggctggagatggctgttaccgacgctctcagcagctacaacatcatggatcccagtatgaagcccaacatagacgagacaccaatgtcttggtgtacatcaaaagaaggctagcaatgtgtgccagaagactcgggaggaccagggaagcagtgaaaatgatgagagatttaatgaaggagttcccccttctgagtatgttcaatatccatgaaaaccttttagaagcccttctggaactacaagcatatgctgatgttcaggcagtcttagcaaagtatgatgatataagcttaccaaagtcagcaacaatatgctacacagctgctttgctcaaagcaagagctgtctctgacaaattctctcctgaggctgcatctcggcgggggctgagcacagcagagatgaatgcagtagaggccattcatagagctgtggaattcaatcctcatgtgccaaaatacctactagaaatgaaaagcttaatcctacccccagaacatatcctgaagagaggagacagtgaagcaatagcatatgcattctttcatcttgcacactggaagagagtggaaggggctttgaatcttttgcattgtacgtgggaaggcacttttcggatgatcccttatcccttggaaaaggggcacctattttatccttacccaatctgtacagaaacagcagaccgagagctgcttccatctttccatgaagtctcagtttacccaaagaaggagcttcccttctttattctctttactgctggattatgttccttcacagccatgctggccctcctgacacatcagttcccggaacttatgggggtcttcgcaaaagctttcctcagcactttgtttgcccccttaaactttgtcatggagaaagtggagagcatcctcccatccagtctgtggcaccagctaacacggatctgagagaagccctgtcctccactcacctcacccgccgctgccaccatctcctctgtgccaactccttgtggaccgcaagaaagcatgactttgaaaaagggaagccattccgagattttaaaatgttcatggactattccatattaaaagctgtttttgttgtacaaaattcactgatgttcagttctattttattttgccttcagaaaagaagaaagtcaaaaataaaacttttgtgtattacagcaaaaaaaaaaaaaaaaaaaaaaaaaaaaaaaaaaaaaaaaaaaaaaaaaaaaaaaaaaaaaaaaaaaaaaaaagggggggcgcccccacaaacataaaacccaagagaggagcacaccaaaagaaaagacaacacagtaacaacaacaacagggagcgacaaaaagagaaacaataaaaaacgagagaaaaagcgagcgcacaaaagaaaaaacaaagaggaggaggaaaacaagcacgcacgaacgacacaaaaaggagagaagaacaagcacaaagacaagggaagacgcaacaaacaacgagaggacacacaaaagaaacgaaaagagacaagacacacaaaggaaagagaaaaaaccacacaacaaaacaaacgaagcatacaaaaggccgcacacacacgacgaagaaacgacaaagaagcgaacaaaagacagaaaaagcacaacagcaagacaacataacacaaacaacaatgcaaaggaagcaacagacaaaaaaagagacgacacaaaaaacgaaagcacacgaaaaaagaaggaacaaaacaagcaaaaaggacgaaaaagaagagaagagagaagcaagagaaaaagaacaaaaacgaacagaagaacagacagaaaaaaagaaaagcagaaaaccaacagacaacaaaaa

SEQ ID NO: 405494 - DNA, 1597 bp, Homo sapiens
cctcagactgcacgttttccctgagctctctactgatataagcttaccaaagtcagcaacaatatgctacacagctgctttgctcaaagcaagagctgtctctgacaaattctctcctgaggctgcatctcggcgggggctgagcacagcagagatgaatgcagtagaggccattcatagagctgtggaattcaatcctcatgtgccaaaatacctactagaaatgaaaagcttaatcctacccccagaacatatcctgaagagaggagacagtgaagcaatagcatatgcattctttcatcttgcacactggaagagagtggaaggggctttgaatcttttgcattgtacgtgggaaggcacttttcggatgatcccttatcccttggaaaaggggcacctattttatccttacccaatctgtacagaaacagcagaccgagagctgcttccatctttccatgaagtctcagtttacccaaagaaggagcttcccttctttattctctttactgctggattatgttccttcacagccatgctggccctcctgacacatcagttcccggaacttatgggggtcttcgcaaaagctttcctcagcactttgtttgcccccttaaactttgtcatggagaaagtggagagcatcctcccatccagtctgtggcaccagctaacacggatctgagagaagccctgtcctccactcacctcacccgccgctgccaccatctcctctgtgccaactccttgtggaccgcaagaaagcatgactttgaaaaagggaagccattccgagattttaaaatgttcatggactattccatattaaaagctgtttttgttgtacaaaattcactgatgttcagttctattttattttgccttcagaaaagaagaaagtcaaaaataaaacttttgtgtattacagcaaaaaaaaaaaaaaaaaaaaaaaaaaaaaaaaaaaaaaaaaaaaaaaaaaaaaaaaaaaaaaaaaaaaaaaaagggggggcgcccccacaaacataaaacccaagagaggagcacaccaaaagaaaagacaacacagtaacaacaacaacagggagcgacaaaaagagaaacaataaaaaacgagagaaaaagcgagcgcacaaaagaaaaaacaaagaggaggaggaaaacaagcacgcacgaacgacacaaaaaggagagaagaacaagcacaaagacaagggaagacgcaacaaacaacgagaggacacacaaaagaaacgaaaagagacaagacacacaaaggaaagagaaaaaaccacacaacaaaacaaacgaagcatacaaaaggccgcacacacacgacgaagaaacgacaaagaagcgaacaaaagacagaaaaagcacaacagcaagacaacataacacaaacaacaatgcaaaggaagcaacagacaaaaaaagagacgacacaaaaaacgaaagcacacgaaaaaagaaggaacaaaacaagcaaaaaggacgaaaaagaagagaagagagaagcaagagaaaaagaacaaaaacgaacagaagaacagacagaaaaaaagaaaagcagaaaaccaacagacaacaaaaa

SEQ ID NO: 405495 - DNA, 1715 bp, Homo sapiens
agaggctgcctagaaacatgcattaacaggtgcttcttgggccaccctagcctgaagaaggacaaccagagagtataacagtggcacctcaatgccttggccttgaggaccctcagtgtcccttcaggcctccagatttgaggggaggctctagcatgttctggctgcagctattgtcttcagggattctgcagcttgtagctgcttggggtacttctaccaattggagctgggctgttggagtcatctccactgcctaccaccaggacaagcagagaagttacctactagaaatgaaaagcttaatcctacccccagaacatatcctgaagagaggagacagtgaagcaatagcatatgcattctttcatcttgcacactggaagagagtggaaggggctttgaatcttttgcattgtacgtgggaaggcacttttcggatgatcccttatcccttggaaaaggggcacctattttatccttacccaatctgtacagaaacagcagaccgagagctgcttccatctttccatgaagtctcagtttacccaaagaaggagcttcccttctttattctctttactgctggattatgttccttcacagccatgctggccctcctgacacatcagttcccggaacttatgggggtcttcgcaaaagctatgattgacattttctgctcggcagagttcagggactggaattgcaagagtattttcatgcgtgttgaagatgaactggaaatccctccggcacctcaatctcaacatttccaaaactgaactcatcacccctcttcccccaccaccaaaactgctcctcctcctgtattcctgacctccgccatccaccccgttgctcaagccggaaactcggcagcccttccaaactcttccctctctcactccccacatcccatcgtctcggccttcacaatctgtcagttctaacctcctaagcaactaggccttcagtaaatgtgattcacctcttctttccctccttttcccaaagcatccctcttagtctaggtccttgttgtttcttgcctgaactcctgccatagtcttaactggtctccttgcttcctgtcttatcctccaccgtctttcttttatactgacacaagaatggtctttctgaattgcacatgtgagcatgtcacttccctgcttaaatttctccagtggattcccagggacttcaggatcaagtcctagttgttcagcatggcatccaagactctttatgatctggcccttgcttacctctcagccttagctctcccaactcttgcacagtcactgctcttcagccatagtggatcactcaccattcccagatgtaccaggctctcgcacacctctgcacctttgcacgtgctgtttgctgtgcgtggaatgcccttcactgtcaccaccctgctcatccactctactaatgcctcttcattcttttatactcagctttctttaaagttcttctaagctgagttaggtgtctgtcctttatgatcccgcagtattccatgaatacgtatattctcacatttattgtactgtattataattgttgaaaacttgtctgtcccatttagaatgtgagctccttgagagcagaacggtgtcttcattatctctgtatccccaaggctttgcacagtgccttgctcatagtaggttttcaataaatgattattaaataaataataa

SEQ ID NO: 405496 - DNA, 1967 bp, Homo sapiens
gaattcggcacgaggttagcaataaggctggagaaggaaaagccggcgcgcccgcggcccgcgcgatttcccgccgagcccgcgtccccggcggcgggcgggctccgggggcgcccgggccgcggcggcgcggcggcgcgagctgcgcctccgggccggtgaatcatcccggcagacaccaagagccgcggcagcagagaggagcgctgaaacatggctgaagcggccacgggctttctggagcagctcaagtcctgcatagtttggtcttggacgtatctgtggaccgtgtggttcttcatcgtgctattcctggtctacatcctgcgggtgcctttgaaaatcaacgacaacttgagcacagtgagcatgtttttgaacacattaacaccgaagttctacgtggccctaacaggcacttcctcactaatatcagggcttattttgatatttgaatggtggtattttcgcaaatacggaacttcattcattgaacaagtctcagtaagccacttgcgcccccttctgggaggggttgacaacaactcttccaacaatttcagattccaataggcaaagtgtctcagaatgcaaagtatggcgaaatccactaaatttatttaggggtgctgaatacaatcggtatacttgggtgacaggacgagagcctcttacttactatgacatgaatctctctgcccaagaccaccagacattctttacttgtgactcggaccatctgcgtcccgcagatgcaataatgcagaaagcctggagagagagaaacccccaagctaggatttctgcagctcatgaagccttggagataaatgagtgtgcaactgcttatattctcttggctgaagaggaagcaacaaccattgctgaagcagaaaaattatttaagcaggccctgaaggctggagatggctgttaccgacgctctcagcagctacaacatcatggatcccagtatgaagcccaacatagacgagacaccaatgtcttggtgtacatcaaaagaaggctagcaatgtgtgccagaagactcgggaggaccagggaagcagtgaaaatgatgagagatttaatgaaggagttcccccttctgagtatgttcaatatccatgaaaaccttttagaagcccttctggaactacaagcatatgctgatgttcaggcagtcttagcaaagtatgatgatataagcttaccaaagtcagcaacaatatgctacacagctgctttgctcaaagcaagagctgtctctgacaaattctctcctgaggctgcatctcggcgggggctgagcacagcagagatgaatgcagtagaggccattcatagagctgtggaattcaatcctcatgtgccaaaatacctactagaaatgaaaagcttaatcctacccccagaacatatcctgaagagaggagacagtgaagcaatagcatatgcattctttcatcttgcacactggaagagagtggaaggggctttgaatcttttgcattgtacgtgggaaggcacttttcggatgatcccttatcccttggaaaaggggcacctattttatccttacccaatctgtacagaaacagcagaccgagagctgcttccatctttccatgaagtctcagtttacccaaagaaggagcttcccttctttattctctttactgctggattatgttccttcacagccatgctggccctcctgacacatcagttcccggaacttatgggggtcttcgcaaaagctatgattgacattttctgctcggcagagttcagggactggaattgcaagagtattttcatgcgtgttgaagatgaactggaaatccctccggcacctcaatctcaacatatacctatgagatgtaataagaattcgtgctcggacacccgattctgttgcttgttcttgttcccggacttcctccaaccatccccttttcgggctt

SEQ ID NO: 405497 - DNA, 1787 bp, Homo sapiens
gaattcggcacgaggttagcaataaggctggagaaggaaaagccggcgcgcccgcggcccgcgcgatttcccgccgagcccgcgtccccggcggcgggcgggctccgggggcgcccgggccgcggcggcgcggcggcgcgagctgcgcctccgggccggtgaatcatcccggcagacaccaagagccgcggcagcagagaggagcgctgaaacatggctgaagcggccacgggctttctggagcagctcaagtcctgcatagtttggtcttggacgtatctgtggaccgtgtggttcttcatcgtgctattcctggtctacatcctgcgggtgcctttgaaaatcaacgacaacttgagcacagtgagcatgtttttgaacacattaacaccgaagttctacgtggccctaacaggcacttcctcactaatatcagggcttattttgatatttgaatggtggtattttcgcaaatacggaacttcattcattgaacaagtctcagtaagccacttgcgcccccttctgggaggggttgacaacaactcttccaacaatttcagattccaataggcaaagtgtctcagaatgcaaagtatggcgaaatccactaaatttatttaggggtgctgaatacaatcggtatacttgggtgacaggacgagagcctcttacttactatgacatgaatctctctgcccaagaccaccagacattctttacttgtgactcggaccatctgcgtcccgcagatgcaataatgcagaaagcctggagagagagaaacccccaagctaggatttctgcagctcatgaagccttggagataaatgagtgtgcaactgcttatattctcttggctgaagaggaagcaacaaccattgctgaagcagaaaaattatttaagcaggccctgaaggctggagatggctgttaccgacgctctcagcagctacaacatcatggatcccagtatgaagcccaacatagacgagacaccaatgtcttggtgtacatcaaaagaaggctagcaatgtgtgccagaagactcgggaggaccagggaagcagtgaaaatgatgagagatttaatgaaggagttcccccttctgagtatgttcaatatccatgaaaaccttttagaagcccttctggaactacaagcatatgctgatgttcaggcagtcttagcaaagtatgatgatataagcttaccaaagtcagcaacaatatgctacacagctgctttgctcaaagcaagagctgtctctgacaaattctctcctgaggctgcatctcggcgggggctgagcacagcagagatgaatgcagtagaggccattcatagagctgtggaattcaatcctcatgtgccaaaatacctactagaaatgaaaagcttaatcctacccccagaacatatcctgaagagaggagacagtgaagcaatagcatatgcattctttcatcttgcacactggaagagagtggaaggggctttgaatcttttgcattgtacgtgggaaggcacttttcggatgatcccttatcccttggaaaaggggcacctattttatccttacccaatctgtacagaaacagcagaccgagagctgcttccatctttccatgaagtctcagtttacccaaagaaggagcttcccttctttattctctttactgctggattatgttccttcacagccatgctggccctcctgacacatcagttcccggaacttatgggggtcttcgcaaaagctgtgagtgtttgcctagagggaggcc

SEQ ID NO: 405498 - DNA, 1166 bp, Homo sapiens
tttgaccatcagctgatgtttcctgtaaacataaagatgaaatggttgccttttgagactttcgtaatgcagagacttaagctgcaagcgtgggtggagaggtttgttttatagtcttgaacaaggtttctgctgacttctgtgtctgtctggtttctttgcagttcctcagcactttgtttgcccccttaaactttgtcatggagaaagtggagagcatcctcccatccagtctgtggcaccagctaacacggatctgagagaagccctgtcctccactcacctcacccgccgctgccaccatctcctctgtgccaactccttgtggaccgcaagaaagcatgactttgaaaaagggaagccattccgagattttaaaatgttcatggactattccatattaaaagctgtttttgttgtacaaaattcactgatgttcagttctattttattttgccttcagaaaagaagaaagtcaaaaataaaacttttgtgtattacagcaaaaaaaaaaaaaaaaaaaaaaaaaaaaaaaaaaaaaaaaaaaaaaaaaaaaaaaaaaaaaaaaaaaaaaaaagggggggcgcccccacaaacataaaacccaagagaggagcacaccaaaagaaaagacaacacagtaacaacaacaacagggagcgacaaaaagagaaacaataaaaaacgagagaaaaagcgagcgcacaaaagaaaaaacaaagaggaggaggaaaacaagcacgcacgaacgacacaaaaaggagagaagaacaagcacaaagacaagggaagacgcaacaaacaacgagaggacacacaaaagaaacgaaaagagacaagacacacaaaggaaagagaaaaaaccacacaacaaaacaaacgaagcatacaaaaggccgcacacacacgacgaagaaacgacaaagaagcgaacaaaagacagaaaaagcacaacagcaagacaacataacacaaacaacaatgcaaaggaagcaacagacaaaaaaagagacgacacaaaaaacgaaagcacacgaaaaaagaaggaacaaaacaagcaaaaaggacgaaaaagaagagaagagagaagcaagagaaaaagaacaaaaacgaacagaagaacagacagaaaaaaagaaaagcagaaaaccaacagacaacaaaaa

SEQ ID NO: 405499 - DNA, 355 bp, Homo sapiens
cattgactcccccagcgaaatgtttccagattctattaagttttcgctctttccaaagcttttcctcttcagcctataaaaagcaagcagctatttgcttcattcccaggggtacttctaccaattggagctgggctgttggagtcatctccactgcctaccaccaggacaagcagagaagtgtgagtggaagagagagaggtggcagggaaatctcccttagtgtgagctgtgtggtcaggggtcccaggtgcccacagtcatagaggaggtaggggcccacttgaaaatcaccagatgcttttttcagaccaggcctgagtggttttttgtctcccagcctgggttgcttata

SEQ ID NO: 405500 - DNA, 2845 bp, Homo sapiens
gacctgccctgcgctagctacctagccctgcctcactgcatcccagaagaggcacgtcggccttcatttgcctagtggattttcaaaagcagctcttcggtttttggtgctgttaagagaccttgcatttcaatcacacgggagaaaactgaagctcgtaacaggagaatctggcagctggacacagcttggactgcattgtctggcttcatgacccctgctgtggagccggctcatcttttcactttcacatggacactctcctcgcttttctttctttttttttccccttttctttcttctaatttttaaaaagcagcctctggagccagccatgtttggcactgaatcttcagtgagcatgtttttgaacacattaacaccgaagttctacgtggccctaacaggcacttcctcactaatatcagggcttattttgatatttgaatggtggtattttcgcaaatacggaacttcattcattgaacaagtctcagtaagccacttgcgcccccttctgggaggggttgacaacaactcttccaacaattctaattccagtaacggggactcagattccaataggcaaagtgtctcagaatgcaaagtatggcgaaatccactaaatttatttaggggtgctgaatacaatcggtatacttgggtgacaggacgagagcctcttacttactatgacatgaatctctctgcccaagaccaccagacattctttacttgtgactcggaccatctgcgtcccgcagatgcaataatgcagaaagcctggagagagagaaacccccaagctaggatttctgcagctcatgaagccttggagataaatgaaattaggtccagagttgaagttcccctaattgcttcctctaccatctgggagataaaattgttaccaaagtgtgcaactgcttatattctcttggctgaagaggaagcaacaaccattgctgaagcagaaaaattatttaagcaggccctgaaggctggagatggctgttaccgacgctctcagcagctacaacatcatggatcccagtatgaagcccaacatagacgagacaccaatgtcttggtgtacatcaaaagaaggctagcaatgtgtgccagaagactcgggaggaccagggaagcagtgaaaatgatgagagatttaatgaaggagttcccccttctgagtatgttcaatatccatgaaaaccttttagaagcccttctggaactacaagcatatgctgatgttcaggcagtcttagcaaagtatgatgatataagcttaccaaagtcagcaacaatatgctacacagctgctttgctcaaagcaagagctgtctctgacaaattctctcctgaggctgcatctcggcgggggctgagcacagcagagatgaatgcagtagaggccattcatagagctgtggaattcaatcctcatgtgccaaaatacctactagaaatgaaaagcttaatcctacccccagaacatatcctgaagagaggagacagtgaagcaatagcatatgcattctttcatcttgcacactggaagagagtggaaggggctttgaatcttttgcattgtacgtgggaaggcacttttcggatgatcccttatcccttggaaaaggggcacctattttatccttacccaatctgtacagaaacagcagaccgagagctgcttccatctttccatgaagtctcagtttacccaaagaaggagcttcccttctttattctctttactgctggattatgttccttcacagccatgctggccctcctgacacatcagttcccggaacttatgggggtcttcgcaaaagctttcctcagcactttgtttgcccccttaaactttgtcatggagaaagtggagagcatcctcccatccagtctgtggcaccagctaacacggatctgagagaagccctgtcctccactcacctcacccgccgctgccaccatctcctctgtgccaactccttgtggaccgcaagaaagcatgactttgaaaaagggaagccattccgagattttaaaatgttcatggactattccatattaaaagctgtttttgttgtacaaaattcactgatgttcagttctattttattttgccttcagaaaagaagaaagtcaaaaataaaacttttgtgtattacagcaaaaaaaaaaaaaaaaaaaaaaaaaaaaaaaaaaaaaaaaaaaaaaaaaaaaaaaaaaaaaaaaaaaaaaaaagggggggcgcccccacaaacataaaacccaagagaggagcacaccaaaagaaaagacaacacagtaacaacaacaacagggagcgacaaaaagagaaacaataaaaaacgagagaaaaagcgagcgcacaaaagaaaaaacaaagaggaggaggaaaacaagcacgcacgaacgacacaaaaaggagagaagaacaagcacaaagacaagggaagacgcaacaaacaacgagaggacacacaaaagaaacgaaaagagacaagacacacaaaggaaagagaaaaaaccacacaacaaaacaaacgaagcatacaaaaggccgcacacacacgacgaagaaacgacaaagaagcgaacaaaagacagaaaaagcacaacagcaagacaacataacacaaacaacaatgcaaaggaagcaacagacaaaaaaagagacgacacaaaaaacgaaagcacacgaaaaaagaaggaacaaaacaagcaaaaaggacgaaaaagaagagaagagagaagcaagagaaaaagaacaaaaacgaacagaagaacagacagaaaaaaagaaaagcagaaaaccaacagacaacaaaaa

SEQ ID NO: 405501 - DNA, 2764 bp, Homo sapiens
gaattcggcacgaggttagcaataaggctggagaaggaaaagccggcgcgcccgcggcccgcgcgatttcccgccgagcccgcgtccccggcggcgggcgggctccgggggcgcccgggccgcggcggcgcggcggcgcgagctgcgcctccgggccggtgaatcatcccggcagacaccaagagccgcggcagcagagaggagcgctgaaacatggctgaagcggccacgggctttctggagcagctcaagtcctgcatagtttggtcttggacgtatctgtggaccgtgtggttcttcatcgtgctattcctggtctacatcctgcgggtgcctttgaaaatcaacgacaacttgagcacagtgagcatgtttttgaacacattaacaccgaagttctacgtggccctaacaggcacttcctcactaatatcagggcttattttgatatttgaatggtggtattttcgcaaatacggaacttcattcattgaacaagtctcagtaagccacttgcgcccccttctgggaggggttgacaacaactcttccaacaatttcagattccaataggcaaagtgtctcagaatgcaaagtatggcgaaatccactaaatttatttaggggtgctgaatacaatcggtatacttgggtgacaggacgagagcctcttacttactatgacatgaatctctctgcccaagaccaccagacattctttacttgtgactcggaccatctgcgtcccgcagatgcaataatgcagaaagcctggagagagagaaacccccaagctaggatttctgcagctcatgaagccttggagataaatgagtgtgcaactgcttatattctcttggctgaagaggaagcaacaaccattgctgaagcagaaaaattatttaagcaggccctgaaggctggagatggctgttaccgacgctctcagcagctacaacatcatggatcccagtatgaagcccaacatagacgagacaccaatgtcttggtgtacatcaaaagaaggctagcaatgtgtgccagaagactcgggaggaccagggaagcagtgaaaatgatgagagatttaatgaaggagttcccccttctgagtatgttcaatatccatgaaaaccttttagaagcccttctggaactacaagcatatgctgatgttcaggcagtcttagcaaagtatgatgatataagcttaccaaagtcagcaacaatatgctacacagctgctttgctcaaagcaagagctgtctctgacaaattctctcctgaggctgcatctcggcgggggctgagcacagcagagatgaatgcagtagaggccattcatagagctgtggaattcaatcctcatgtgccaaaatacctactagaaatgaaaagcttaatcctacccccagaacatatcctgaagagaggagacagtgaagcaatagcatatgcattctttcatcttgcacactggaagagagtggaaggggctttgaatcttttgcattgtacgtgggaaggcacttttcggatgatcccttatcccttggaaaaggggcacctattttatccttacccaatctgtacagaaacagcagaccgagagctgcttccatctttccatgaagtctcagtttacccaaagaaggagcttcccttctttattctctttactgctggattatgttccttcacagccatgctggccctcctgacacatcagttcccggaacttatgggggtcttcgcaaaagctttcctcagcactttgtttgcccccttaaactttgtcatggagaaagtggagagcatcctcccatccagtctgtggcaccagctaacacggatctgagagaagccctgtcctccactcacctcacccgccgctgccaccatctcctctgtgccaactccttgtggaccgcaagaaagcatgactttgaaaaagggaagccattccgagattttaaaatgttcatggactattccatattaaaagctgtttttgttgtacaaaattcactgatgttcagttctattttattttgccttcagaaaagaagaaagtcaaaaataaaacttttgtgtattacagcaaaaaaaaaaaaaaaaaaaaaaaaaaaaaaaaaaaaaaaaaaaaaaaaaaaaaaaaaaaaaaaaaaaaaaaaagggggggcgcccccacaaacataaaacccaagagaggagcacaccaaaagaaaagacaacacagtaacaacaacaacagggagcgacaaaaagagaaacaataaaaaacgagagaaaaagcgagcgcacaaaagaaaaaacaaagaggaggaggaaaacaagcacgcacgaacgacacaaaaaggagagaagaacaagcacaaagacaagggaagacgcaacaaacaacgagaggacacacaaaagaaacgaaaagagacaagacacacaaaggaaagagaaaaaaccacacaacaaaacaaacgaagcatacaaaaggccgcacacacacgacgaagaaacgacaaagaagcgaacaaaagacagaaaaagcacaacagcaagacaacataacacaaacaacaatgcaaaggaagcaacagacaaaaaaagagacgacacaaaaaacgaaagcacacgaaaaaagaaggaacaaaacaagcaaaaaggacgaaaaagaagagaagagagaagcaagagaaaaagaacaaaaacgaacagaagaacagacagaaaaaaagaaaagcagaaaaccaacagacaacaaaaa

SEQ ID NO: 405502 - DNA, 2683 bp, Homo sapiens
gaattcggcacgaggttagcaataaggctggagaaggaaaagccggcgcgcccgcggcccgcgcgatttcccgccgagcccgcgtccccggcggcgggcgggctccgggggcgcccgggccgcggcggcgcggcggcgcgagctgcgcctccgggccggtgaatcatcccggcagacaccaagagccgcggcagcagagaggagcgctgaaacatggctgaagcggccacgggctttctggagcagctcaagtcctgcatagtttggtcttggacgtatctgtggaccgtgtggttcttcatcgtgctattcctggtctacatcctgcgggtgcctttgaaaatcaacgacaacttgagcacagtgagcatgtttttgaacacattaacaccgaagttctacgtggccctaacaggcacttcctcactaatatcagggcttattttgatatttgaatggtggtattttcgcaaatacggaacttcattcattgaacaagtctcagtaagccacttgcgcccccttctgggaggggttgacaacaactcttccaacaatttcagattccaataggcaaagtgtctcagaatgcaaagtatggcgaaatccactaaatttatttaggggtgctgaatacaatcggtatacttgggtgacaggacgagagcctcttacttactatgacatgaatctctctgcccaagaccaccagacattctttacttgtgactcggaccatctgcgtcccgcagatgcaataatgcagaaagcctggagagagagaaacccccaagctaggatttctgcagctcatgaagccttggagataaatgagtgtgcaactgcttatattctcttggctgaagaggaagcaacaaccattgctgaagcagaaaaattatttaagcaggccctgaaggctggagatggctgttaccgacgctctcagcagctacaacatcatggatcccagtatgaagcccaacatagacgagacaccaatgtcttggtgtacatcaaaagaaggctagcaatgtgtgccagaagactcgggaggaccagggaagcagtgaaaatgatgagagatttaatgaaggagttcccccttctgagtatgttcaatatccatgaaaaccttttagaagcccttctggaactacaagcatatgctgatgttcaggcagtcttagcaaagtatgatgatataagcttaccaaagtcagcaacaatatgctacacagctgctttgctcaaagcaagagctgtctctgacaaattctctcctgaggctgcatctcggcgggggctgagcacagcagagatgaatgcagtagaggccattcatagagctgtggaattcaatcctcatgtgccaaaatacctactagaaatgaaaagcttaatcctacccccagaacatatcctgaagagaggagacagtgaagcaatagcatatgcattctttcatcttgcacactggaagagagtggaaggggctttgaatcttttgcattgtacgtgggaaggcacttttcggatgatcccttatcccttggaaaaggggcacctattttatccttacccaatctgtacagaaacagcagaccgagagctgcttccatccatgctggccctcctgacacatcagttcccggaacttatgggggtcttcgcaaaagctttcctcagcactttgtttgcccccttaaactttgtcatggagaaagtggagagcatcctcccatccagtctgtggcaccagctaacacggatctgagagaagccctgtcctccactcacctcacccgccgctgccaccatctcctctgtgccaactccttgtggaccgcaagaaagcatgactttgaaaaagggaagccattccgagattttaaaatgttcatggactattccatattaaaagctgtttttgttgtacaaaattcactgatgttcagttctattttattttgccttcagaaaagaagaaagtcaaaaataaaacttttgtgtattacagcaaaaaaaaaaaaaaaaaaaaaaaaaaaaaaaaaaaaaaaaaaaaaaaaaaaaaaaaaaaaaaaaaaaaaaaaagggggggcgcccccacaaacataaaacccaagagaggagcacaccaaaagaaaagacaacacagtaacaacaacaacagggagcgacaaaaagagaaacaataaaaaacgagagaaaaagcgagcgcacaaaagaaaaaacaaagaggaggaggaaaacaagcacgcacgaacgacacaaaaaggagagaagaacaagcacaaagacaagggaagacgcaacaaacaacgagaggacacacaaaagaaacgaaaagagacaagacacacaaaggaaagagaaaaaaccacacaacaaaacaaacgaagcatacaaaaggccgcacacacacgacgaagaaacgacaaagaagcgaacaaaagacagaaaaagcacaacagcaagacaacataacacaaacaacaatgcaaaggaagcaacagacaaaaaaagagacgacacaaaaaacgaaagcacacgaaaaaagaaggaacaaaacaagcaaaaaggacgaaaaagaagagaagagagaagcaagagaaaaagaacaaaaacgaacagaagaacagacagaaaaaaagaaaagcagaaaaccaacagacaacaaaaa

SEQ ID NO: 405503 - DNA, 1972 bp, Homo sapiens
gaattcggcacgaggttagcaataaggctggagaaggaaaagccggcgcgcccgcggcccgcgcgatttcccgccgagcccgcgtccccggcggcgggcgggctccgggggcgcccgggccgcggcggcgcggcggcgcgagctgcgcctccgggccggtgaatcatcccggcagacaccaagagccgcggcagcagagaggagcgctgaaacatggctgaagcggccacgggctttctggagcagctcaagtcctgcatagtttggtcttggacgtatctgtggaccgtgtggttcttcatcgtgctattcctggtctacatcctgcgggtgcctttgaaaatcaacgacaacttgagcacagtgagcatgtttttgaacacattaacaccgaagttctacgtggccctaacaggcacttcctcactaatatcagggcttattttgatatttgaatggtggtattttcgcaaatacggaacttcattcattgaacaagtctcagtaagccacttgcgcccccttctgggaggggttgacaacaactcttccaacaatttcagattccaataggcaaagtgtctcagaatgcaaagtatggcgaaatccactaaatttatttaggggtgctgaatacaatcggtatacttgggtgacaggacgagagcctcttacttactatgacatgaatctctctgcccaagaccaccagacattctttacttgtgactcggaccatctgcgtcccgcagatgcaataatgcagaaagcctggagagagagaaacccccaagctaggatttctgcagctcatgaagccttggagataaatgagtgtgcaactgcttatattctcttggctgaagaggaagcaacaaccattgctgaagcagaaaaattatttaagcaggccctgaaggctggagatggctgttaccgacgctctcagcagctacaacatcatggatcccagtatgaagcccaacatagacgagacaccaatgtcttggtgtacatcaaaagaaggctagcaatgtgtgccagaagactcgggaggaccagggaagcagtgaaaatgatgagagatttaatgaaggagttcccccttctgagtatgttcaatatccatgaaaaccttttagaagcccttctggaactacaagcatatgctgatgttcaggcagtcttagcaaagtatgatgatataagcttaccaaagtcagcaacaatatgctacacagctgctttgctcaaagcaagagctgtctctgacaaattctctcctgaggctgcatctcggcgggggctgagcacagcagagatgaatgcagtagaggccattcatagagctgtggaattcaatcctcatgtgccaaaatacctactagaaatgaaaagcttaatcctacccccagaacatatcctgaagagaggagacagtgaagcaatagcatatgcattctttcatcttgcacactggaagagagtggaaggggctttgaatcttttgcattgtacgtgggaaggcacttttcggatgatcccttatcccttggaaaaggggcacctattttatccttacccaatctgtacagaaacagcagaccgagagctgcttccatctttccatgaagtctcagtttacccaaagaaggagcttcccttctttattctctttactgctggattatgttccttcacagccatgctggccctcctgacacatcagttcccggaacttatgggggtcttcgcaaaagctatgattgacattttctgctcggcagagttcagggactggaattgcaagagtattttcatgcgtgttgaagatgaactggaaatccctccggcacctcaatctcaacatttccaaaactgaactcatcacccctttagccctcccagctgcctgctaccccttcctgtgtgctgttctattgatccatttctagggtgtcctctgccctat

SEQ ID NO: 405504 - DNA, 1231 bp, Homo sapiens
tctcgaccaataggaagtaggctaaggcgcagaggcggaaagtgtggctacatgagcaggcgtcagagccaatcagccttgagcctcgttcccgtcgtccagcccgcggcgagagcgggtatgtgggcgggaggccggagcagctgtcaggctgaagtcctgcgagcgacgcgcggcggggcggcgagaggaaacgcggcgccgggccgggccctggagatggtccccggcgccgcgggctggtgttgtctcgtgctctggctccccgcgtgcgtcgcggcccacggcttccgtatccatgattatttgtactttcaagtgctgagtcctggggacattcgatacatcttcacagccacacctgccaaggactttggtggtatctttcacacaaggtatgagcagattcaccttgtccccgctgaacctccagaggcctgcggggaactcagcaacggtttcttcatccaggaccagattgctctggtggagagggggggctgctccttcctctccaagactcgggtggtccaggagcacggcgggcgggcggtgatcatctctgacaacgcagttgacaatgacagcttctacgtggagatgatccaggacagtacccagcgcacagctgacatccccgccctcttcctgctcggccgagacggctacatgatccgccgctctctggaacagcatgggctgccatgggccatcatttccatcccagtcaatgtcaccagcatccccacctttgagctgctgcaaccgccctggaccttctggtagaagagtttgtcccacattccagccataagtgactctgagctgggaaggggaaacccaggaattttgctacttggaatttggagatagcatctggggacaagtggagccaggtagaggaaaagggtttgggcgttgctaggctgaaagggaagccacaccactggccttcccttccccagggcccccaagggtgtctcatgctacaagaagaggcaagagacaggccccagggcttctggctagaacccgaaacaaaaggagctgaaggcaggtggcctgagagccatctgtgacctgtcacactcacctggctccagcctcccctacccagggtctctgcacagtgaccttcacagcagttgttggagtggtttaaagagctggtgtttggggactcaataaaccctcactgactttttagcaataaagcttctcatcagggttg

SEQ ID NO: 405505 - DNA, 625 bp, Homo sapiens
tctcgaccaataggaagtaggctaaggcgcagaggcggaaagtgtggctacatgagcaggcgtcagagccaatcagccttgagcctcgttcccgtcgtccagcccgcggcgagagcgggtatgtgggcgggaggccggagcagctgtcaggctgaagtcctgcgagcgacgcgcggcggggcggcgagaggaaacgcggcgccgggccgggccctggagatggtccccggcgccgcgggctggtgttgtctcgtgctctggctccccgcgtgcgtcgcggcccacggcttccgtatccatgattatttgtactttcaagtgctgagtcctggggacattcgatacatcttcacagccacacctgccaagggtgtctcatgctacaagaagaggcaagagacaggccccagggcttctggctagaacccgaaacaaaaggagctgaaggcaggtggcctgagagccatctgtgacctgtcacactcacctggctccagcctcccctacccagggtctctgcacagtgaccttcacagcagttgttggagtggtttaaagagctggtgtttggggactcaataaaccctcactgactttttagcaataaagcttctcatcagggttg

SEQ ID NO: 405506 - DNA, 991 bp, Homo sapiens
ggcggccgagaggtccaggcgccggtggtttttcttttggtcccgctgttccgccacggtccgaaccaggataatgcacttcaaggcggagtctgggccattcgaaaatctccagccacactgcccaaggacttcggtggtatctttcacacaaggtatgagcagattcaccttgtccccgctgaacctccagaggcctgcggggaactcagcaacggtttcttcatccaggaccagattgctctggtggagagggggggctgctccttcctctccaagactcgggtggtccaggagcacggcgggcgggcggtgatcatctctgacaacgcagttgacaatgacagcttctacgtggagatgatccaggacagtacccagcgcacagctgacatccccgccctcttcctgctcggccgagacggctacatgatccgccgctctctggaacagcatgggctgccatgggccatcatttccatcccagtcaatgtcaccagcatccccacctttgagctgctgcaaccgccctggaccttctggtagaagagtttgtcccacattccagccataagtgactctgagctgggaaggggaaacccaggaattttgctacttggaatttggagatagcatctggggacaagtggagccaggtagaggaaaagggtttgggcgttgctaggctgaaagggaagccacaccactggccttcccttccccagggcccccaagggtgtctcatgctacaagaagaggcaagagacaggccccagggcttctggctagaacccgaaacaaaaggagctgaaggcaggtggcctgagagccatctgtgacctgtcacactcacctggctccagcctcccctacccagggtctctgcacagtgaccttcacagcagttgttggagtggtttaaagagctggtgtttggggactcaataaaccctcactgactttttagcaataaagcttctcatcagggttg

SEQ ID NO: 405507 - DNA, 269 bp, Homo sapiens
ggtctggggaagggggagctaggacctgtctttcctttggtcttatcaccacctcttccaggggctgctccttcctctccaagactcgggtggtccaggagcacggcgggcgggcggtgatcatctctgacaacgcagttgacaatgacagcttctacgtggagatgatccaggacagtacccagcgcacagctgacatccccgccctcttcctgctcggccgagacgggtgagggctccttgcctctggctttatcagcaccaggctg

SEQ ID NO: 405508 - DNA, 1778 bp, Homo sapiens
tctcgaccaataggaagtaggctaaggcgcagaggcggaaagtgtggctacatgagcaggcgtcagagccaatcagccttgagcctcgttcccgtcgtccagcccgcggcgagagcgggtatgtgggcgggaggccggagcagctgtcaggctgaagtcctgcgagcgacgcgcggcggggcggcgagaggaaacgcggcgccgggccgggccctggagatggtccccggcgccgcgggctggtgttgtctcgtgctctggctccccgcgtgcgtcgcggcccacggcttccgtatccatgattatttgtactttcaagtgctgagtcctggggacattcgatacatcttcacagccacacctgccaaggactttggtggtatctttcacacaaggtatgagcagattcaccttgtccccgctgaacctccagaggcctgcggggaactcagcaacggtttcttcatccaggaccagattgctctggtggagagggggggctgctccttcctctccaagactcgggtggtccaggagcacggcgggcgggcggtgatcatctctgacaacgcagttgacaatgacagcttctacgtggagatgatccaggacagtacccagcgcacagctgacatccccgccctcttcctgctcggccgagacggctacatgatccgccgctctctggaacagcatgggctgccatgggccatcatttccatcccagtcaatgtcaccagcatccccacctttgagctgctgcaaccgccctggaccttctggtagaagagtttgtcccacattccagccataagtgactctgagctgggaaggggaaacccaggaattttgctacttggaatttggagatagcatctggggacaagtggagccaggtagaggaaaagggtttgggcgttgctaggctgaaagggaagccacaccactggccttcccttccccagggcccccaagggtgtctcatgctacaagaagaggcaagagacaggccccagggcttctggctagaacccgaaacaaaaggagctgaaggcaggtggcctgagagccatctgtgacctgtcacactcacctggctccagcctcccctacccagggtctctgcacagtgaccttcacagcagttgttggagtggtttaaagagctggtgtttggggactcaataaaccctcactgactttttagcaataaagcttctcatcagggttgaaaaaaaaaaacaaccaaaacaaacaacaaacacgatatactcagtaaacagaaatggaaataacaagagaggggggggggcccatttataaaaaattacccccggggggggcgccaataatataagtacacacccagatgattttatcgataacaacggtgggcccccaaaaagagggtgaggcttatatatcagcttctactagcgcgggggcagcactatataacaacagctgcgtagttcggctgggaaacaacacgtgtgtccgacgcctgcagcgaatcatcttttggaggaagaaagccaccacccaaatacatcacaggggggggggggccgaaccactatattggcgcccaacaacttccatcccagcagcagaactattatcgaacgcctccagggaggcgaggaaataatatagacccatgttcgtgcaggtgcatcaatatgagtgggtagaacccacaccaggtagactatcgcacggtcaggtacaggaaaattgggtagcaagaggcgatacatgtagaagaaacttttgcc

SEQ ID NO: 405509 - DNA, 1209 bp, Homo sapiens
tctcgaccaataggaagtaggctaaggcgcagaggcggaaagtgtggctacatgagcaggcgtcagagccaatcagccttgagcctcgttcccgtcgtccagcccgcggcgagagcgggtatgtgggcgggaggccggagcagctgtcaggctgaagtcctgcgagcgacgcgcggcggggcggcgagaggaaacgcggcgccgggccgggccctggagatggtccccggcgccgcgggctggtgttgtctcgtgctctggctccccgcgtgcgtcgcggcccacggcttccgtatccatgattatttgtactttcaagtgctgagtcctggggacattcgatacatcttcacagccacacctgccaaggactttggtggtatctttcacacaaggtatgagcagattcaccttgtccccgctgaacctccagaggcctgcggggaactcagcaacggtttcttcatccaggaccagattgctctggtggagaggggactcgggtggtccaggagcacggcgggcgggcggtgatcatctctgacaacgcagttgacaatgacagcttctacgtggagatgatccaggacagtacccagcgcacagctgacatccccgccctcttcctgctcggccgagacggctacatgatccgccgctctctggaacagcatgggctgccatgggccatcatttccatcccagtcaatgtcaccagcatccccacctttgagctgctgcaaccgccctggaccttctggtagaagagtttgtcccacattccagccataagtgactctgagctgggaaggggaaacccaggaattttgctacttggaatttggagatagcatctggggacaagtggagccaggtagaggaaaagggtttgggcgttgctaggctgaaagggaagccacaccactggccttcccttccccagggcccccaagggtgtctcatgctacaagaagaggcaagagacaggccccagggcttctggctagaacccgaaacaaaaggagctgaaggcaggtggcctgagagccatctgtgacctgtcacactcacctggctccagcctcccctacccagggtctctgcacagtgaccttcacagcagttgttggagtggtttaaagagctggtgtttggggactcaataaaccctcactgactttttagcaataaagcttctcatcagggttg

SEQ ID NO: 405510 - DNA, 778 bp, Homo sapiens
caggtcaccatgttttctaaaatagccgaaagattcccacatagctgaatctagtaaaatgattctcatccttggtacacaagcagaatcacctggggaactctaaaaaatactgatgcttaggcccccaccattcccatttcattggttagggaacagcttgggcatggggaggtttaaatgctccccattgattctaatgagcagccagggttgagaatcactagccacactctacactacaaccttacctgcttttgaaaaagggtaaaatgcgcagtctaataatgtagggaaccttgccaaaccctgagctccaccctagaattgaaatcatagcaatggaaaccttttatgtttatcttcttttttttcttttttgagatggagtctcgctctgttacaaggctggagagcagtggtgcaatctcggctcactgcaaactccacctcccgggctcaagcaattctcctgcctcagcctcccgagtagctgggattacaggcatgagccaccgcacctggccatttctttatcttttataggtgcatgatctgcagggtaacacatacagaaattattttgtgtggcatcataattccatgccctattaaagggtggggactggaatttatccactgccaacctaaccccatatgtgaactcagaacagaaaaaatgctcagaaaaaagggtggtctgtgattgacaaatagaacccaggattgtaaatacatttgctggtgttcagtaaagtttagtaaagttgaatttcat

SEQ ID NO: 405511 - DNA, 167 bp, Homo sapiens
cgaggctggccctgggtcattgcgtggtctgggctgaagacagcagtagcctgtgctggcacacagctgtggagctggagggagatgggagggttcagagtgtagcgtggaggtaaactgatcaggcttgctgatggatcagatgttggggaatgaaaaaggatagg

SEQ ID NO: 405512 - DNA, 717 bp, Homo sapiens
ggtttgcaaagggagtagcctccagtccttctgttacttaggtgtggaaagttggggttttccttttgatttagttctacgaagtcagagtgaatcagccttaggttccctgcctccagaccctattctcctgcctcacaagagttgaagaaagaccaccagtgaaatgttgataagccgaggtatagatgagaatcccaaactgagacagcttaagaaatgtccagagtcttgtaacaagtgaaaatgtcatatgtcatgaggtcatgttggaaaaccttaaagaggataaaagatcttccacaagcaacagtacttccccttcctgctgccatgtgaagaaggacgtgtttgcttccccatctgctgtgattataagttttctgaggcctcctcagccctgcagaactgacatccaagctgcatgaggagaggctcacgtagggggaaaccgaggtttgcagcagcgactcgccaggcgtgtgagtgagccaacctggaagcagatcctccagttccagtgaagtgtgtggatgacatcagctccagccttcattttgaccacaactcatgagatgccctaagccagaaccacccttgaagctgcttttaaattccgaaagtggaaataatatattttattgttttaaatcactacattttggggtagtgatttgttttgcatgccatttgttatgttgcaatggataaccaata

SEQ ID NO: 405513 - DNA, 492 bp, Homo sapiens
gagtgaaagataagactaattatactgcctgtatgactgagaaagaaggatgaccttgtcccatatgctaaaggacctgaaatctagagaacaacttgacacatctatttccagccagagcagcagtgactggcaggaagacaaagaggaggcgggtctataaggaagacgtctggttggcagcggacatccaagctgcatgaggagaggctcacgtagggggaaaccgaggtttgcagcagcgactcgccaggcgtgtgagtgagccaacctggaagcagatcctccagttccagtgaagtgtgtggatgacatcagctccagccttcattttgaccacaactcatgagatgccctaagccagaaccacccttgaagctgcttttaaattccgaaagtggaaataatatattttattgttttaaatcactacattttggggtagtgatttgttttgcatgccatttgttatgttgcaatggataaccaata

SEQ ID NO: 405514 - DNA, 456 bp, Homo sapiens
agtcctgagggccaagatggcaaactggttccaccaagccaagcaagcccaaaccatcgctacccaggatggaagcctcatttcgccagggccacccatgaggcaagcgaatgaaatattcacctggactcaccatcatcaacacttcaagaaaactgtggtttggatgatcaaaaccatttaccatcccagccagcctgcccccttccaaaagaaagagcatgtttcagcaccaactcctacaaagaagagtgactgctttaaaacagggacggtcagatgggctaatttcctgaatgtttcccaaatatttcttttcatttcttcctataagagatgctttccacaaataccaaggtattgattttccaattgatcgaggtggagaatgtttcatacagttatgactcctgacaagtggggaataaaaagccaatcataatgaaatcatttact

SEQ ID NO: 405515 - DNA, 298 bp, Homo sapiens
tcaggtccagcaaaggtgtggagatggggatgctcagggcttatgagtacacggggttgtctgaagcaagtggtatatgaaaggagcaattggaaataggacagcaaaaaagccaacaacagtggcaggagggggccttgaatgggaggtaagtggtatctgctcccttgtaagtagtggggagtaactggaagtgtctacacacaataggagattgacttgggttatgtttagaaagattgatagctggacttcgtgctttagtgggaaaatcaatgaactcaaagtatgatggata

SEQ ID NO: 405516 - DNA, 192 bp, Homo sapiens
tggcagcaatggaacacactctgcagtgccctgccccccaccgtggcccacacctgctccaccacctgacagactgacccatgcgggagcgcgatttacatctgttgaatgaatgagtaaatgaatggcacccagttttattgttatgactgtttcttatgccaggctttggaaaacactggattgggtgct

SEQ ID NO: 405517 - DNA, 593 bp, Homo sapiens
accattgcatttagttgcatctgaccttcaaaagaacagaaactgcttgaaggcaagggtattgtttgctatttcctgccaatatacaccaggcttgggacggtgctccatgaatgaccagctcttaaaaatgtccttgcacaaatgatttgcctctcccctggctctgaagcagcctgccatataaagaagctgtttttattttgtactcttcttaataaatcacaaaatcttctgaatttgcaattttggaagtttaagaattatttctttaaatgatatgtttataatgagatttatagaaacataattccccaaacaagctcctgtatcattttagattctcataattggatctggaactttgatgattcttcagaatctgaatgttttttttccttccctaaggaagaagttttgtggagaagatgagggctgattctgtgatttctctgaattagggtgtgaggcaagctggcttttggtttagaaccatgggatttagctggggcatcctgcaatcgcctgatgttttcagcattaagatggaaacaaatactttaagagagaaaattgcttaagtgaaaccatgt

SEQ ID NO: 405518 - DNA, 8192 bp, Homo sapiens
  misc_feature (7146)..(7146): n is a, c, g, or t
  misc_feature (7204)..(7204): n is a, c, g, or t
  misc_feature (7431)..(7431): n is a, c, g, or t
  misc_feature (7471)..(7471): n is a, c, g, or t
  misc_feature (7566)..(7566): n is a, c, g, or t
gccgcgggaggggcgcgggggcagacaaagccgcggtaatgaatggagcgtccgcccgcgccgccgtcgtccgcagccggccgggagccgccccagaggccgggccgaggtaatgcacaagggtcacgtgtatgctctcaagatgatcaggcagatcctgtcctcaggaccagaagcacgtctctgctgcacacattgttgtctacaccatgagtgtttagtagcaggactcttggaaagcagtgatctatgctgtaagaccatgagtcacagattctttttttcagtactatttatgattagccatatttctagaaacatcctgaaagatggaattatgacgaaaaagtgaagataatctacattcgggggcacaaatgagcacttggatcagtgttttatgaacctaagatacagccggagtagttatggtcagtcatggagaataacttgaaaacttgtcccaaagaggacggtgatttcgtttctgataaaataaagtttaaaatagaagaggaagatgatgatggaattcctcctgatagtttggaaagaatggactttaaaagcgagcaggaggacatgaagcagacagacagcggtggggagcgagcgggcctcggtgggacgggttgcagctgcaagcccccggggaagtacttgtctgcagagagtgaggatgactatggcgcgctgttctcccagtacagcagcaccctatacgacgtggccatggaggccgtgacccagagcctcctttccagccggaacatgagctccaggaagaagtctccagcctggaagcatttttttatctctccccgagacagcactaaagcaatatgcatgtactgtgtgaaggagttcagcagaggcaaaaacgagaaagacttgagtaccagttgtctcatgaggcacgtgaggcgcgcacacccgaccgtgctcattcaggaaaatggcagcgtgtctgccgtgtcctcgttcccctctccctcactcctgcttccaccgcagcctgcggacgcgggtgacctcagcaccatcctctcacccatcaaacttgtccagaaagtggcgtctaagatcccgtcccccgatcgaataacagaggagtctgtgtctgtagtttcttctgaagaaatctcctctgacatgtccgtttcggagaagtgcggcagagaagaagccctggtggggtcgtctccccacctccctgctctccattacgatgaacctgcagagaacttagcggagaagagccttccacttccaaagagcacctctgggtccaggagaaggtccgctgtctggaagcacttctacctgtcgccactggacaactccaaagctgtctgcattcactgcatgaacgagttcagccgggggaagaatgggaaggacctgggcacgagctgcctcatcaggcacatgtggagggcacaccgcgccatcgtgttgcaggagaacgggggcacgggcatcccgccactgtactccacccctcccactctgctgccttccttgctgccgccggagggggagctcagctctgtgtcctcgtctccggtaaagccggtcagagagtccccttcggcctcctcctcccctgacaggctgactgaggacttgcagtctcacttgaaccctggagatgggctgatggaagacgtggcggccttctcatcttccgatgacgtaggggaggcctcggcgtcctctcctgagaagcagcaggctgatgggctgagtcctagattgtttgaatctggtgccatcttccagcagaataaaaaggtcatgaaaagactgaagtcggaggtctggcatcacttctccctggcccccatggacagcctcaaggccgagtgtcggtactgcggctgtgccatcagccgggggaagaagggtgatgtgggcaccagctgcctgatgagacatctctaccggcgccatccagaagttgtcgggagccagaagggcttcctgggtgcaagtctggcaaactctccgtatgccactttggcctctgcagaaagttcctcttccaaattgactgacttgccaacagtggtcacaaaaaacaatcaagttatgtttcctgttaatagcaaaaagacctcgaagctgtggaatcatttttctatttgctccgcagactccacaaaagtcgtgtgcttgcactgtggccggaccatcagccgggggaagaagccgactaacttgggtaccagctgtcttctgagacatttacagcggttccatagcaacgtgctgaaaactgaggtctcggagacggctcggccctcctctccggacacccgggtgccgcggggcacagaattatcaggcgcttcctcttttgatgacaccaatgagaagttttacgattctcacccagttgccaaaaaaatcacaagtctcatagctgaaatgattgcacttgacctccagccatattcttttgtagacaacgttggctttaacaggctgcttgaatacttgaaacctcagtactccctccccgccccttcctacttctccaggacagctatcccaggtatgtatgataatgtgaagcagataattatgtcccaccttaaggaagctgagagtggtgtgatccacttcacgtctggaatatggatgagtaaccagacccgtgagtacctgaccctcacggcccactgggtttccttcgagtcgccagcccggccgcgctgtgacgaccaccactgctcggcgctgttggacgtgtcgcaggtggactgcgactacagtggcaacagcattcagaagcagctggagtgctggtgggaagcgtgggtgacctccaccggccttcaggtgggcatcaccgtcaccgacaacgccagcatcgggaagacgctgaacgagggggagcactcgagcgtgcagtgcttcagccatacggtgaacctgatcgtcagcgaggccattaagagccagcggatggtgcagaacctgctgagcctcgcccggaagatctgcgagcgggtgcaccggtcgcccaaggcgaaggagaaactggccgagctgcagagggagtacgcgctgcctcagcatcacctcatccaggacgtcccgtccaagtggagcacttccttccacatgctcgagcggctcattgagcagaaaagggccattaacgagatgtccgtcgagtgtaacttccgagagctgatcagctgcgaccagtgggaggtcatgcagtccgtgtgccgtgcgctaaagcccttcgaggccgcgagccgggagatgagcacgcagatgtccaccctcagccaggtcatccccatggtacacatcctcaacaggaaggtggagatgctcttcgaggagacgatgggcatcgacaccatgctgcgctctctgaaggaggccatggtgagccgcctgtctgccaccctccacgacccgcggtacgtcttcgccacgctgctggatcctcgctacaaggcctccctgtttacggaggaggaggcggagcagtacaaacaggatttaatcagggaactcgaactcatgaattctacctcagaggacgtggctgcctcccacaggtgtgatgctggctccccgtcgaaagactctgccgcagaggagaacctgtggtcacttgtggccaaggtgaagaagaaagacccaagagaaaagctgcctgaagccatggtgcttgcgtatctggaggaggaggtgcttgaacacagctgtgacccgctcacctactggaacctgaagaaggcgtcctggccggggctgtccgcgctggccgtcagatttttgggctgccccccaagcatcgtcccttcagaaaagctgttcaacacacccactgagaacggtagccttggccaatccaggctcatgatggaacattttgaaaaacttatctttttgaaagtgaatcttcccttaatatactttcagtattgaaactcacgacggcaccactaggccagaggcgtggctgccccagcgttagcagcctgtaccaggtctatgacccgctctgcccacggctgtgtacgacatcagaccaggcactctcagggccgctctccagctcaccacagtgtctccacgtgccttaccccttctccttcaggccaagtttcgcggggtgttttattaagacgtccactagaaatagcttgtcctgtcaactatgaaatatggtgactagattttaattcataaccgtaaagttttttaaagttttgggttagtaatttgttttactagaatgacaaagaagatgtaaaccattttattctgtaggctttttactcaattatgtacaaaccacaaatcaggtactgtattttagtgaagcattgctttaattgcaacagaatagcttttgtggctatcaaatgaaatctgtaaataggaggtggagggcaagccatcctgactgagcagtttttaaccgcaggttctaaagtgtcccgcggagtacagataatattctggaaggtaactgtttactacgacagagacgtggcatttggaaacgaaacttagatgtttcatggagcttattttgagaactttcccatttcaggtttctgcattcaggctttacatggtcagttaactcagagataccccagctgtttatcatcagctcctctgaaatgtgatccctttgtaactgtgctcatcacttcgccagtgcgttcaatgacacgctgatggcaggtggtccctgctgaaacccccacgcctccgcttcagcatctccacgctctgaagctgtctttcaaaatgtgtgcactgacccccttgtttgatcaaatttgtgtaaaatttttttagaagagatggcttattaacagggaagaagcttgttatattccagttgtaagaatagccttagtgtttagatttttttatgatagggaagatgcggccatcactgggatattttcaaatcccaaggacatcagagtgaagtgtcagttgtcagatgattttaaaagttatgtcttcagagaaaaaaagattcattttctcattttaagccaattaaatattctgagtgagactaatcactcatttgcctacgaccttttagaaaagttgttttgttgaaatactgtacgtacgcttaatctaaatttgcattgactatgttttagtgtatttataaatggtgaactcagtttctgaaattaaacttcttatttgcaattctagtgctggcagacactggctttttatttttaggataagaaaacaggcatattctttgtggtccattatctagagcccatacttgggcagcatttgaaatttcaccttaaccacagacagggctccagggaagtggagatgtaattcttacaacaacagttctgatcatggccatggtgatgactttccaggtctcgtgttcaagtggtgccagaatgcaggagccggtgggcagccctgaggggttgccttggccgcagcctctgtgcacgctcttcctggtgtcctcttacccggtagctgtgcgcttgttcccgtgagaacagcctgcttccagagtgcccaggagtgctggtcagggacagtgcccgtgaggctgcagaggaggtggggtccatggcccacccatctctccctcgccagcagccctggccagtgtcatcctggtgtagaaagggttgcgcacaggataggagggagccacagttcttgcttagctgtgctcacgaccggcttgcagtcctgtgtttcttaagattgtatttggaatggtaatatccttagaattttgggatattgagcttcatggattttctctccaaaacaagccagcacaactaactgtagcagaattgtatccactcattcattcaactgagatgaagtgccctcccttttccagggcctgggctagttcctggaatgcaacagagatttccgtggacacagtctctagtctcacagagcatatagtctagtccacgattggcaagctgcaaccacagacccagtccggcactctgcccatttttctaagtgaaattttcttggaatacagtcacagctgtttttttaacatggtgtcttggctactttcaggctgcgacgggagaattgaatagttgtgacagagaccacaggcccactgaaagggacaaacagggctgaaaatactcactgtttggccctttccagaatagcaagtttgctggcccttgagctagcctgcctttatggggttttttttgtttgtttttttaagctttcagcttcatgctgctgtatttttagttgaagtgttctgagtaacagtcagtgtataaaaggggattgcagaaaaaaatgagggcttgctttactcaacagaaaatatggcccttcctgaatgacactaggagagtcattttatctcatacattcccttcatttcgttggtggacatttgttgaaaccggcactcaatggtcaaaccgtctgtgccctccagttgctgacagtcctgcaggaagatggacaagaggcccagtgctgacagtcacacgactctcactacttgaatgaggggactgtgggtgcaactagaaaatatgttgattcttagccattcccaccttgcctctccgttcagaaccccagctgcgagctgtttgtttccctgcctggaaatgatgttttaggcaggttccttaatttctcaggtctgtctcagataataaaaagctctttgtatgagcctcagaactgtctcttcagtgaatgaaattaccagtcattatacgaagggactttaaaaaatttgtggaaatactgaagtaaaagatgataaaaaaataaaaactttatttcttggctgggcacagtggcttatgtttgtaatcccagtactttgggaggctgaggtgggaggactgcttgaggccaggagttcaagaaattagccaggtttggtagtgcatgcctgtagtcccagctacttgggaggcagagggaggaggattacttgagcccaggagtttgaggttgcagtgagctgtgatcacaccactgcactctagcctggacaacagagcaagatcctctctcttaaaaccaccaacaatgacaacaacaaaacaacatttttatttctcaatgtaagctccatcaagntcaagatacttttgtaagctgtgacaccagccatttagtccacctctaaagaattgcnggctctgggaatttaaccatgtcagtgcagcctttttaacattattaacggaagaaaaaatgagtgcttttaaagattttttaaaatgaggaaacaaagtcagaaggagcaaaatcgggactgtaaggtggatgcctaatgatttcccaacaaaactcttgaagaattgcccttatttgatgagaagaatgagccaggagcattgtcatcgtggagaaagacactgntgaggctttcctgggtgtgtttttgctaaagcttcggctnactttctcaaaacactctcataataagatgttattgtggccagatgcggtggctcacgcctgtaatcccagcactttgggaggctgaggtgggcngatcacgaggtcaggaaatcgagaccatcctggctaacatggtgaaaccccgtcccgtctccactaaaaatacaaaaaattagctgggcgtggtggcaggcacctctagtcccagctactccagctactcggaaggctgaggcaggagaatggcgtgaacctgggaggcagagcttgcagctagctgagattgtgccactgcactccagcctgggcgacagagcgagactccatctcaaaaaaaaaaaaaaatgttctttggccctccagaaagtcaacaagcaaaatgcattgagcatcccaagaaactgttgccatgaccttactttgacttgtccacatttgccttgactaggccacttctacctcttggtagccattgctttgattgtggtttgtcttcaggatggtactggtaaagtcctgttccatctcctgttataattcaaggaaatgcttcagggtcttgatgccacttgtttaaaatttccattgaaagctctgctcttgtctgcagctgatctgggcacaacggttttggcacccatcgagtggaaagcttgctcaacttcaattttgaaccagttgagatgtctgtggtcttggctattgttctgttaatcgtc

SEQ ID NO: 405519 - DNA, 7267 bp, Homo sapiens
  misc_feature (6221)..(6221): n is a, c, g, or t
  misc_feature (6279)..(6279): n is a, c, g, or t
  misc_feature (6506)..(6506): n is a, c, g, or t
  misc_feature (6546)..(6546): n is a, c, g, or t
  misc_feature (6641)..(6641): n is a, c, g, or t
cagcggaacaagcaaggaaggcagcagagtgggaggggtggagtacagtggcgggatgcccgtgcccccgttctcctgcaacacgatggcctgcggacgcgggtgacctcagcaccatcctctcacccatcaaacttgtccagaaagtggcgtctaagatcccgtcccccgatcgaataacagaggagtctgtgtctgtagtttcttctgaagaaatctcctctgacatgtccgtttcggagaagtgcggcagagaagaagccctggtggggtcgtctccccacctccctgctctccattacgatgaacctgcagagaacttagcggagaagagccttccacttccaaagagcacctctgggtccaggagaaggtccgctgtctggaagcacttctacctgtcgccactggacaactccaaagctgtctgcattcactgcatgaacgagttcagccgggggaagaatgggaaggacctgggcacgagctgcctcatcaggcacatgtggagggcacaccgcgccatcgtgttgcaggagaacgggggcacgggcatcccgccactgtactccacccctcccactctgctgccttccttgctgccgccggagggggagctcagctctgtgtcctcgtctccggtaaagccggtcagagagtccccttcggcctcctcctcccctgacaggctgactgaggacttgcagtctcacttgaaccctggagatgggctgatggaagacgtggcggccttctcatcttccgatgacgtaggggaggcctcggcgtcctctcctgagaagcagcaggctgatgggctgagtcctagattgtttgaatctggtgccatcttccagcagaataaaaaggtcatgaaaagactgaagtcggaggtctggcatcacttctccctggcccccatggacagcctcaaggccgagtgtcggtactgcggctgtgccatcagccgggggaagaagggtgatgtgggcaccagctgcctgatgagacatctctaccggcgccatccagaagttgtcgggagccagaagggcttcctgggtgcaagtctggcaaactctccgtatgccactttggcctctgcagaaagttcctcttccaaattgactgacttgccaacagtggtcacaaaaaacaatcaagttatgtttcctgttaatagcaaaaagacctcgaagctgtggaatcatttttctatttgctccgcagactccacaaaagtcgtgtgcttgcactgtggccggaccatcagccgggggaagaagccgactaacttgggtaccagctgtcttctgagacatttacagcggttccatagcaacgtgctgaaaactgaggtctcggagacggctcggccctcctctccggacacccgggtgccgcggggcacagaattatcaggcgcttcctcttttgatgacaccaatgagaagttttacgattctcacccagttgccaaaaaaatcacaagtctcatagctgaaatgattgcacttgacctccagccatattcttttgtagacaacgttggctttaacaggctgcttgaatacttgaaacctcagtactccctccccgccccttcctacttctccaggacagctatcccaggtatgtatgataatgtgaagcagataattatgtcccaccttaaggaagctgagagtggtgtgatccacttcacgtctggaatatggatgagtaaccagacccgtgagtacctgaccctcacggcccactgggtttccttcgagtcgccagcccggccgcgctgtgacgaccaccactgctcggcgctgttggacgtgtcgcaggtggactgcgactacagtggcaacagcattcagaagcagctggagtgctggtgggaagcgtgggtgacctccaccggccttcaggtgggcatcaccgtcaccgacaacgccagcatcgggaagacgctgaacgagggggagcactcgagcgtgcagtgcttcagccatacggtgaacctgatcgtcagcgaggccattaagagccagcggatggtgcagaacctgctgagcctcgcccggaagatctgcgagcgggtgcaccggtcgcccaaggcgaaggagaaactggccgagctgcagagggagtacgcgctgcctcagcatcacctcatccaggacgtcccgtccaagtggagcacttccttccacatgctcgagcggctcattgagcagaaaagggccattaacgagatgtccgtcgagtgtaacttccgagagctgatcagctgcgaccagtgggaggtcatgcagtccgtgtgccgtgcgctaaagcccttcgaggccgcgagccgggagatgagcacgcagatgtccaccctcagccaggtcatccccatggtacacatcctcaacaggaaggtggagatgctcttcgaggagacgatgggcatcgacaccatgctgcgctctctgaaggaggccatggtgagccgcctgtctgccaccctccacgacccgcggtacgtcttcgccacgctgctggatcctcgctacaaggcctccctgtttacggaggaggaggcggagcagtacaaacaggatttaatcagggaactcgaactcatgaattctacctcagaggacgtggctgcctcccacaggtgtgatgctggctccccgtcgaaagactctgccgcagaggagaacctgtggtcacttgtggccaaggtgaagaagaaagacccaagagaaaagctgcctgaagccatggtgcttgcgtatctggaggaggaggtgcttgaacacagctgtgacccgctcacctactggaacctgaagaaggcgtcctggccggggctgtccgcgctggccgtcagatttttgggctgccccccaagcatcgtcccttcagaaaagctgttcaacacacccactgagaacggtagccttggccaatccaggctcatgatggaacattttgaaaaacttatctttttgaaagtgaatcttcccttaatatactttcagtattgaaactcacgacggcaccactaggccagaggcgtggctgccccagcgttagcagcctgtaccaggtctatgacccgctctgcccacggctgtgtacgacatcagaccaggcactctcagggccgctctccagctcaccacagtgtctccacgtgccttaccccttctccttcaggccaagtttcgcggggtgttttattaagacgtccactagaaatagcttgtcctgtcaactatgaaatatggtgactagattttaattcataaccgtaaagttttttaaagttttgggttagtaatttgttttactagaatgacaaagaagatgtaaaccattttattctgtaggctttttactcaattatgtacaaaccacaaatcaggtactgtattttagtgaagcattgctttaattgcaacagaatagcttttgtggctatcaaatgaaatctgtaaataggaggtggagggcaagccatcctgactgagcagtttttaaccgcaggttctaaagtgtcccgcggagtacagataatattctggaaggtaactgtttactacgacagagacgtggcatttggaaacgaaacttagatgtttcatggagcttattttgagaactttcccatttcaggtttctgcattcaggctttacatggtcagttaactcagagataccccagctgtttatcatcagctcctctgaaatgtgatccctttgtaactgtgctcatcacttcgccagtgcgttcaatgacacgctgatggcaggtggtccctgctgaaacccccacgcctccgcttcagcatctccacgctctgaagctgtctttcaaaatgtgtgcactgacccccttgtttgatcaaatttgtgtaaaatttttttagaagagatggcttattaacagggaagaagcttgttatattccagttgtaagaatagccttagtgtttagatttttttatgatagggaagatgcggccatcactgggatattttcaaatcccaaggacatcagagtgaagtgtcagttgtcagatgattttaaaagttatgtcttcagagaaaaaaagattcattttctcattttaagccaattaaatattctgagtgagactaatcactcatttgcctacgaccttttagaaaagttgttttgttgaaatactgtacgtacgcttaatctaaatttgcattgactatgttttagtgtatttataaatggtgaactcagtttctgaaattaaacttcttatttgcaattctagtgctggcagacactggctttttatttttaggataagaaaacaggcatattctttgtggtccattatctagagcccatacttgggcagcatttgaaatttcaccttaaccacagacagggctccagggaagtggagatgtaattcttacaacaacagttctgatcatggccatggtgatgactttccaggtctcgtgttcaagtggtgccagaatgcaggagccggtgggcagccctgaggggttgccttggccgcagcctctgtgcacgctcttcctggtgtcctcttacccggtagctgtgcgcttgttcccgtgagaacagcctgcttccagagtgcccaggagtgctggtcagggacagtgcccgtgaggctgcagaggaggtggggtccatggcccacccatctctccctcgccagcagccctggccagtgtcatcctggtgtagaaagggttgcgcacaggataggagggagccacagttcttgcttagctgtgctcacgaccggcttgcagtcctgtgtttcttaagattgtatttggaatggtaatatccttagaattttgggatattgagcttcatggattttctctccaaaacaagccagcacaactaactgtagcagaattgtatccactcattcattcaactgagatgaagtgccctcccttttccagggcctgggctagttcctggaatgcaacagagatttccgtggacacagtctctagtctcacagagcatatagtctagtccacgattggcaagctgcaaccacagacccagtccggcactctgcccatttttctaagtgaaattttcttggaatacagtcacagctgtttttttaacatggtgtcttggctactttcaggctgcgacgggagaattgaatagttgtgacagagaccacaggcccactgaaagggacaaacagggctgaaaatactcactgtttggccctttccagaatagcaagtttgctggcccttgagctagcctgcctttatggggttttttttgtttgtttttttaagctttcagcttcatgctgctgtatttttagttgaagtgttctgagtaacagtcagtgtataaaaggggattgcagaaaaaaatgagggcttgctttactcaacagaaaatatggcccttcctgaatgacactaggagagtcattttatctcatacattcccttcatttcgttggtggacatttgttgaaaccggcactcaatggtcaaaccgtctgtgccctccagttgctgacagtcctgcaggaagatggacaagaggcccagtgctgacagtcacacgactctcactacttgaatgaggggactgtgggtgcaactagaaaatatgttgattcttagccattcccaccttgcctctccgttcagaaccccagctgcgagctgtttgtttccctgcctggaaatgatgttttaggcaggttccttaatttctcaggtctgtctcagataataaaaagctctttgtatgagcctcagaactgtctcttcagtgaatgaaattaccagtcattatacgaagggactttaaaaaatttgtggaaatactgaagtaaaagatgataaaaaaataaaaactttatttcttggctgggcacagtggcttatgtttgtaatcccagtactttgggaggctgaggtgggaggactgcttgaggccaggagttcaagaaattagccaggtttggtagtgcatgcctgtagtcccagctacttgggaggcagagggaggaggattacttgagcccaggagtttgaggttgcagtgagctgtgatcacaccactgcactctagcctggacaacagagcaagatcctctctcttaaaaccaccaacaatgacaacaacaaaacaacatttttatttctcaatgtaagctccatcaagntcaagatacttttgtaagctgtgacaccagccatttagtccacctctaaagaattgcnggctctgggaatttaaccatgtcagtgcagcctttttaacattattaacggaagaaaaaatgagtgcttttaaagattttttaaaatgaggaaacaaagtcagaaggagcaaaatcgggactgtaaggtggatgcctaatgatttcccaacaaaactcttgaagaattgcccttatttgatgagaagaatgagccaggagcattgtcatcgtggagaaagacactgntgaggctttcctgggtgtgtttttgctaaagcttcggctnactttctcaaaacactctcataataagatgttattgtggccagatgcggtggctcacgcctgtaatcccagcactttgggaggctgaggtgggcngatcacgaggtcaggaaatcgagaccatcctggctaacatggtgaaaccccgtcccgtctccactaaaaatacaaaaaattagctgggcgtggtggcaggcacctctagtcccagctactccagctactcggaaggctgaggcaggagaatggcgtgaacctgggaggcagagcttgcagctagctgagattgtgccactgcactccagcctgggcgacagagcgagactccatctcaaaaaaaaaaaaaaatgttctttggccctccagaaagtcaacaagcaaaatgcattgagcatcccaagaaactgttgccatgaccttactttgacttgtccacatttgccttgactaggccacttctacctcttggtagccattgctttgattgtggtttgtcttcaggatggtactggtaaagtcctgttccatctcctgttataattcaaggaaatgcttcagggtcttgatgccacttgtttaaaatttccattgaaagctctgctcttgtctgcagctgatctgggcacaacggttttggcacccatcgagtggaaagcttgctcaacttcaattttgaaccagttgagatgtctgtggtcttggctattgttctgttaatcgtc

SEQ ID NO: 405520 - DNA, 6127 bp, Homo sapiens
  misc_feature (5081)..(5081): n is a, c, g, or t
  misc_feature (5139)..(5139): n is a, c, g, or t
  misc_feature (5366)..(5366): n is a, c, g, or t
  misc_feature (5406)..(5406): n is a, c, g, or t
  misc_feature (5501)..(5501): n is a, c, g, or t
taagctagtacgagctgggttgaaattcggccgagggttaatagcaagtatactcgaagctgtggaatcatttttctatttgctccgcagactccacaaaagtcgtgtgcttgcactgtggccggaccatcagccgggggaagaagccgactaacttgggtaccagctgtcttctgagacatttacagcggttccatagcaacgtgctgaaaactgaggtctcggagacggctcggccctcctctccggacacccgggtgccgcggggcacagaattatcaggcgcttcctcttttgatgacaccaatgagaagttttacgattctcacccagttgccaaaaaaatcacaagtctcatagctgaaatgattgcacttgacctccagccatattcttttgtagacaacgttggctttaacaggctgcttgaatacttgaaacctcagtactccctccccgccccttcctacttctccaggacagctatcccaggtatgtatgataatgtgaagcagataattatgtcccaccttaaggaagctgagagtggtgtgatccacttcacgtctggaatatggatgagtaaccagacccgtgagtacctgaccctcacggcccactgggtttccttcgagtcgccagcccggccgcgctgtgacgaccaccactgctcggcgctgttggacgtgtcgcaggtggactgcgactacagtggcaacagcattcagaagcagctggagtgctggtgggaagcgtgggtgacctccaccggccttcaggtgggcatcaccgtcaccgacaacgccagcatcgggaagacgctgaacgagggggagcactcgagcgtgcagtgcttcagccatacggtgaacctgatcgtcagcgaggccattaagagccagcggatggtgcagaacctgctgagcctcgcccggaagatctgcgagcgggtgcaccggtcgcccaaggcgaaggagaaactggccgagctgcagagggagtacgcgctgcctcagcatcacctcatccaggacgtcccgtccaagtggagcacttccttccacatgctcgagcggctcattgagcagaaaagggccattaacgagatgtccgtcgagtgtaacttccgagagctgatcagctgcgaccagtgggaggtcatgcagtccgtgtgccgtgcgctaaagcccttcgaggccgcgagccgggagatgagcacgcagatgtccaccctcagccaggtcatccccatggtacacatcctcaacaggaaggtggagatgctcttcgaggagacgatgggcatcgacaccatgctgcgctctctgaaggaggccatggtgagccgcctgtctgccaccctccacgacccgcggtacgtcttcgccacgctgctggatcctcgctacaaggcctccctgtttacggaggaggaggcggagcagtacaaacaggatttaatcagggaactcgaactcatgaattctacctcagaggacgtggctgcctcccacaggtgtgatgctggctccccgtcgaaagactctgccgcagaggagaacctgtggtcacttgtggccaaggtgaagaagaaagacccaagagaaaagctgcctgaagccatggtgcttgcgtatctggaggaggaggtgcttgaacacagctgtgacccgctcacctactggaacctgaagaaggcgtcctggccggggctgtccgcgctggccgtcagatttttgggctgccccccaagcatcgtcccttcagaaaagctgttcaacacacccactgagaacggtagccttggccaatccaggctcatgatggaacattttgaaaaacttatctttttgaaagtgaatcttcccttaatatactttcagtattgaaactcacgacggcaccactaggccagaggcgtggctgccccagcgttagcagcctgtaccaggtctatgacccgctctgcccacggctgtgtacgacatcagaccaggcactctcagggccgctctccagctcaccacagtgtctccacgtgccttaccccttctccttcaggccaagtttcgcggggtgttttattaagacgtccactagaaatagcttgtcctgtcaactatgaaatatggtgactagattttaattcataaccgtaaagttttttaaagttttgggttagtaatttgttttactagaatgacaaagaagatgtaaaccattttattctgtaggctttttactcaattatgtacaaaccacaaatcaggtactgtattttagtgaagcattgctttaattgcaacagaatagcttttgtggctatcaaatgaaatctgtaaataggaggtggagggcaagccatcctgactgagcagtttttaaccgcaggttctaaagtgtcccgcggagtacagataatattctggaaggtaactgtttactacgacagagacgtggcatttggaaacgaaacttagatgtttcatggagcttattttgagaactttcccatttcaggtttctgcattcaggctttacatggtcagttaactcagagataccccagctgtttatcatcagctcctctgaaatgtgatccctttgtaactgtgctcatcacttcgccagtgcgttcaatgacacgctgatggcaggtggtccctgctgaaacccccacgcctccgcttcagcatctccacgctctgaagctgtctttcaaaatgtgtgcactgacccccttgtttgatcaaatttgtgtaaaatttttttagaagagatggcttattaacagggaagaagcttgttatattccagttgtaagaatagccttagtgtttagatttttttatgatagggaagatgcggccatcactgggatattttcaaatcccaaggacatcagagtgaagtgtcagttgtcagatgattttaaaagttatgtcttcagagaaaaaaagattcattttctcattttaagccaattaaatattctgagtgagactaatcactcatttgcctacgaccttttagaaaagttgttttgttgaaatactgtacgtacgcttaatctaaatttgcattgactatgttttagtgtatttataaatggtgaactcagtttctgaaattaaacttcttatttgcaattctagtgctggcagacactggctttttatttttaggataagaaaacaggcatattctttgtggtccattatctagagcccatacttgggcagcatttgaaatttcaccttaaccacagacagggctccagggaagtggagatgtaattcttacaacaacagttctgatcatggccatggtgatgactttccaggtctcgtgttcaagtggtgccagaatgcaggagccggtgggcagccctgaggggttgccttggccgcagcctctgtgcacgctcttcctggtgtcctcttacccggtagctgtgcgcttgttcccgtgagaacagcctgcttccagagtgcccaggagtgctggtcagggacagtgcccgtgaggctgcagaggaggtggggtccatggcccacccatctctccctcgccagcagccctggccagtgtcatcctggtgtagaaagggttgcgcacaggataggagggagccacagttcttgcttagctgtgctcacgaccggcttgcagtcctgtgtttcttaagattgtatttggaatggtaatatccttagaattttgggatattgagcttcatggattttctctccaaaacaagccagcacaactaactgtagcagaattgtatccactcattcattcaactgagatgaagtgccctcccttttccagggcctgggctagttcctggaatgcaacagagatttccgtggacacagtctctagtctcacagagcatatagtctagtccacgattggcaagctgcaaccacagacccagtccggcactctgcccatttttctaagtgaaattttcttggaatacagtcacagctgtttttttaacatggtgtcttggctactttcaggctgcgacgggagaattgaatagttgtgacagagaccacaggcccactgaaagggacaaacagggctgaaaatactcactgtttggccctttccagaatagcaagtttgctggcccttgagctagcctgcctttatggggttttttttgtttgtttttttaagctttcagcttcatgctgctgtatttttagttgaagtgttctgagtaacagtcagtgtataaaaggggattgcagaaaaaaatgagggcttgctttactcaacagaaaatatggcccttcctgaatgacactaggagagtcattttatctcatacattcccttcatttcgttggtggacatttgttgaaaccggcactcaatggtcaaaccgtctgtgccctccagttgctgacagtcctgcaggaagatggacaagaggcccagtgctgacagtcacacgactctcactacttgaatgaggggactgtgggtgcaactagaaaatatgttgattcttagccattcccaccttgcctctccgttcagaaccccagctgcgagctgtttgtttccctgcctggaaatgatgttttaggcaggttccttaatttctcaggtctgtctcagataataaaaagctctttgtatgagcctcagaactgtctcttcagtgaatgaaattaccagtcattatacgaagggactttaaaaaatttgtggaaatactgaagtaaaagatgataaaaaaataaaaactttatttcttggctgggcacagtggcttatgtttgtaatcccagtactttgggaggctgaggtgggaggactgcttgaggccaggagttcaagaaattagccaggtttggtagtgcatgcctgtagtcccagctacttgggaggcagagggaggaggattacttgagcccaggagtttgaggttgcagtgagctgtgatcacaccactgcactctagcctggacaacagagcaagatcctctctcttaaaaccaccaacaatgacaacaacaaaacaacatttttatttctcaatgtaagctccatcaagntcaagatacttttgtaagctgtgacaccagccatttagtccacctctaaagaattgcnggctctgggaatttaaccatgtcagtgcagcctttttaacattattaacggaagaaaaaatgagtgcttttaaagattttttaaaatgaggaaacaaagtcagaaggagcaaaatcgggactgtaaggtggatgcctaatgatttcccaacaaaactcttgaagaattgcccttatttgatgagaagaatgagccaggagcattgtcatcgtggagaaagacactgntgaggctttcctgggtgtgtttttgctaaagcttcggctnactttctcaaaacactctcataataagatgttattgtggccagatgcggtggctcacgcctgtaatcccagcactttgggaggctgaggtgggcngatcacgaggtcaggaaatcgagaccatcctggctaacatggtgaaaccccgtcccgtctccactaaaaatacaaaaaattagctgggcgtggtggcaggcacctctagtcccagctactccagctactcggaaggctgaggcaggagaatggcgtgaacctgggaggcagagcttgcagctagctgagattgtgccactgcactccagcctgggcgacagagcgagactccatctcaaaaaaaaaaaaaaatgttctttggccctccagaaagtcaacaagcaaaatgcattgagcatcccaagaaactgttgccatgaccttactttgacttgtccacatttgccttgactaggccacttctacctcttggtagccattgctttgattgtggtttgtcttcaggatggtactggtaaagtcctgttccatctcctgttataattcaaggaaatgcttcagggtcttgatgccacttgtttaaaatttccattgaaagctctgctcttgtctgcagctgatctgggcacaacggttttggcacccatcgagtggaaagcttgctcaacttcaattttgaaccagttgagatgtctgtggtcttggctattgttctgttaatcgtc

SEQ ID NO: 405521 - DNA, 6506 bp, Homo sapiens
  misc_feature (5460)..(5460): n is a, c, g, or t
  misc_feature (5518)..(5518): n is a, c, g, or t
  misc_feature (5745)..(5745): n is a, c, g, or t
  misc_feature (5785)..(5785): n is a, c, g, or t
  misc_feature (5880)..(5880): n is a, c, g, or t
gccgcgggaggggcgcgggggcagacaaagccgcggtaatgaatggagcgtccgcccgcgccgccgtcgtccgcagccggccgggagccgccccagaggccgggccgaggtaatgcacaagggtcacgtgtatgctctcaagatgatcaggcagatcctgtcctcaggaccagaagcacgtctctgctgcacacattgttgtctacaccatgagtgtttagtagcaggactcttggaaagcagtgatctatgctgtaagaccatgagtcacagattctttttttcagtactatttatgattagccatatttctagaaacatcctgaaagatggaattatgacgaaaaagtgaagataatctacattcgggggcacaaatgagcacttggatcagtgttttatgaacctaagatacagccggagtagttatggtcagtcatggagaataacttgaaaacttgtcccaaagaggacggtgatttcgtttctgataaaataaagtttaaaatagaagaggaagatgatgatggaattcctcctgatagtttggaaagaatggactttaaaagcgagcaggaggacatgaagcagacagacagcggtggggagcgagcgggcctcggtgggacgggttgcagctgcaagcccccggggaagtacttgtctgcagagagtgaggatgactatggcgcgctgttctcccagtacagcagcaccctatacgacgtggccatggaggccgtgacccagagcctcctttccagccggaacatgagctccaggaagaagtctccagcctggaagcatttttttatctctccccgagacagcactaaagcaatatgcatgtactgtgtgaaggagttcagcagaggcaaaaacgagaaagacttgagtaccagttgtctcatgaggcacgtgaggcgcgcacacccgaccgtgctcattcaggaaaatggcagcgtgtctgccgtgtcctcgttcccctctccctcactcctgcttccaccgcagcctgcggacgcgggtgacctcagcaccatcctctcacccatcaaacttgtccagaaagtggcgtctaagatcccgtcccccgatcgaataacagaggagtctgtgtctgtagtttcttctgaagaaatctcctctgacatgtccgtttcggagaagtgcggcagagaagaagccctggtggggtcgtctccccacctccctgctctccattacgatgaacctgcagagaacttagcggagaagagccttccacttccaaagagcacctctgggtccaggagaaggtccgctgtctggaagcacttctacctgtcgccactggacaactccaaagctgtctgcattcactgcatgaacgagttcagccgggggaagaatgggaaggacctgggcacgagctgcctcatcaggcacatgtggagggcacaccgcgccatcgtgttgcaggagaacgggggcacgggcatcccgccactgtactccacccctcccactctgctgccttccttgctgccgccggagggggagctcagctctgtgtcctcgtctccggtaaagccggtcagagagtccccttcggcctcctcctcccctgacaggctgactgaggacttgcagtctcacttgaaccctggagatgggctgatggaagacgtggcggccttctcatcttccgatgacgtaggggaggcctcggcgtcctctcctgagaagcagcaggctgatgggctgagtcctagattgtttgaatctggtgccatcttccagcagaataaaaaggtcatgaaaagactgaagtcggaggtctggcatcacttctccctggcccccatggacagcctcaaggccgagtgtcggtactgcggctgtgccatcagccgggggaagaagggtgatgtgggcaccagctgcctgatgagacatctctaccggcgccatccagaagttgtcgggagccagaagggcttcctgggtgcaagtctggcaaactctccgtatgccactttggcctctgcagaaagttcctcttccaaattgactgacttgccaacagtggtcacaaaaaacaatcaagttatgtttcctgttaatagcaaaaagacctcgaagctgtggaatcatttttctatttgctccgcagactccacaaaagtcgtgtgcttgcactgtggccggaccatcagccgggggaagaagccgactaacttgggtaccagctgtcttctgagacatttacagcggttccatagcaacgtgctgaaaactgaggtctcggagacggctcggccctcctctccggacacccgggtgccgcggggcacagaattatcaggcgcttcctcttttgatgacaccaatgagaagttttacgattctcacccagttgccaaaaaaatcacaagtctcatagctgaaatgattgcacttgacctccagccatattcttttgtagacaacgttggctttaacaggctgcttgaatacttgaaacctcagtactccctccccgccccttcctacttctccaggacagctatcccaggtatgtatgataatgtgaagcagataattatgtcccaccttaaggaagctgagagtggtgtgatccacttcacgtctggaatatggatgagtaaccagacccgtgagtacctgaccctcacggcccactgggtttccttcgagtcgccagcccggccgcgctgtgacgaccaccactgctcggcgctgttggacgtgtcgcaggtggactgcgactacagtggcaacagcattcagaagcagctggagtgctggtgggaagcgtgggtgacctccaccggccttcaggtgggcatcaccgtcaccgacaacgccagcatcgggaagacgctgaacgagggggagcactcgagcgtgcagtgcttcagccatacggtgaacctgatcgtcagcgaggccattaagagccagcggatggtgcagaacctgctgagcctcgcccggaagatctgcgagcgggtgcaccggtcgcccaaggcgaaggagaaactggccgagctgcagagggagtacgcgctgcctcagcatcacctcatccaggacgtcccgtccaagtggagcacttccttccacatgctcgagcggctcattgagcagaaaagggccattaacgagatgtccgtcgagtgtaacttccgagagctgatcagctgcgaccagtgggaggtcatgcagtccgtgtgccgtgcgctaaagcccttcgaggccgcgagccgggagatgagcacgcagatgtccaccctcagccaggtcatccccatggtacacatcctcaacaggaaggtggagatgctcttcgaggagacgatgggcatcgacaccatgctgcgctctctgaaggaggccatggtgagccgcctgtctgccaccctccacgacccgcggtacgtcttcgccacgctgctggatcctcgctacaaggcctccctgtttacggaggaggaggcggagcagtacaaacaggatttaatcagggaactcgaactcatgaattctacctcagaggacgtggctgcctcccacaggtgtgatgctggctccccgtcgaaagactctgccgcagaggagaacctgtggtcacttgtggccaaggtgaagaagaaagacccaagagaaaagctgcctgaagccatggtgcttgcgtatctggaggaggaggtgcttgaacacagctgtgacccgctcacctactggaacctgaagaaggcgtcctggccggggctgtccgcgctggccgtcagatttttgggctgccccccaagcatcgtcccttcagaaaagctgttcaacacacccactgagaacggtagccttggccaatccaggctcatgatggaacattttgaaaaacttatctttttgaaagtgaatcttcccttaatatactttcagtattgaaactcacgacggcaccactaggccagaggcgtggctgccccagcgttagcagcctgtaccaggtctatgacccgctctgcccacggctgtgtacgacatcagaccaggcactctcagggccgctctccagctcaccacagtgtctccacgtgccttaccccttctccttcaggccaagtttcgcggggtgttttattaagacgtccactagaaatagcttgtcctgtcaactatgaaatatggtgactagattttaattcataaccgtaaagttttttaaagttttgggttagtaatttgttttactagaatgacaaagaagatgtaaaccattttattctgtaggctttttactcaattatgtacaaaccacaaatcaggtactgtattttagtgaagcattgctttaattgcaacagaatagcttttgtggctatcaaatgaaatctgtaaataggaggtggagggcaagccatcctgactgagcagtttttaaccgcaggttctaaagtgtcccgcggagtacagataatattctggaaggtaactgtttactacgacagagacgtggcatttggaaacgaaacttagatgtttcatggagcttattttgagaactttcccatttcaggtttctgcattcaggctttacatggtcagttaactcagagataccccagctgtttatcatcagctcctctgaaatgtgatccctttgtaactgtgctcatcacttcgccagtgcgttcaatgacacgctgatggcaggtggtccctgctgaaacccccacgcctccgcttcagcatctccacgctctgaagctgtctttcaaaatgtgtgcactgacccccttgtttgatcaaatttgtgtaaaatttttttagaagagatggcttattaacagggaagaagcttgttatattccagttgtaagaatagccttagtgtttagatttttttatgatagggaagatgcggccatcactgggatattttcaaatcccaaggacatcagagtgaagtgtcagttgtcagatgattttaaaagttatgtcttcagagaaaaaaagattcattttctcattttaagccaattaaatattctgagtgagactaatcactcatttgcctacgaccttttagaaaagttatttgtggaaatactgaagtaaaagatgataaaaaaataaaaactttatttcttggctgggcacagtggcttatgtttgtaatcccagtactttgggaggctgaggtgggaggactgcttgaggccaggagttcaagaaattagccaggtttggtagtgcatgcctgtagtcccagctacttgggaggcagagggaggaggattacttgagcccaggagtttgaggttgcagtgagctgtgatcacaccactgcactctagcctggacaacagagcaagatcctctctcttaaaaccaccaacaatgacaacaacaaaacaacatttttatttctcaatgtaagctccatcaagntcaagatacttttgtaagctgtgacaccagccatttagtccacctctaaagaattgcnggctctgggaatttaaccatgtcagtgcagcctttttaacattattaacggaagaaaaaatgagtgcttttaaagattttttaaaatgaggaaacaaagtcagaaggagcaaaatcgggactgtaaggtggatgcctaatgatttcccaacaaaactcttgaagaattgcccttatttgatgagaagaatgagccaggagcattgtcatcgtggagaaagacactgntgaggctttcctgggtgtgtttttgctaaagcttcggctnactttctcaaaacactctcataataagatgttattgtggccagatgcggtggctcacgcctgtaatcccagcactttgggaggctgaggtgggcngatcacgaggtcaggaaatcgagaccatcctggctaacatggtgaaaccccgtcccgtctccactaaaaatacaaaaaattagctgggcgtggtggcaggcacctctagtcccagctactccagctactcggaaggctgaggcaggagaatggcgtgaacctgggaggcagagcttgcagctagctgagattgtgccactgcactccagcctgggcgacagagcgagactccatctcaaaaaaaaaaaaaaatgttctttggccctccagaaagtcaacaagcaaaatgcattgagcatcccaagaaactgttgccatgaccttactttgacttgtccacatttgccttgactaggccacttctacctcttggtagccattgctttgattgtggtttgtcttcaggatggtactggtaaagtcctgttccatctcctgttataattcaaggaaatgcttcagggtcttgatgccacttgtttaaaatttccattgaaagctctgctcttgtctgcagctgatctgggcacaacggttttggcacccatcgagtggaaagcttgctcaacttcaattttgaaccagttgagatgtctgtggtcttggctattgttctgttaatcgtc

SEQ ID NO: 405522 - DNA, 385 bp, Homo sapiens
tgcttattttgcaatttgggggtattgtcatcctgtaaacggattgcaggaagtcagagaacaagtttttcgattccagttttccattatacagtttttttctatacatatttaggcggatggagccatgacggtagaggttaaaatgtgtgatttagttccatgcttaatttgatttcatctcttataggtaatgcacaagggtcacgtgtatgctctcaagatgatcaggcagatcctgtcctcaggaccagaagcacgtctctgctgcacacattgttgtctacaccatgagtgtttagtagcaggactcttggaaagcagtgatctatgctgtaagaccatgagtcacagattctttttttcagtactatttatgattagc

SEQ ID NO: 405523 - DNA, 6707 bp, Homo sapiens
  misc_feature (5661)..(5661): n is a, c, g, or t
  misc_feature (5719)..(5719): n is a, c, g, or t
  misc_feature (5946)..(5946): n is a, c, g, or t
  misc_feature (5986)..(5986): n is a, c, g, or t
  misc_feature (6081)..(6081): n is a, c, g, or t
tatgcttagtcgagccgggtttaatcggccgaggcttgccgccgcgttaagggggagctcagctctgtgtcctcgtctccggtaaagccggtcagagagtccccttcggcctcctcctcccctgacaggctgactgaggacttgcagtctcacttgaaccctggagatgggctgatggaagacgtggcggccttctcatcttccgatgacgtaggggaggcctcggcgtcctctcctgagaagcagcaggctgatgggctgagtcctagattgtttgaatctggtgccatcttccagcagaataaaaaggtcatgaaaagactgaagtcggaggtctggcatcacttctccctggcccccatggacagcctcaaggccgagtgtcggtactgcggctgtgccatcagccgggggaagaagggtgatgtgggcaccagctgcctgatgagacatctctaccggcgccatccagaagttgtcgggagccagaagggcttcctgggtgcaagtctggcaaactctccgtatgccactttggcctctgcagaaagttcctcttccaaattgactgacttgccaacagtggtcacaaaaaacaatcaagttatgtttcctgttaatagcaaaaagacctcgaagctgtggaatcatttttctatttgctccgcagactccacaaaagtcgtgtgcttgcactgtggccggaccatcagccgggggaagaagccgactaacttgggtaccagctgtcttctgagacatttacagcggttccatagcaacgtgctgaaaactgaggtctcggagacggctcggccctcctctccggacacccgggtgccgcggggcacagaattatcaggcgcttcctcttttgatgacaccaatgagaagttttacgattctcacccagttgccaaaaaaatcacaagtctcatagctgaaatgattgcacttgacctccagccatattcttttgtagacaacgttggctttaacaggctgcttgaatacttgaaacctcagtactccctccccgccccttcctacttctccaggacagctatcccaggtatgtatgataatgtgaagcagataattatgtcccaccttaaggaagctgagagtggtgtgatccacttcacgtctggaatatggatgagtaaccagacccgtgagtacctgaccctcacggcccactgggtttccttcgagtcgccagcccggccgcgctgtgacgaccaccactgctcggcgctgttggacgtgtcgcaggtggactgcgactacagtggcaacagcattcagaagcagctggagtgctggtgggaagcgtgggtgacctccaccggccttcaggtgggcatcaccgtcaccgacaacgccagcatcgggaagacgctgaacgagggggagcactcgagcgtgcagtgcttcagccatacggtgaacctgatcgtcagcgaggccattaagagccagcggatggtgcagaacctgctgagcctcgcccggaagatctgcgagcgggtgcaccggtcgcccaaggcgaaggagaaactggccgagctgcagagggagtacgcgctgcctcagcatcacctcatccaggacgtcccgtccaagtggagcacttccttccacatgctcgagcggctcattgagcagaaaagggccattaacgagatgtccgtcgagtgtaacttccgagagctgatcagctgcgaccagtgggaggtcatgcagtccgtgtgccgtgcgctaaagcccttcgaggccgcgagccgggagatgagcacgcagatgtccaccctcagccaggtcatccccatggtacacatcctcaacaggaaggtggagatgctcttcgaggagacgatgggcatcgacaccatgctgcgctctctgaaggaggccatggtgagccgcctgtctgccaccctccacgacccgcggtacgtcttcgccacgctgctggatcctcgctacaaggcctccctgtttacggaggaggaggcggagcagtacaaacaggatttaatcagggaactcgaactcatgaattctacctcagaggacgtggctgcctcccacaggtgtgatgctggctccccgtcgaaagactctgccgcagaggagaacctgtggtcacttgtggccaaggtgaagaagaaagacccaagagaaaagctgcctgaagccatggtgcttgcgtatctggaggaggaggtgcttgaacacagctgtgacccgctcacctactggaacctgaagaaggcgtcctggccggggctgtccgcgctggccgtcagatttttgggctgccccccaagcatcgtcccttcagaaaagctgttcaacacacccactgagaacggtagccttggccaatccaggctcatgatggaacattttgaaaaacttatctttttgaaagtgaatcttcccttaatatactttcagtattgaaactcacgacggcaccactaggccagaggcgtggctgccccagcgttagcagcctgtaccaggtctatgacccgctctgcccacggctgtgtacgacatcagaccaggcactctcagggccgctctccagctcaccacagtgtctccacgtgccttaccccttctccttcaggccaagtttcgcggggtgttttattaagacgtccactagaaatagcttgtcctgtcaactatgaaatatggtgactagattttaattcataaccgtaaagttttttaaagttttgggttagtaatttgttttactagaatgacaaagaagatgtaaaccattttattctgtaggctttttactcaattatgtacaaaccacaaatcaggtactgtattttagtgaagcattgctttaattgcaacagaatagcttttgtggctatcaaatgaaatctgtaaataggaggtggagggcaagccatcctgactgagcagtttttaaccgcaggttctaaagtgtcccgcggagtacagataatattctggaaggtaactgtttactacgacagagacgtggcatttggaaacgaaacttagatgtttcatggagcttattttgagaactttcccatttcaggtttctgcattcaggctttacatggtcagttaactcagagataccccagctgtttatcatcagctcctctgaaatgtgatccctttgtaactgtgctcatcacttcgccagtgcgttcaatgacacgctgatggcaggtggtccctgctgaaacccccacgcctccgcttcagcatctccacgctctgaagctgtctttcaaaatgtgtgcactgacccccttgtttgatcaaatttgtgtaaaatttttttagaagagatggcttattaacagggaagaagcttgttatattccagttgtaagaatagccttagtgtttagatttttttatgatagggaagatgcggccatcactgggatattttcaaatcccaaggacatcagagtgaagtgtcagttgtcagatgattttaaaagttatgtcttcagagaaaaaaagattcattttctcattttaagccaattaaatattctgagtgagactaatcactcatttgcctacgaccttttagaaaagttgttttgttgaaatactgtacgtacgcttaatctaaatttgcattgactatgttttagtgtatttataaatggtgaactcagtttctgaaattaaacttcttatttgcaattctagtgctggcagacactggctttttatttttaggataagaaaacaggcatattctttgtggtccattatctagagcccatacttgggcagcatttgaaatttcaccttaaccacagacagggctccagggaagtggagatgtaattcttacaacaacagttctgatcatggccatggtgatgactttccaggtctcgtgttcaagtggtgccagaatgcaggagccggtgggcagccctgaggggttgccttggccgcagcctctgtgcacgctcttcctggtgtcctcttacccggtagctgtgcgcttgttcccgtgagaacagcctgcttccagagtgcccaggagtgctggtcagggacagtgcccgtgaggctgcagaggaggtggggtccatggcccacccatctctccctcgccagcagccctggccagtgtcatcctggtgtagaaagggttgcgcacaggataggagggagccacagttcttgcttagctgtgctcacgaccggcttgcagtcctgtgtttcttaagattgtatttggaatggtaatatccttagaattttgggatattgagcttcatggattttctctccaaaacaagccagcacaactaactgtagcagaattgtatccactcattcattcaactgagatgaagtgccctcccttttccagggcctgggctagttcctggaatgcaacagagatttccgtggacacagtctctagtctcacagagcatatagtctagtccacgattggcaagctgcaaccacagacccagtccggcactctgcccatttttctaagtgaaattttcttggaatacagtcacagctgtttttttaacatggtgtcttggctactttcaggctgcgacgggagaattgaatagttgtgacagagaccacaggcccactgaaagggacaaacagggctgaaaatactcactgtttggccctttccagaatagcaagtttgctggcccttgagctagcctgcctttatggggttttttttgtttgtttttttaagctttcagcttcatgctgctgtatttttagttgaagtgttctgagtaacagtcagtgtataaaaggggattgcagaaaaaaatgagggcttgctttactcaacagaaaatatggcccttcctgaatgacactaggagagtcattttatctcatacattcccttcatttcgttggtggacatttgttgaaaccggcactcaatggtcaaaccgtctgtgccctccagttgctgacagtcctgcaggaagatggacaagaggcccagtgctgacagtcacacgactctcactacttgaatgaggggactgtgggtgcaactagaaaatatgttgattcttagccattcccaccttgcctctccgttcagaaccccagctgcgagctgtttgtttccctgcctggaaatgatgttttaggcaggttccttaatttctcaggtctgtctcagataataaaaagctctttgtatgagcctcagaactgtctcttcagtgaatgaaattaccagtcattatacgaagggactttaaaaaatttgtggaaatactgaagtaaaagatgataaaaaaataaaaactttatttcttggctgggcacagtggcttatgtttgtaatcccagtactttgggaggctgaggtgggaggactgcttgaggccaggagttcaagaaattagccaggtttggtagtgcatgcctgtagtcccagctacttgggaggcagagggaggaggattacttgagcccaggagtttgaggttgcagtgagctgtgatcacaccactgcactctagcctggacaacagagcaagatcctctctcttaaaaccaccaacaatgacaacaacaaaacaacatttttatttctcaatgtaagctccatcaagntcaagatacttttgtaagctgtgacaccagccatttagtccacctctaaagaattgcnggctctgggaatttaaccatgtcagtgcagcctttttaacattattaacggaagaaaaaatgagtgcttttaaagattttttaaaatgaggaaacaaagtcagaaggagcaaaatcgggactgtaaggtggatgcctaatgatttcccaacaaaactcttgaagaattgcccttatttgatgagaagaatgagccaggagcattgtcatcgtggagaaagacactgntgaggctttcctgggtgtgtttttgctaaagcttcggctnactttctcaaaacactctcataataagatgttattgtggccagatgcggtggctcacgcctgtaatcccagcactttgggaggctgaggtgggcngatcacgaggtcaggaaatcgagaccatcctggctaacatggtgaaaccccgtcccgtctccactaaaaatacaaaaaattagctgggcgtggtggcaggcacctctagtcccagctactccagctactcggaaggctgaggcaggagaatggcgtgaacctgggaggcagagcttgcagctagctgagattgtgccactgcactccagcctgggcgacagagcgagactccatctcaaaaaaaaaaaaaaatgttctttggccctccagaaagtcaacaagcaaaatgcattgagcatcccaagaaactgttgccatgaccttactttgacttgtccacatttgccttgactaggccacttctacctcttggtagccattgctttgattgtggtttgtcttcaggatggtactggtaaagtcctgttccatctcctgttataattcaaggaaatgcttcagggtcttgatgccacttgtttaaaatttccattgaaagctctgctcttgtctgcagctgatctgggcacaacggttttggcacccatcgagtggaaagcttgctcaacttcaattttgaaccagttgagatgtctgtggtcttggctattgttctgttaatcgtc

SEQ ID NO: 405524 - DNA, 8134 bp, Homo sapiens
  misc_feature (7088)..(7088): n is a, c, g, or t
  misc_feature (7146)..(7146): n is a, c, g, or t
  misc_feature (7373)..(7373): n is a, c, g, or t
  misc_feature (7413)..(7413): n is a, c, g, or t
  misc_feature (7508)..(7508): n is a, c, g, or t
gccgcgggaggggcgcgggggcagacaaagccgcggtaatgaatggagcgtccgcccgcgccgccgtcgtccgcagccggccgggagccgccccagaggccgggccgaggtaatgcacaagggtcacgtgtatgctctcaagatgatcaggcagatcctgtcctcaggaccagaagcacgtctctgctgcacacattgttgtctacaccatgagtgtttagtagcaggactcttggaaagcagtgatctatgctgtaagaccatgagtcacagattctttttttcagtactatttatgattagccatatttctagaaacatcctgaaagatggaattatgacgaaaaagtgaagataatctacattcgggggcacaaatgagcacttggatcagtgttttatgaacctaagatacagccggagtagttatggtcagtcatggagaataacttgaaaacttgtcccaaagaggacggtgatttcgtttctgataaaataaagtttaaaatagaagaggaagatgatgatggaattcctcctgatagtttggaaagaatggactttaaaagcgagcaggaggacatgaagcagacagacagcggtggggagcgagcgggcctcggtgggacgggttgcagctgcaagcccccggggaagtacttgtctgcagagagtgaggatgactatggcgcgctgttctcccagtacagcagcaccctatacgacgtggccatggaggccgtgacccagagcctcctttccagccggaacatgagctccaggaagaagtctccagcctggaagcatttttttatctctccccgagacagcactaaagcaatatgcatgtactgtgtgaaggagttcagcagaggcaaaaacgagaaagacttgagtaccagttgtctcatgaggcacgtgaggcgcgcacacccgaccgtgctcattcaggaaaatggcagcgtgtctgccgtgtcctcgttcccctctccctcactcctgcttccaccgcagcctgcggacgcgggtgacctcagcaccatcctctcacccatcaaacttgtccagaaagtggcgtctaagatcccgtcccccgatcgaataacagaggagtctgtgtctgtagtttcttctgaagaaatctcctctgacatgtccgtttcggagaagtgcggcagagaagaagccctggtggggtcgtctccccacctccctgctctccattacgatgaacctgcagagaacttagcggagaagagccttccacttccaaagagcacctctgggtccaggagaaggtccgctgtctggaagcacttctacctgtcgccactggacaactccaaagctgtctgcattcactgcatgaacgagttcagccgggggaagaatgggaaggacctgggcacgagctgcctcatcaggcacatgtggagggcacaccgcgccatcgtgttgcaggagaacgggggcacgggcatcccgccactgtactccacccctcccactctgctgccttccttgctgccgccggagggggagctcagctctgtgtcctcgtctccggtaaagccggtcagagagtccccttcggcctcctcctcccctgacaggctgactgaggacttgcagtctcacttgaaccctggagatgggctgatggaagacgtggcggccttctcatcttccgatgacgtaggggaggcctcggcgtcctctcctgagaagcagcaggctgatgggctgagtcctagattgtttgaatctggtgccatcttccagcagaataaaaaggtcatgaaaagactgaagtcggaggtctggcatcacttctccctggcccccatggacagcctcaaggccgagtgtcggtactgcggctgtgccatcagccgggggaagaagggtgatgtgggcaccagctgcctgatgagacatctctaccggcgccatccagaagttgtcgggagccagaagggcttcctgggtgcaagtctggcaaactctccgtatgccactttggcctctgcagaaagttcctcttccaaattgactgacttgccaacagtggtcacaaaaaacaatcaagttatgtttcctgttaatagcaaaaagacctcgaagctgtggaatcatttttctatttgctccgcagactccacaaaagtcgtgtgcttgcactgtggccggaccatcagccgggggaagaagccgactaacttgggtaccagctgtcttctgagacatttacagcggttccatagcaacgtgctgaaaactgaggtctcggagacggctcggccctcctctccggacacccgggtgccgcggggcacagaattatcaggcgcttcctcttttgatgacaccaatgagaagttttacgattctcacccagttgccaaaaaaatcacaagtctcatagctgaaatgattgcacttgacctccagccatattcttttgtagacaacgttggctttaacaggctgcttgaatacttgaaacctcagtactccctccccgccccttcctacttctccaggacagctatcccaggtatgtatgataatgtgaagcagataattatgtcccaccttaaggaagctgagagtggtgtgatccacttcacgtctggaatatggatgagtaaccagacccgtgagtacctgaccctcacggcccactgggtttccttcgagtcgccagcccggccgcgctgtgacgaccaccactgctcggcgctgttggacgtgtcgcaggtggactgcgactacagtggcaacagcattcagaagcagctggagtgctggtgggaagcgtgggtgacctccaccggccttcaggtgggcatcaccgtcaccgacaacgccagcatcgggaagacgctgaacgagggggagcactcgagcgtgcagtgcttcagccatacggtgaacctgatcgtcagcgaggccattaagagccagcggatggtgcagaacctgctgagcctcgcccggaagatctgcgagcgggtgcaccggtcgcccaaggcgaaggagaaactggccgagctgcagagggagtacgcgctgcctcagcatcacctcatccaggacgtcccgtccaagtggagcacttccttccacatgctcgagcggctcattgagcagaaaagggccattaacgagatgtccgtcgagtgtaacttccgagagctgatcagctgcgaccagtgggaggtcatgcagtccgtgtgccgtgcgctaaagcccttcgaggccgcgagccgggagatgagcacgcagatgtccaccctcagccaggtcatccccatggtacacatcctcaacaggaaggtggagatgctcttcgaggagacgatgggcatcgacaccatgctgcgctctctgaaggaggccatggtgagccgcctgtctgccaccctccacgacccgcggtacgtcttcgccacgctgctggatcctcgctacaaggcctccctgtttacggaggaggaggcggagcagtacaaacaggatttaatcagggaactcgaactcatgaattctacctcagaggacgtggctgcctcccacaggtgtgatgctggctccccgtcgaaagactctgccgcagaggagaacctgtggtcacttgtggccaaggtgaagaagaaagacccaagagaaaagctgcctgaagccatggtgcttgcgtatctggaggaggaggtgcttgaacacagctgtgacccgctcacctactggaacctgaagaaggcgtcctggccggggctgtccgcgctggccgtcagatttttgggctgccccccaagcatcgtcccttcagaaaagctgttcaacacacccactgagaacggtagccttggccaatccaggctcatgatggaacattttgaaaaacttatctttttgaaagtgaatcttcccttaatatactttcagtattgaaactcacgacggcaccactaggccagaggcgtggctgccccagcgttagcagcctgtaccaggtctatgacccgctctgcccacggctgtgtacgacatcagaccaggcactctcagggccgctctccagctcaccacagtgtctccacgtgccttaccccttctccttcaggccaagtttcgcggggtgttttattaagacgtccactagaaatagcttgtcctgtcaactatgaaatatggtgactagattttaattcataaccgtaaagttttttattctgtaggctttttactcaattatgtacaaaccacaaatcaggtactgtattttagtgaagcattgctttaattgcaacagaatagcttttgtggctatcaaatgaaatctgtaaataggaggtggagggcaagccatcctgactgagcagtttttaaccgcaggttctaaagtgtcccgcggagtacagataatattctggaaggtaactgtttactacgacagagacgtggcatttggaaacgaaacttagatgtttcatggagcttattttgagaactttcccatttcaggtttctgcattcaggctttacatggtcagttaactcagagataccccagctgtttatcatcagctcctctgaaatgtgatccctttgtaactgtgctcatcacttcgccagtgcgttcaatgacacgctgatggcaggtggtccctgctgaaacccccacgcctccgcttcagcatctccacgctctgaagctgtctttcaaaatgtgtgcactgacccccttgtttgatcaaatttgtgtaaaatttttttagaagagatggcttattaacagggaagaagcttgttatattccagttgtaagaatagccttagtgtttagatttttttatgatagggaagatgcggccatcactgggatattttcaaatcccaaggacatcagagtgaagtgtcagttgtcagatgattttaaaagttatgtcttcagagaaaaaaagattcattttctcattttaagccaattaaatattctgagtgagactaatcactcatttgcctacgaccttttagaaaagttgttttgttgaaatactgtacgtacgcttaatctaaatttgcattgactatgttttagtgtatttataaatggtgaactcagtttctgaaattaaacttcttatttgcaattctagtgctggcagacactggctttttatttttaggataagaaaacaggcatattctttgtggtccattatctagagcccatacttgggcagcatttgaaatttcaccttaaccacagacagggctccagggaagtggagatgtaattcttacaacaacagttctgatcatggccatggtgatgactttccaggtctcgtgttcaagtggtgccagaatgcaggagccggtgggcagccctgaggggttgccttggccgcagcctctgtgcacgctcttcctggtgtcctcttacccggtagctgtgcgcttgttcccgtgagaacagcctgcttccagagtgcccaggagtgctggtcagggacagtgcccgtgaggctgcagaggaggtggggtccatggcccacccatctctccctcgccagcagccctggccagtgtcatcctggtgtagaaagggttgcgcacaggataggagggagccacagttcttgcttagctgtgctcacgaccggcttgcagtcctgtgtttcttaagattgtatttggaatggtaatatccttagaattttgggatattgagcttcatggattttctctccaaaacaagccagcacaactaactgtagcagaattgtatccactcattcattcaactgagatgaagtgccctcccttttccagggcctgggctagttcctggaatgcaacagagatttccgtggacacagtctctagtctcacagagcatatagtctagtccacgattggcaagctgcaaccacagacccagtccggcactctgcccatttttctaagtgaaattttcttggaatacagtcacagctgtttttttaacatggtgtcttggctactttcaggctgcgacgggagaattgaatagttgtgacagagaccacaggcccactgaaagggacaaacagggctgaaaatactcactgtttggccctttccagaatagcaagtttgctggcccttgagctagcctgcctttatggggttttttttgtttgtttttttaagctttcagcttcatgctgctgtatttttagttgaagtgttctgagtaacagtcagtgtataaaaggggattgcagaaaaaaatgagggcttgctttactcaacagaaaatatggcccttcctgaatgacactaggagagtcattttatctcatacattcccttcatttcgttggtggacatttgttgaaaccggcactcaatggtcaaaccgtctgtgccctccagttgctgacagtcctgcaggaagatggacaagaggcccagtgctgacagtcacacgactctcactacttgaatgaggggactgtgggtgcaactagaaaatatgttgattcttagccattcccaccttgcctctccgttcagaaccccagctgcgagctgtttgtttccctgcctggaaatgatgttttaggcaggttccttaatttctcaggtctgtctcagataataaaaagctctttgtatgagcctcagaactgtctcttcagtgaatgaaattaccagtcattatacgaagggactttaaaaaatttgtggaaatactgaagtaaaagatgataaaaaaataaaaactttatttcttggctgggcacagtggcttatgtttgtaatcccagtactttgggaggctgaggtgggaggactgcttgaggccaggagttcaagaaattagccaggtttggtagtgcatgcctgtagtcccagctacttgggaggcagagggaggaggattacttgagcccaggagtttgaggttgcagtgagctgtgatcacaccactgcactctagcctggacaacagagcaagatcctctctcttaaaaccaccaacaatgacaacaacaaaacaacatttttatttctcaatgtaagctccatcaagntcaagatacttttgtaagctgtgacaccagccatttagtccacctctaaagaattgcnggctctgggaatttaaccatgtcagtgcagcctttttaacattattaacggaagaaaaaatgagtgcttttaaagattttttaaaatgaggaaacaaagtcagaaggagcaaaatcgggactgtaaggtggatgcctaatgatttcccaacaaaactcttgaagaattgcccttatttgatgagaagaatgagccaggagcattgtcatcgtggagaaagacactgntgaggctttcctgggtgtgtttttgctaaagcttcggctnactttctcaaaacactctcataataagatgttattgtggccagatgcggtggctcacgcctgtaatcccagcactttgggaggctgaggtgggcngatcacgaggtcaggaaatcgagaccatcctggctaacatggtgaaaccccgtcccgtctccactaaaaatacaaaaaattagctgggcgtggtggcaggcacctctagtcccagctactccagctactcggaaggctgaggcaggagaatggcgtgaacctgggaggcagagcttgcagctagctgagattgtgccactgcactccagcctgggcgacagagcgagactccatctcaaaaaaaaaaaaaaatgttctttggccctccagaaagtcaacaagcaaaatgcattgagcatcccaagaaactgttgccatgaccttactttgacttgtccacatttgccttgactaggccacttctacctcttggtagccattgctttgattgtggtttgtcttcaggatggtactggtaaagtcctgttccatctcctgttataattcaaggaaatgcttcagggtcttgatgccacttgtttaaaatttccattgaaagctctgctcttgtctgcagctgatctgggcacaacggttttggcacccatcgagtggaaagcttgctcaacttcaattttgaaccagttgagatgtctgtggtcttggctattgttctgttaatcgtc

SEQ ID NO: 405525 - DNA, 6627 bp, Homo sapiens
  misc_feature (5581)..(5581): n is a, c, g, or t
  misc_feature (5639)..(5639): n is a, c, g, or t
  misc_feature (5866)..(5866): n is a, c, g, or t
  misc_feature (5906)..(5906): n is a, c, g, or t
  misc_feature (6001)..(6001): n is a, c, g, or t
gccgcgggaggggcgcgggggcagacaaagccgcggtaatgaatggagcgtccgcccgcgccgccgtcgtccgcagccggccgggagccgccccagaggccgggccgaggtaatgcacaagggtcacgtgtatgctctcaagatgatcaggcagatcctgtcctcaggaccagaagcacgtctctgctgcacacattgttgtctacaccatgagtgtttagtagcaggactcttggaaagcagtgatctatgctgtaagaccatgagtcacagattctttttttcagtactatttatgattagccatatttctagaaacatcctgaaagatggaattatgacgaaaaagtgaagataatctacattcgggggcacaaatgagcacttggatcagtgttttatgaacctaagatacagccggagtagttatggtcagtcatggagaataacttgaaaacttgtcccaaagaggacggtgatttcgtttctgataaaataaagtttaaaatagaagaggaagatgatgatggaattcctcctgatagtttggaaagaatggactttaaaagcgagcaggaggacatgaagcagacagacagcggtggggagcgagcgggcctcggtgggacgggttgcagctgcaagcccccggggaagtacttgtctgcagagagtgaggatgactatggcgcgctgttctcccagtacagcagcaccctatacgacgtggccatggaggccgtgacccagagcctcctttccagccggaacatgagctccaggaagaagtctccagcctggaagcatttttttatctctccccgagacagcactaaagcaatatgcatgtactgtgtgaaggagttcagcagaggcaaaaacgagaaagacttgagtaccagttgtctcatgaggcacgtgaggcgcgcacacccgaccgtgctcattcaggaaaatggcagcgtgtctgccgtgtcctcgttcccctctccctcactcctgcttccaccgcagcctgcggacgcgggtgacctcagcaccatcctctcacccatcaaacttgtccagaaagtggcgtctaagatcccgtcccccgatcgaataacagaggagtctgtgtctgtagtttcttctgaagaaatctcctctgacatgtccgtttcggagaagtgcggcagagaagaagccctggtggggtcgtctccccacctccctgctctccattacgatgaacctgcagagaacttagcggagaagagccttccacttccaaagagcacctctgggtccaggagaaggtccgctgtctggaagcacttctacctgtcgccactggacaactccaaagctgtctgcattcactgcatgaacgagttcagccgggggaagaatgggaaggacctgggcacgagctgcctcatcaggcacatgtggagggcacaccgcgccatcgtgttgcaggagaacgggggcacgggcatcccgccactgtactccacccctcccactctgctgccttccttgctgccgccggagggggagctcagctctgtgtcctcgtctccggtaaagccggtcagagagtccccttcggcctcctcctcccctgacaggctgactgaggacttgcagtctcacttgaaccctggagatgggctgatggaagacgtggcggccttctcatcttccgatgacgtaggggaggcctcggcgtcctctcctgagaagcagcaggctgatgggctgagtcctagattgtttgaatctggtgccatcttccagcagaataaaaaggtcatgaaaagactgaagtcggaggtctggcatcacttctccctggcccccatggacagcctcaaggccgagtgtcggtactgcggctgtgccatcagccgggggaagaagggtgatgtgggcaccagctgcctgatgagacatctctaccggcgccatccagaagttgtcgggagccagaagggcttcctgggtgcaagtctggcaaactctccgtatgccactttggcctctgcagaaagttcctcttccaaattgactgacttgccaacagtggtcacaaaaaacaatcaagttatgtttcctgttaatagcaaaaagacctcgaagctgtggaatcatttttctatttgctccgcagactccacaaaagtcgtgtgcttgcactgtggccggaccatcagccgggggaagaagccgactaacttgggtaccagctgtcttctgagacatttacagcggttccatagcaacgtgctgaaaactgaggtctcggagacggctcggccctcctctccggacacccgggtgccgcggggcacagaattatcaggcgcttcctcttttgatgacaccaatgagaagttttacgattctcacccagttgccaaaaaaatcacaagtctcatagctgaaatgattgcacttgacctccagccatattcttttgtagacaacgttggctttaacaggctgcttgaatacttgaaacctcagtactccctccccgccccttcctacttctccaggacagctatcccaggtatgtatgataatgtgaagcagataattatgtcccaccttaaggaagctgagagtggtgtgatccacttcacgtctggaatatggatgagtaaccagacccgtgagtacctgaccctcacggcccactgggtttccttcgagtcgccagcccggccgcgctgtgacgaccaccactgctcggcgctgttggacgtgtcgcaggtggactgcgactacagtggcaacagcattcagaagcagctggagtgctggtgggaagcgtgggtgacctccaccggccttcaggtgggcatcaccgtcaccgacaacgccagcatcgggaagacgctgaacgagggggagcactcgagcgtgcagtgcttcagccatacggtgaacctgatcgtcagcgaggccattaagagccagcggatggtgcagaacctgctgagcctcgcccggaagatctgcgagcgggtgcaccggtcgcccaaggcgaaggagaaactggccgagctgcagagggagtacgcgctgcctcagcatcacctcatccaggacgtcccgtccaagtggagcacttccttccacatgctcgagcggctcattgagcagaaaagggccattaacgagatgtccgtcgagtgtaacttccgagagctgatcagctgcgaccagtgggaggtcatgcagtccgtgtgccgtgcgctaaagcccttcgaggccgcgagccgggagatgagcacgcagatgtccaccctcagccaggtcatccccatggtacacatcctcaacaggaaggtggagatgctcttcgaggagacgatgggcatcgacaccatgctgcgctctctgaaggaggccatggtgagccgcctgtctgccaccctccacgacccgcggtacgtcttcgccacgctgctggatcctcgctacaaggcctccctgtttacggaggaggaggcggagcagtacaaacaggatttaatcagggaactcgaactcatgaattctacctcagaggacgtggctgcctcccacaggtgtgatgctggctccccgtcgaaagactctgccgcagaggagaacctgtggtcacttgtggccaaggtgaagaagaaagacccaagagaaaagctgcctgaagccatggtgcttgcgtatctggaggaggaggtgcttgaacacagctgtgacccgctcacctactggaacctgaagaaggcgtcctggccggggctgtccgcgctggccgtcagatttttgggctgccccccaagcatcgtcccttcagaaaagctgttcaacacacccataggccagaggcgtggctgccccagcgttagcagccctgaggggttgccttggccgcagcctctgtgcacgctcttcctggtgtcctcttacccggtagctgtgcgcttgttcccgtgagaacagcctgcttccagagtgcccaggagtgctggtcagggacagtgcccgtgaggctgcagaggaggtggggtccatggcccacccatctctccctcgccagcagccctggccagtgtcatcctggtgtagaaagggttgcgcacaggataggagggagccacagttcttgcttagctgtgctcacgaccggcttgcagtcctgtgtttcttaagattgtatttggaatggtaatatccttagaattttgggatattgagcttcatggattttctctccaaaacaagccagcacaactaactgtagcagaattgtatccactcattcattcaactgagatgaagtgccctcccttttccagggcctgggctagttcctggaatgcaacagagatttccgtggacacagtctctagtctcacagagcatatagtctagtccacgattggcaagctgcaaccacagacccagtccggcactctgcccatttttctaagtgaaattttcttggaatacagtcacagctgtttttttaacatggtgtcttggctactttcaggctgcgacgggagaattgaatagttgtgacagagaccacaggcccactgaaagggacaaacagggctgaaaatactcactgtttggccctttccagaatagcaagtttgctggcccttgagctagcctgcctttatggggttttttttgtttgtttttttaagctttcagcttcatgctgctgtatttttagttgaagtgttctgagtaacagtcagtgtataaaaggggattgcagaaaaaaatgagggcttgctttactcaacagaaaatatggcccttcctgaatgacactaggagagtcattttatctcatacattcccttcatttcgttggtggacatttgttgaaaccggcactcaatggtcaaaccgtctgtgccctccagttgctgacagtcctgcaggaagatggacaagaggcccagtgctgacagtcacacgactctcactacttgaatgaggggactgtgggtgcaactagaaaatatgttgattcttagccattcccaccttgcctctccgttcagaaccccagctgcgagctgtttgtttccctgcctggaaatgatgttttaggcaggttccttaatttctcaggtctgtctcagataataaaaagctctttgtatgagcctcagaactgtctcttcagtgaatgaaattaccagtcattatacgaagggactttaaaaaatttgtggaaatactgaagtaaaagatgataaaaaaataaaaactttatttcttggctgggcacagtggcttatgtttgtaatcccagtactttgggaggctgaggtgggaggactgcttgaggccaggagttcaagaaattagccaggtttggtagtgcatgcctgtagtcccagctacttgggaggcagagggaggaggattacttgagcccaggagtttgaggttgcagtgagctgtgatcacaccactgcactctagcctggacaacagagcaagatcctctctcttaaaaccaccaacaatgacaacaacaaaacaacatttttatttctcaatgtaagctccatcaagntcaagatacttttgtaagctgtgacaccagccatttagtccacctctaaagaattgcnggctctgggaatttaaccatgtcagtgcagcctttttaacattattaacggaagaaaaaatgagtgcttttaaagattttttaaaatgaggaaacaaagtcagaaggagcaaaatcgggactgtaaggtggatgcctaatgatttcccaacaaaactcttgaagaattgcccttatttgatgagaagaatgagccaggagcattgtcatcgtggagaaagacactgntgaggctttcctgggtgtgtttttgctaaagcttcggctnactttctcaaaacactctcataataagatgttattgtggccagatgcggtggctcacgcctgtaatcccagcactttgggaggctgaggtgggcngatcacgaggtcaggaaatcgagaccatcctggctaacatggtgaaaccccgtcccgtctccactaaaaatacaaaaaattagctgggcgtggtggcaggcacctctagtcccagctactccagctactcggaaggctgaggcaggagaatggcgtgaacctgggaggcagagcttgcagctagctgagattgtgccactgcactccagcctgggcgacagagcgagactccatctcaaaaaaaaaaaaaaatgttctttggccctccagaaagtcaacaagcaaaatgcattgagcatcccaagaaactgttgccatgaccttactttgacttgtccacatttgccttgactaggccacttctacctcttggtagccattgctttgattgtggtttgtcttcaggatggtactggtaaagtcctgttccatctcctgttataattcaaggaaatgcttcagggtcttgatgccacttgtttaaaatttccattgaaagctctgctcttgtctgcagctgatctgggcacaacggttttggcacccatcgagtggaaagcttgctcaacttcaattttgaaccagttgagatgtctgtggtcttggctattgttctgttaatcgtc

SEQ ID NO: 405526 - DNA, 3565 bp, Homo sapiens
ccggccacggtgcttccgggttctggtgtaggagcggcgtcttctcgcgcggatggtgaagctgaatttggtacgctggaccctcggacagacagcaagagagagacaagcccgaggcctgacttctagcactcctgagtttgagccctatgagcagtggaacctagggaccaccaaggatccagatataattctttcctcagtaatagaaaaaagaatctgggatctaagaagatacctactcattttctaagtgactggccatgtcattgtcccacttataccgggatggggaaggccgcattgatgatgatgatgacgagcgggagaactttgagatcactgactgggatctccagaatgagttcaaccccaaccgacagcgccactggcagaccaaggaagaagccacctacggggtgtgggcagagcgagactcggatgatgagaggcccagctttggaggcaaacgggcccgtgactactctgcgccagtcaacttcatcagcgcagggctcaagaaaggggcagcggaggaggcagagttggaagattctgatgacgaagagaaacctgttaagcaggacgactttcctaaggattttggaccaaggaagctaaaaacgggtggcaattttaagcccagccagaaaggttttgcaggaggaaccaaatctttcatggacttcggcagctgggaaagacacacaaaaggaattggacagaagcttcttcagaagatgggctacgtccctggacggggcctcgggaagaatgcacaaggtatcattaacccaattgaagccaagcagagaaagggaaaaggtgctgtgggggcttatggatccgagcgcaccactcagtccatgcaagacttccctgtggttgactcagaggaagaagctgaagaggagtttcagaaggagctgagccagtggaggaaagacccaagtggaagcaagaagaagcccaaatactcttacaagaccgtggaagagttgaaggccaagggcaggattagcaagaagctcactgctccccagaaggaactttctcaagtcaaggtcatagacatgacaggccgggagcagaaggtctactacagctacagtcagatcagccacaagcacaacgttcccgatgatgggctgccgctacagtcccaacagctgccacagtctggcaaagaggccaaggcccccggcttcgcgctgcccgagctggagcacaacctgcagctgctcatcgacctcacggagcaggagatcatccagaatgaccggcagctacagtatgagcgggacatggtggtcaacctcttccacgagctggagaagatgaccgaggtcctggaccacgaggagcgggtcatctcgaacctcagcaaggtcctggagatggtggaggagtgcgagcggcggatgcagcccgactgcagcaaccccctcaccctggacgagtgtgcccgcatcttcgaaaccctgcaggacaagtactatgaggagtacaggatgtccgaccgtgtggaccttgctgtggccatcgtctatccactcatgaaggagtacttcaaggagtgggatcccctcaaagactgcacttatggcaccgagatcatctctaagtggaaaagcctcctagagaatgaccagctcttgtcccatggcggacaggacctctcagcagatgcctttcacaggttgatatgggaagtctggatgccttttgttcgaaatattgtcacccagtggcagccaaggaactgtgacccgatggtggactttttggatagttgggtgcacattattcctgtgtggatcttagataacatactggaccaactcatcttccccaagctgcaaaaggaggtggaaaactggaacccgctcacagacactgttcccatccactcttggatccacccatggctgccccttatgcaggcacggctggagccactctattcccccatccgtagtaagctgtccagcgccctgcagaagtggcaccccagcgactcctctgccaagctcatcctccagccctggaaggatgtcttcactcctggctcctgggaagcattcatggtcaaaaacatagtgcccaagctggggatgtgtcttggtgagctagtcattaacccccaccagcagcacatggatgcattctattgggtgattgactgggaagggatgatctctgtctctagcctggtgggacttcttgaaaagcacttcttccccaagtggcttcaggtgctgtgctcttggctcagtaacagcccaaattatgaggagatcaccaagtggtacctgggttggaagtcgatgttctcagaccaagtgctggcacatccatctgtcaaggacaaatttaatgaggcacttgatatcatgaaccgggcggtgtcctccaacgttggtgcctacatgcagccaggagcacgggagaacattgcctatctcacccacacggagcggaggaaggacttccagtacgaggccatgcaggagaggcgggaggctgagaacatggctcagaggggcattggcgtggccgctagctctgtgcccatgaactttaaggacctcattgagaccaaggctgaggagcacaacattgtcttcatgcccgtcattgggaagcgacacgaagggaagcagctctacacctttggccgcattgtgatctacatcgaccggggagtggtctttgtccagggcgagaagacgtgggtgcccacctcactgcagagcctgatcgacatggccaagtgaactgtggcaggtccagaaccagtcagagacttgcccctaagagggatgtactgtaaataaacagtatttttagatcaccttcaaaagggtaacttctttactcaggagctactccacatcaggccaggtcatgagggaaggatgtaaaacgggacaatgccacgtagggcaggaatctttataccaagtcctcatgtggggtatcgtcctcaaaacaggacagccaagttgatgttctttcctggcaaaggagttctctgtagttcctccatagcagccttccctttagtctctggtggcagcttctacctcagccaacactgagtacctcacaacgagttcagtcagtagcagaaggatcttctctcttgttcctgatgatttcaaggtcctcacagtcctgataatctggttcttcccgaaactcccaaatatctatggagagctgttctagcttttgcacagggaaccagtggacagaggtatcattaaatatgtccatgtattgtgaagtctgaggaaactcaagctcctccagtccttttaaaatctgagcagaaaaattcaagtataaaaacttcagatagtcacagtaatccccactcttctgggataaatttccactttacttgtcatccccactttactttttaaaaaaataacaaatagggtattttgatttaaatgcttttgcacaatgaattgggcgccccaaggacagtggatatcatggactgtgatactaagaataaaggaaataaggaaaaaactaagagatgcattaaaga

SEQ ID NO: 405527 - DNA, 1670 bp, Homo sapiens
ttttttttcatagtgggcaccatttattggacatttgccatgtatcagaagctgttccaagcactttatttgctttatctcagctcctctcagcaaccctatggggtaggggatatggtatccctgttgtgtagacatggaagctgaggctcagagagtttacatgcaagggcactttagctaccaggctgactccaaaatccatattcataagtgctagactgtttagctactataaatccctgtaaagtagtgtcactagcctgtaggaccaggatcaaaacaaaacaaatggccacttcagaaatcttgccttcatttgttgccacgatggatgcaagtaatttttctttttggcaggtgctgtgctcttggctcagtaacagcccaaattatgaggagatcaccaagtggtacctgggttggaagtcgatgttctcagaccaagtgctggcacatccatctgtcaaggacaaatttaatgaggcacttgatatcatgaaccgggcggtgtcctccaacgttggtgcctacatgcagccaggagcacgggagaacattgcctatctcacccacacggagcggaggaaggacttccagtacgaggccatgcaggagaggcgggaggctgagaacatggctcagaggggcattggcgtggccgctagctctgtgcccatgaactttaaggacctcattgagaccaaggctgaggagcacaacattgtcttcatgcccgtcattgggaagcgacacgaagggaagcagctctacacctttggccgcattgtgatctacatcgaccggggagtggtctttgtccagggcgagaagacgtgggtgcccacctcactgcagagcctgatcgacatggccaagtgaactgtggcaggtccagaaccagtcagagacttgcccctaagagggatgtactgtaaataaacagtatttttagatcaccttcaaaagggtaacttctttactcaggagctactccacatcaggccaggtcatgagggaaggatgtaaaacgggacaatgccacgtagggcaggaatctttataccaagtcctcatgtggggtatcgtcctcaaaacaggacagccaagttgatgttctttcctggcaaaggagttctctgtagttcctccatagcagccttccctttagtctctggtggcagcttctacctcagccaacactgagtacctcacaacgagttcagtcagtagcagaaggatcttctctcttgttcctgatgatttcaaggtcctcacagtcctgataatctggttcttcccgaaactcccaaatatctatggagagctgttctagcttttgcacagggaaccagtggacagaggtatcattaaatatgtccatgtattgtgaagtctgaggaaactcaagctcctccagtccttttaaaatctgagcagaaaaattcaagtataaaaacttcagatagtcacagtaatccccactcttctgggataaatttccactttacttgtcatccccactttactttttaaaaaaataacaaatagggtattttgatttaaatgcttttgcacaatgaattgggcgccccaaggacagtggatatcatggactgtgatactaagaataaaggaaataaggaaaaaactaagagatgcattaaaga

SEQ ID NO: 405528 - DNA, 3676 bp, Homo sapiens
acaaggggactcagcgccagtgagagtagggacgaaggctcagggaaggcgagcttcggtccaagccgttggggtgtggggaggggaatccatttcgtagacagctctgccgaggcacggagaggggcggtgctgcttggggtcaactgggatttagggcttggattcatttaagaacctgagcttccttcaccaaacctagacagcaagagagagacaagcccgaggcctgacttctagcactcctgagtttgagccctatgagcagtggaacctagggaccaccaaggatccagatataattctttcctcagtaatagaaaaaagaatctgggatctaagaagatacctactcattttctaagtgactggccatgtcattgtcccacttataccgggatggggaaggccgcattgatgatgatgatgacgagcgggagaactttgagatcactgactgggatctccagaatgagttcaaccccaaccgacagcgccactggcagaccaaggaagaagccacctacggggtgtgggcagagcgagactcggatgatgagaggcccagctttggaggcaaacgggcccgtgactactctgcgccagtcaacttcatcagcgcagggctcaagaaaggggcagcggaggaggcagagttggaagattctgatgacgaagagaaacctgttaagcaggacgactttcctaaggattttggaccaaggaagctaaaaacgggtggcaattttaagcccagccagaaaggttttgcaggaggaaccaaatctttcatggacttcggcagctgggaaagacacacaaaaggaattggacagaagcttcttcagaagatgggctacgtccctggacggggcctcgggaagaatgcacaaggtatcattaacccaattgaagccaagcagagaaagggaaaaggtgctgtgggggcttatggatccgagcgcaccactcagtccatgcaagacttccctgtggttgactcagaggaagaagctgaagaggagtttcagaaggagctgagccagtggaggaaagacccaagtggaagcaagaagaagcccaaatactcttacaagaccgtggaagagttgaaggccaagggcaggattagcaagaagctcactgctccccagaaggaactttctcaagtcaaggtcatagacatgacaggccgggagcagaaggtctactacagctacagtcagatcagccacaagcacaacgttcccgatgatgggctgccgctacagtcccaacagctgccacagtctggcaaagaggccaaggcccccggcttcgcgctgcccgagctggagcacaacctgcagctgctcatcgacctcacggagcaggagatcatccagaatgaccggcagctacagtatgagcgggacatggtggtcaacctcttccacgagctggagaagatgaccgaggtcctggaccacgaggagcgggtcatctcgaacctcagcaaggtcctggagatggtggaggagtgcgagcggcggatgcagcccgactgcagcaaccccctcaccctggacgagtgtgcccgcatcttcgaaaccctgcaggacaagtactatgaggagtacaggatgtccgaccgtgtggaccttgctgtggccatcgtctatccactcatgaaggagtacttcaaggagtgggatcccctcaaagactgcacttatggcaccgagatcatctctaagtggaaaagcctcctagagaatgaccagctcttgtcccatggcggacaggacctctcagcagatgcctttcacaggttgatatgggaagtctggatgccttttgttcgaaatattgtcacccagtggcagccaaggaactgtgacccgatggtggactttttggatagttgggtgcacattattcctgtgtggatcttagataacatactggaccaactcatcttccccaagctgcaaaaggaggtggaaaactggaacccgctcacagacactgttcccatccactcttggatccacccatggctgccccttatgcaggcacggctggagccactctattcccccatccgtagtaagctgtccagcgccctgcagaagtggcaccccagcgactcctctgccaagctcatcctccagccctggaaggatgtcttcactcctggctcctgggaagcattcatggtcaaaaacatagtgcccaagctggggatgtgtcttggtgagctagtcattaacccccaccagcagcacatggatgcattctattgggtgattgactgggaagggatgatctctgtctctagcctggtgggacttcttgaaaagcacttcttccccaagtggcttcaggtgctgtgctcttggctcagtaacagcccaaattatgaggagatcaccaagtggtacctgggttggaagtcgatgttctcagaccaagtgctggcacatccatctgtcaaggacaaatttaatgaggcacttgatatcatgaaccgggcggtgtcctccaacgttggtgcctacatgcagccaggagcacgggagaacattgcctatctcacccacacggagcggaggaaggacttccagtacgaggccatgcaggagaggcgggaggctgagaacatggctcagaggggcattggcgtggccgctagctctgtgcccatgaactttaaggacctcattgagaccaaggctgaggagcacaacattgtcttcatgcccgtcattgggaagcgacacgaagggaagcagctctacacctttggccgcattgtgatctacatcgaccggggagtggtctttgtccagggcgagaagacgtgggtgcccacctcactgcagagcctgatcgacatggccaagtgaactgtggcaggtccagaaccagtcagagacttgcccctaagagggatgtactgtaaataaacagtatttttagatcaccttcaaaagggtaacttctttactcaggagctactccacatcaggccaggtcatgagggaaggatgtaaaacgggacaatgccacgtagggcaggaatctttataccaagtcctcatgtggggtatcgtcctcaaaacaggacagccaagttgatgttctttcctggcaaaggagttctctgtagttcctccatagcagccttccctttagtctctggtggcagcttctacctcagccaacactgagtacctcacaacgagttcagtcagtagcagaaggatcttctctcttgttcctgatgatttcaaggtcctcacagtcctgataatctggttcttcccgaaactcccaaatatctatggagagctgttctagcttttgcacagggaaccagtggacagaggtatcattaaatatgtccatgtattgtgaagtctgaggaaactcaagctcctccagtccttttaaaatctgagcagaaaaattcaagtataaaaacttcagatagtcacagtaatccccactcttctgggataaatttccactttacttgtcatccccactttactttttaaaaaaataacaaatagggtattttgatttaaatgcttttgcacaatgaattgggcgccccaaggacagtggatatcatggactgtgatactaagaataaaggaaataaggaaaaaactaagagatgcattaaaga

SEQ ID NO: 405529 - DNA, 3600 bp, Homo sapiens
ccggccacggtgcttccgggttctggtgtaggagcggcgtcttctcgcgcggatggtgaagctgaatttggtacgctggaccctcggacagacagcaagagagagacaagcccgaggcctgacttctagcactcctgagtttgagccctatgagcagtggaacctaggcctgcagacagcctattgtgggaccttttgatcgtgaccaccaaggatccagatataattctttcctcagtaatagaaaaaagaatctgggatctaagaagatacctactcattttctaagtgactggccatgtcattgtcccacttataccgggatggggaaggccgcattgatgatgatgatgacgagcgggagaactttgagatcactgactgggatctccagaatgagttcaaccccaaccgacagcgccactggcagaccaaggaagaagccacctacggggtgtgggcagagcgagactcggatgatgagaggcccagctttggaggcaaacgggcccgtgactactctgcgccagtcaacttcatcagcgcagggctcaagaaaggggcagcggaggaggcagagttggaagattctgatgacgaagagaaacctgttaagcaggacgactttcctaaggattttggaccaaggaagctaaaaacgggtggcaattttaagcccagccagaaaggttttgcaggaggaaccaaatctttcatggacttcggcagctgggaaagacacacaaaaggaattggacagaagcttcttcagaagatgggctacgtccctggacggggcctcgggaagaatgcacaaggtatcattaacccaattgaagccaagcagagaaagggaaaaggtgctgtgggggcttatggatccgagcgcaccactcagtccatgcaagacttccctgtggttgactcagaggaagaagctgaagaggagtttcagaaggagctgagccagtggaggaaagacccaagtggaagcaagaagaagcccaaatactcttacaagaccgtggaagagttgaaggccaagggcaggattagcaagaagctcactgctccccagaaggaactttctcaagtcaaggtcatagacatgacaggccgggagcagaaggtctactacagctacagtcagatcagccacaagcacaacgttcccgatgatgggctgccgctacagtcccaacagctgccacagtctggcaaagaggccaaggcccccggcttcgcgctgcccgagctggagcacaacctgcagctgctcatcgacctcacggagcaggagatcatccagaatgaccggcagctacagtatgagcgggacatggtggtcaacctcttccacgagctggagaagatgaccgaggtcctggaccacgaggagcgggtcatctcgaacctcagcaaggtcctggagatggtggaggagtgcgagcggcggatgcagcccgactgcagcaaccccctcaccctggacgagtgtgcccgcatcttcgaaaccctgcaggacaagtactatgaggagtacaggatgtccgaccgtgtggaccttgctgtggccatcgtctatccactcatgaaggagtacttcaaggagtgggatcccctcaaagactgcacttatggcaccgagatcatctctaagtggaaaagcctcctagagaatgaccagctcttgtcccatggcggacaggacctctcagcagatgcctttcacaggttgatatgggaagtctggatgccttttgttcgaaatattgtcacccagtggcagccaaggaactgtgacccgatggtggactttttggatagttgggtgcacattattcctgtgtggatcttagataacatactggaccaactcatcttccccaagctgcaaaaggaggtggaaaactggaacccgctcacagacactgttcccatccactcttggatccacccatggctgccccttatgcaggcacggctggagccactctattcccccatccgtagtaagctgtccagcgccctgcagaagtggcaccccagcgactcctctgccaagctcatcctccagccctggaaggatgtcttcactcctggctcctgggaagcattcatggtcaaaaacatagtgcccaagctggggatgtgtcttggtgagctagtcattaacccccaccagcagcacatggatgcattctattgggtgattgactgggaagggatgatctctgtctctagcctggtgggacttcttgaaaagcacttcttccccaagtggcttcaggtgctgtgctcttggctcagtaacagcccaaattatgaggagatcaccaagtggtacctgggttggaagtcgatgttctcagaccaagtgctggcacatccatctgtcaaggacaaatttaatgaggcacttgatatcatgaaccgggcggtgtcctccaacgttggtgcctacatgcagccaggagcacgggagaacattgcctatctcacccacacggagcggaggaaggacttccagtacgaggccatgcaggagaggcgggaggctgagaacatggctcagaggggcattggcgtggccgctagctctgtgcccatgaactttaaggacctcattgagaccaaggctgaggagcacaacattgtcttcatgcccgtcattgggaagcgacacgaagggaagcagctctacacctttggccgcattgtgatctacatcgaccggggagtggtctttgtccagggcgagaagacgtgggtgcccacctcactgcagagcctgatcgacatggccaagtgaactgtggcaggtccagaaccagtcagagacttgcccctaagagggatgtactgtaaataaacagtatttttagatcaccttcaaaagggtaacttctttactcaggagctactccacatcaggccaggtcatgagggaaggatgtaaaacgggacaatgccacgtagggcaggaatctttataccaagtcctcatgtggggtatcgtcctcaaaacaggacagccaagttgatgttctttcctggcaaaggagttctctgtagttcctccatagcagccttccctttagtctctggtggcagcttctacctcagccaacactgagtacctcacaacgagttcagtcagtagcagaaggatcttctctcttgttcctgatgatttcaaggtcctcacagtcctgataatctggttcttcccgaaactcccaaatatctatggagagctgttctagcttttgcacagggaaccagtggacagaggtatcattaaatatgtccatgtattgtgaagtctgaggaaactcaagctcctccagtccttttaaaatctgagcagaaaaattcaagtataaaaacttcagatagtcacagtaatccccactcttctgggataaatttccactttacttgtcatccccactttactttttaaaaaaataacaaatagggtattttgatttaaatgcttttgcacaatgaattgggcgccccaaggacagtggatatcatggactgtgatactaagaataaaggaaataaggaaaaaactaagagatgcattaaaga

SEQ ID NO: 405530 - DNA, 5336 bp, Homo sapiens
ccggccacggtgcttccgggttctggtgtaggagcggcgtcttctcgcgcggatggtgaagctgaatttggtacgctggaccctcggacagacagcaagagagagacaagcccgaggcctgacttctagcactcctgagtttgagccctatgagcagtggaacctagggaccaccaaggatccagatataattctttcctcagtaatagaaaaaagaatctgggatctaagaagatacctactcattttctaagtgactggccatgtcattgtcccacttataccgggatggggaaggccgcattgatgatgatgatgacgagcgggagaactttgagatcactgactgggatctccagaatgagttcaaccccaaccgacagcgccactggcagaccaaggaagaagccacctacggggtgtgggcagagcgagactcggatgatgagaggcccagctttggaggcaaacgggcccgtgactactctgcgccagtcaacttcatcagcgcagggctcaagaaaggggcagcggaggaggcagagttggaagattctgatgacgaagagaaacctgttaagcaggacgactttcctaaggattttggaccaaggaagctaaaaacgggtggcaattttaagcccagccagaaaggttttgcaggaggaaccaaatctttcatggacttcggcagctgggaaagacacacaaaaggaattggacagaagcttcttcagaagatgggctacgtccctggacggggcctcgggaagaatgcacaaggtatcattaacccaattgaagccaagcagagaaagggaaaaggtgctgtgggggcttatggatccgagcgcaccactcagtccatgcaagacttccctgtggttgactcagaggaagaagctgaagaggagtttcagaaggagctgagccagtggaggaaagacccaagtggaagcaagaagaagcccaaatactcttacaagaccgtggaagagttgaaggccaagggcaggattagcaagaagctcactgctccccagaaggaactttctcaagtcaaggtcatagacatgacaggccgggagcagaaggtctactacagctacagtcagatcagccacaagcacaacgttcccgatgatgggctgccgctacagtcccaacagctgccacagtctggcaaagaggccaaggcccccggcttcgcgctgcccgagctggagcacaacctgcagctgctcatcgacctcacggagcaggagatcatccagaatgaccggcagctacagtatgagcgggacatggtggtcaacctcttccacgagctggagaagatgaccgaggtcctggaccacgaggagcgggtcatctcgaacctcagcaaggtcctggagatggtggaggagtgcgagcggcggatgcagcccgactgcagcaaccccctcaccctggacgagtgtgcccgcatcttcgaaaccctgcaggacaagtactatgaggagtacaggatgtccgaccgtgtggaccttgctgtggccatcgtctatccactcatgaaggagtacttcaaggagtgggatcccctcaaagactgcacttatggcaccgagatcatctctaagtggaaaagcctcctagagaatgaccagctcttgtcccatggcggacaggacctctcagcagatgcctttcacaggttgatatgggaagtctggatgccttttgttcgaaatattgtcacccagtggcagccaaggaactgtgacccgatggtggactttttggatagttgggtgcacattattcctgtgtggatcttagataacatactggaccaactcatcttccccaagctgcaaaaggaggtggaaaactggaacccgctcacagacactgttcccatccactcttggatccacccatggctgccccttatgcaggcacggctggagccactctattcccccatccgtagtaagctgtccagcgccctgcagaagtggcaccccagcgactcctctgccaagctcatcctccagccctggaaggatgtcttcactcctggctcctgggaagcattcatggtcaaaaacatagtgcccaagctggggatgtgtcttggtgagctagtcattaacccccaccagcagcacatggatgcattctattgggtgattgactgggaagggatgatctctgtctctagcctggtgggacttcttgaaaagcacttcttccccaagtggcttcaggtgctgtgctcttggctcagtaacagcccaaattatgaggagatcaccaagtggtacctgggttggaagtcgatgttctcagaccaagtgctggcacatccatctgtcaaggacaaatttaatgaggcacttgatatcatgaaccgggcggtgtcctccaacgttggtaagtgaggattcccattttggatgtcctggccccaagtttcagattttacacatgtaaatgacacagaatcagagttttctggttcctgtaggcagcctaaaccttaggtcacacttttgcacatagcaacagactctcaccctgctgactggggtacatggtcagctggcacccactgcccaggtctaccatgactgagaggggcatcttccctgagtggagactgacttaagctggattcagatgatgtcagtctaaccccaggccccgccctcttaaccactgtgctgtgtggccttttaaggctcattcatgcctgagcatgctgcttaggtgacgcatctttacagtgtggagtttggcacgcggtctgacacttggtgattgctcagccttaatcagccccattttacctgttaaacagtaagatctactttataggctaaaagggagagtgagttcatgcttgtgtatagccttcaataggtggtgtctgtgttgtcaaaaacaggcagttcactgttcgtgtactatatctattcccaagttctaggtaagtcattctgcctagatcataagtaagtgagagtatatttatgtttctacatttgggagcctatttcaaccagtcctgtgctccagtgttgctcattagccgattcgcagcattgaaatgggatcgtctagtctgtgttttacagataagcccagcgaggctgagagcctgttcaaggtcacatagttaaagggtggcagttagaactggaatttctatttcctgagtctttaattcttgttatttaatagcctaggccaggcacggtggctcacgcctgtaatcctagcactttgggaggccgaggcgggtagatcacgaggtcaggagttcgagaccagcctgaccaacatggtgaaaccccgtctctactaaaaatgcaaaaattagccgggcgcggtggcacatgcctgtaatgccagctacttaggaggctgaggcagaagaatcgcttaaacctgggaggcagaggttgtagtgagccgagattgcaagcactgcactccagcctaggtgacaagagcgagactcggtctcaaaaaaaaaaaaagaaaaatagcctattctgtgaaaacagagattaagtaataaggcaaatatacttctctgcttctgtaattatcaagttttttctaaaaactcttccttagctacccttggcctcatgtttccaaaactgttccctgaatatacccctcaattagcacttagcatttatggtcttggtattatcctttaaacactcatttcagctccctaaatatatgtgaacttctttcaggatgggggccctgtgtgggtaggttaaaaataaagccagtgtgggccctatgttttcaaggtactaaaagctgcctctttggtggtgggaaatggaaactctacagagcaaggtgggaacagaagagtggctgaggactctctgttaatgtttccagctctgaaggaagaaatcccttgcagatacttcattttaaaatgttgaatattaataatctggttactagatactagccaggaaccttctgaacagtttttatgtgatactggccagtcgtctaaacttcctccaaagttgtatctttgaggcagagctgcccttcagtgagtcacaagcactctggcacacccaagacctgggccaagccacagtgtcaacttccatacacctggaaacacctctcctcaccgccctgtcctcctgtatcttaggtgcctacatgcagccaggagcacgggagaacattgcctatctcacccacacggagcggaggaaggacttccagtacgaggccatgcaggagaggcgggaggctgagaacatggctcagaggggcattggcgtggccgctagctctgtgcccatgaactttaaggacctcattgagaccaaggctgaggagcacaacattgtcttcatgcccgtcattgggaagcgacacgaagggaagcagctctacacctttggccgcattgtgatctacatcgaccggggagtggtctttgtccagggcgagaagacgtgggtgcccacctcactgcagagcctgatcgacatggccaagtgaactgtggcaggtccagaaccagtcagagacttgcccctaagagggatgtactgtaaataaacagtatttttagatcaccttcaaaagggtaacttctttactcaggagctactccacatcaggccaggtcatgagggaaggatgtaaaacgggacaatgccacgtagggcaggaatctttataccaagtcctcatgtggggtatcgtcctcaaaacaggacagccaagttgatgttctttcctggcaaaggagttctctgtagttcctccatagcagccttccctttagtctctggtggcagcttctacctcagccaacactgagtacctcacaacgagttcagtcagtagcagaaggatcttctctcttgttcctgatgatttcaaggtcctcacagtcctgataatctggttcttcccgaaactcccaaatatctatggagagctgttctagcttttgcacagggaaccagtggacagaggtatcattaaatatgtccatgtattgtgaagtctgaggaaactcaagctcctccagtccttttaaaatctgagcagaaaaattcaagtataaaaacttcagatagtcacagtaatccccactcttctgggataaatttccactttacttgtcatccccactttactttttaaaaaaataacaaatagggtattttgatttaaatgcttttgcacaatgaattgggcgccccaaggacagtggatatcatggactgtgatactaagaataaaggaaataaggaaaaaactaagagatgcattaaaga

SEQ ID NO: 405531 - DNA, 3248 bp, Homo sapiens
ccggccacggtgcttccgggttctggtgtaggagcggcgtcttctcgcgcggatggtgaagctgaatttggtacgctggaccctcggacagacagcaagagagagacaagcccgaggcctgacttctagcactcctgagtttgagccctatgagcagtggaacctagggaccaccaaggatccagatataattctttcctcagtaatagaaaaaagaatctgggatctaagaagatacctactcattttctaagtgactggccatgtcattgtcccacttataccgggatggggaaggccgcattgatgatgatgatgacgagcgggagaactttgagatcactgactgggatctccagaatgagttcaaccccaaccgacagcgccactggcagaccaaggaagaagccacctacggggtgtgggcagagcgagactcggatgatgagaggcccagctttggaggcaaacgggcccgtgactactctgcgccagtcaacttcatcagcgcagggctcaagaaaggggcagcggaggaggcagagttggaagattctgatgacgaagagaaacctgttaagcaggacgactttcctaaggattttggaccaaggaagctaaaaacgggtggcaattttaagcccagccagaaaggttttgcaggaggaaccaaatctttcatggacttcggcagctgggaaagacacacaaaaggaattggacagaagcttcttcagaagatgggctacgtccctggacggggcctcgggaagaatgcacaaggtatcattaacccaattgaagccaagcagagaaagggaaaaggtgctgtgggggcttatggatccgagcgcaccactcagtccatgcaagacttccctgtggttgactcagaggaagaagctgaagaggagtttcagaaggagctgagccagtggaggaaagacccaagtggaagcaagaagaagcccaaatactcttacaagaccgtggaagagttgaaggccaagggcaggattagcaagaagctcactgctccccagaaggaactttctcaagtcaaggtcatagacatgacaggccgggagcagaaggtctactacagctacagtcagatcagccacaagcacaacgttcccgatgatgggctgccgctacagtcccaacagctgccacagtctggcaaagaggccaaggcccccggcttcgcgctgcccgagctggagcacaacctgcagctgctcatcgacctcacggagcaggagatcatccagaatgaccggcagctacagtatgagcgggacatggtggtcaacctcttccacgagctggagaagatgaccgaggtcctggaccacgaggagcgggtcatctcgaacctcagcaaggtcctggagatggtggaggagtgcgagcggcggatgcagcccgactgcagcaaccccctcaccctggacgagtgtgcccgcatcttcgaaaccctgcaggacaagtactatgaggagtacaggatgtccgaccgtgtggaccttgctgtggccatcgtctatccactcatgaaggagtacttcaaggagtgggatcccctcaaagactgcacttatggcaccgagatcatctctaagtggaaaagcctcctagagaatgaccagctcttgtcccatggcggacaggacctctcagcagatgcctttcacaggttgatatgggaagtctggatgccttttgttcgaaatattgtcacccagtggctcctgggaagcattcatggtcaaaaacatagtgcccaagctggggatgtgtcttggtgagctagtcattaacccccaccagcagcacatggatgcattctattgggtgattgactgggaagggatgatctctgtctctagcctggtgggacttcttgaaaagcacttcttccccaagtggcttcaggtgctgtgctcttggctcagtaacagcccaaattatgaggagatcaccaagtggtacctgggttggaagtcgatgttctcagaccaagtgctggcacatccatctgtcaaggacaaatttaatgaggcacttgatatcatgaaccgggcggtgtcctccaacgttggtgcctacatgcagccaggagcacgggagaacattgcctatctcacccacacggagcggaggaaggacttccagtacgaggccatgcaggagaggcgggaggctgagaacatggctcagaggggcattggcgtggccgctagctctgtgcccatgaactttaaggacctcattgagaccaaggctgaggagcacaacattgtcttcatgcccgtcattgggaagcgacacgaagggaagcagctctacacctttggccgcattgtgatctacatcgaccggggagtggtctttgtccagggcgagaagacgtgggtgcccacctcactgcagagcctgatcgacatggccaagtgaactgtggcaggtccagaaccagtcagagacttgcccctaagagggatgtactgtaaataaacagtatttttagatcaccttcaaaagggtaacttctttactcaggagctactccacatcaggccaggtcatgagggaaggatgtaaaacgggacaatgccacgtagggcaggaatctttataccaagtcctcatgtggggtatcgtcctcaaaacaggacagccaagttgatgttctttcctggcaaaggagttctctgtagttcctccatagcagccttccctttagtctctggtggcagcttctacctcagccaacactgagtacctcacaacgagttcagtcagtagcagaaggatcttctctcttgttcctgatgatttcaaggtcctcacagtcctgataatctggttcttcccgaaactcccaaatatctatggagagctgttctagcttttgcacagggaaccagtggacagaggtatcattaaatatgtccatgtattgtgaagtctgaggaaactcaagctcctccagtccttttaaaatctgagcagaaaaattcaagtataaaaacttcagatagtcacagtaatccccactcttctgggataaatttccactttacttgtcatccccactttactttttaaaaaaataacaaatagggtattttgatttaaatgcttttgcacaatgaattgggcgccccaaggacagtggatatcatggactgtgatactaagaataaaggaaataaggaaaaaactaagagatgcattaaaga

SEQ ID NO: 405532 - DNA, 3441 bp, Homo sapiens
ttttttttcatagtgggcaccatttattggacatttgccatgtatcagaagctgttccaagcactttatttgctttatctcagctcctctcagcaaccctatggggtaggggatatggtatccctgttgtgtagacatggaagctgaggctcagagagtttacatgcaagggcactttagctaccaggctgactccaaaatccatattcataagtgctagactgtttagctactataaatccctgtaaagtagtgtcactagcctgtaggaccaggatcaaaacaaaacaaatggccacttcagaaatcttgccttcatttgttgccacgatggatgcaagtaatttttctttttggcaggtgctgtgctcttggctcagtaacagcccaaattatgaggagatcaccaagtggtacctgggttggaagtcgatgttctcagaccaagtgctggcacatccatctgtcaaggacaaatttaatgaggcacttgatatcatgaaccgggcggtgtcctccaacgttggtaagtgaggattcccattttggatgtcctggccccaagtttcagattttacacatgtaaatgacacagaatcagagttttctggttcctgtaggcagcctaaaccttaggtcacacttttgcacatagcaacagactctcaccctgctgactggggtacatggtcagctggcacccactgcccaggtctaccatgactgagaggggcatcttccctgagtggagactgacttaagctggattcagatgatgtcagtctaaccccaggccccgccctcttaaccactgtgctgtgtggccttttaaggctcattcatgcctgagcatgctgcttaggtgacgcatctttacagtgtggagtttggcacgcggtctgacacttggtgattgctcagccttaatcagccccattttacctgttaaacagtaagatctactttataggctaaaagggagagtgagttcatgcttgtgtatagccttcaataggtggtgtctgtgttgtcaaaaacaggcagttcactgttcgtgtactatatctattcccaagttctaggtaagtcattctgcctagatcataagtaagtgagagtatatttatgtttctacatttgggagcctatttcaaccagtcctgtgctccagtgttgctcattagccgattcgcagcattgaaatgggatcgtctagtctgtgttttacagataagcccagcgaggctgagagcctgttcaaggtcacatagttaaagggtggcagttagaactggaatttctatttcctgagtctttaattcttgttatttaatagcctaggccaggcacggtggctcacgcctgtaatcctagcactttgggaggccgaggcgggtagatcacgaggtcaggagttcgagaccagcctgaccaacatggtgaaaccccgtctctactaaaaatgcaaaaattagccgggcgcggtggcacatgcctgtaatgccagctacttaggaggctgaggcagaagaatcgcttaaacctgggaggcagaggttgtagtgagccgagattgcaagcactgcactccagcctaggtgacaagagcgagactcggtctcaaaaaaaaaaaaagaaaaatagcctattctgtgaaaacagagattaagtaataaggcaaatatacttctctgcttctgtaattatcaagttttttctaaaaactcttccttagctacccttggcctcatgtttccaaaactgttccctgaatatacccctcaattagcacttagcatttatggtcttggtattatcctttaaacactcatttcagctccctaaatatatgtgaacttctttcaggatgggggccctgtgtgggtaggttaaaaataaagccagtgtgggccctatgttttcaaggtactaaaagctgcctctttggtggtgggaaatggaaactctacagagcaaggtgggaacagaagagtggctgaggactctctgttaatgtttccagctctgaaggaagaaatcccttgcagatacttcattttaaaatgttgaatattaataatctggttactagatactagccaggaaccttctgaacagtttttatgtgatactggccagtcgtctaaacttcctccaaagttgtatctttgaggcagagctgcccttcagtgagtcacaagcactctggcacacccaagacctgggccaagccacagtgtcaacttccatacacctggaaacacctctcctcaccgccctgtcctcctgtatcttaggtgcctacatgcagccaggagcacgggagaacattgcctatctcacccacacggagcggaggaaggacttccagtacgaggccatgcaggagaggcgggaggctgagaacatggctcagaggggcattggcgtggccgctagctctgtgcccatgaactttaaggacctcattgagaccaaggctgaggagcacaacattgtcttcatgcccgtcattgggaagcgacacgaagggaagcagctctacacctttggccgcattgtgatctacatcgaccggggagtggtctttgtccagggcgagaagacgtgggtgcccacctcactgcagagcctgatcgacatggccaagtgaactgtggcaggtccagaaccagtcagagacttgcccctaagagggatgtactgtaaataaacagtatttttagatcaccttcaaaagggtaacttctttactcaggagctactccacatcaggccaggtcatgagggaaggatgtaaaacgggacaatgccacgtagggcaggaatctttataccaagtcctcatgtggggtatcgtcctcaaaacaggacagccaagttgatgttctttcctggcaaaggagttctctgtagttcctccatagcagccttccctttagtctctggtggcagcttctacctcagccaacactgagtacctcacaacgagttcagtcagtagcagaaggatcttctctcttgttcctgatgatttcaaggtcctcacagtcctgataatctggttcttcccgaaactcccaaatatctatggagagctgttctagcttttgcacagggaaccagtggacagaggtatcattaaatatgtccatgtattgtgaagtctgaggaaactcaagctcctccagtccttttaaaatctgagcagaaaaattcaagtataaaaacttcagatagtcacagtaatccccactcttctgggataaatttccactttacttgtcatccccactttactttttaaaaaaataacaaatagggtattttgatttaaatgcttttgcacaatgaattgggcgccccaaggacagtggatatcatggactgtgatactaagaataaaggaaataaggaaaaaactaagagatgcattaaaga

SEQ ID NO: 405533 - DNA, 3293 bp, Homo sapiens
ccggccacggtgcttccgggttctggtgtaggagcggcgtcttctcgcgcggatggtgaagctgaatttggtacgctggaccctcggacagacagcaagagagagacaagcccgaggcctgacttctagcactcctgagtttgagccctatgagcagtggaacctagggaccaccaaggatccagatataattctttcctcagtaatagaaaaaagaatctgggatctaagaagatacctactcattttctaagtgactggccatgtcattgtcccacttataccgggatggggaaggccgcattgatgatgatgatgacgagcgggagaactttgagatcactgactgggatctccagaatgagttcaaccccaaccgacagcgccactggcagaccaaggaagaagccacctacggggtgtgggcagagcgagactcggatgatgagaggcccagctttggaggcaaacgggcccgtgactactctgcgccagtcaacttcatcagcgcagggctcaagaaaggggcagcggaggaggcagagttggaagattctgatgacgaagagaaacctgttaagcaggacgactttcctaaggattttggaccaaggaagctaaaaacgggtggcaattttaagcccagccagaaaggttttgcaggaggaaccaaatctttcatggacttcggcagctgggaaagacacacaaaaggaattggacagaagcttcttcagaagatgggctacgtccctggacggggcctcgggaagaatgcacaaggtatcattaacccaattgaagccaagcagagaaagggaaaaggtgctgtgggggcttatggatccgagcgcaccactcagtccatgcaagacttccctgtggttgactcagaggaagaagctgaagaggagtttcagaaggagctgagccagtggaggaaagacccaagtggaagcaagaagaagcccaaatactcttacaagaccgtggaagagttgaaggccaagggcaggattagcaagaagctcactgctccccagaaggaactttctcaagtcaaggtcatagacatgacaggccgggagcagaaggtctactacagctacagtcagatcagccacaagcacaacgttcccgatgatgggctgccgctacagtcccaacagctgccacagtctggcaaagaggccaaggcccccggcttcgcgctgcccgagctggagcacaacctgcagctgctcatcgacctcacggagcaggagatcatccagaatgaccggcagctacagtatgagcgggacatggtggtcaacctcttccacgagctggagaagatgaccgaggtcctggaccacgaggagcgggtcatctcgaacctcagcaaggtcctggagatggtggaggagtgcgagcggcggatgcagcccgactgcagcaaccccctcaccctggacgagtgtgcccgcatcttcgaaaccctgcaggacaagtactatgaggagtacaggatgtccgaccgtgtggaccttgctgtggccatcgtctatccactcatgaaggagtacttcaaggagtgggatcccctcaaagactgcacttatggcaccgagatcatctctaagtggaaaagcctcctagagaatgaccagctcttgtcccatggcggacaggacctctcagcagatgcctttcacaggttgatatgggaagtctggatgccttttgttcgaaatattgtcacccagtggcagccaaggaactgtgacccgatggtggactttttggatagttgggtgcacattattcctgtgtggatcttagataacatactggaccaactcatcttccccaagctgcaaaaggaggtggaaaactggaacccgctcacagacactgttcccatccactcttggatccacccatggctgccccttatgcaggcacggctggagccactctattcccccatccgtagtaagctgtccagcgccctgcagaagtggcaccccagcgactcctctgccaagctcatcctccagccctggaaggatgtcttcactcctggctcctgggaagcattcatggtcaaaaacatagtgcccaagctggggatgtgtcttggtgagctagtcattaacccccaccagcagcacatggatgcattctattgggtgattgactgggaagggatgatctctgtctctagcctggtgggacttcttgaaaagcacttcttccccaagtggcttcaggtgctgtgctcttggctcagtaacagcccaaattatgaggagatcaccaagtggtacctgggttggaagtcgatgttctcagaccaagtgctggcacatccatctgtcaaggacaaatttaatgaggcacttgatatcatgaaccgggcggtgtcctccaacgttggtaagtgaggattcccattttggatgtcctggccccaagtttcagattttacacatgtaaatgacacagaatcagagttttctggttcctgtaggcagcctaaaccttaggtcacacttttgcacatagcaacagactctcaccctgctgactggggtacatggtcagctggcacccactgcccaggtctaccatgactgagaggggcatcttccctgagtggagactgacttaagctggattcagatgatgtcagtctaaccccaggccccgccctcttaaccactgtgctgtgtggccttttaaggctcattcatgcctgagcatgctgcttaggtgacgcatctttacagtgtggagtttggcacgcggtctgacacttggtgattgctcagccttaatcagccccattttacctgttaaacagtaagatctactttataggctaaaagggagagtgagttcatgcttgtgtatagccttcaataggtggtgtctgtgttgtcaaaaacaggcagttcactgttcgtgtactatatctattcccaagttctaggtaagtcattctgcctagatcataagtaagtgagagtatatttatgtttctacatttgggagcctatttcaaccagtcctgtgctccagtgttgctcattagccgattcgcagcattgaaatgggatcgtctagtctgtgttttacagataagcccagcgaggctgagagcctgttcaaggtcacatagttaaagggtggcagttagaactggaatttctatttcctgagtctttaattcttgttatttaatagcctaggccaggcacggtggctcattgggcagcttctccacgtgcagggccacggaacccgcc

SEQ ID NO: 405534 - DNA, 2340 bp, Homo sapiens
ccggccacggtgcttccgggttctggtgtaggagcggcgtcttctcgcgcggatggtgaagctgaatttggtacgctggaccctcggacagacagcaagagagagacaagcccgaggcctgacttctagcactcctgagtttgagccctatgagcagtggaacctagggaccaccaaggatccagatataattctttcctcagtaatagaaaaaagaatctgggatctaagaagatacctactcattttctaagtgactggccatgtcattgtcccacttataccgggatggggaaggccgcattgatgatgatgatgacgagcgggagaactttgagatcactgactgggatctccagaatgagttcaaccccaaccgacagcgccactggcagaccaaggaagaagccacctacggggtgtgggcagagcgagactcggatgatgagaggcccagctttggaggcaaacgggcccgtgactactctgcgccagtcaacttcatcagcgcagggctcaagaaaggggcagcggaggaggcagagttggaagattctgatgacgaagagaaacctgttaagcaggacgactttcctaaggattttggaccaaggaagctaaaaacgggtggcaattttaagcccagccagaaaggttttgcaggaggaaccaaatctttcatggacttcggcagctgggaaagacacacaaaaggaattggacagaagcttcttcagaagatgggctacgtccctggacggggcctcgggaagaatgcacaaggtatcattaacccaattgaagccaagcagagaaagggaaaaggtgctgtgggggcttatggatccgagcgcaccactcagtccatgcaagacttccctgtggttgactcagaggaagaagctgaagaggagtttcagaaggagctgagccagtggaggaaagacccaagtggaagcaagaagaagcccaaatactcttacaagaccgtggaagagttgaaggccaagggcaggattagcaagaagctcactgctccccagaaggaactttctcaagtcaaggtcatagacatgacaggccgggagcagaaggtctactacagctacagtcagatcagccacaagcacaacgttcccgatgatgggctgccgctacagtcccaacagctgccacagtctggcaaagaggccaaggcccccggcttcgcgctgcccgagctggagcacaacctgcagctgctcatcgacctcacggagcaggagatcatccagaatgaccggcagctacagtatgagcgggacatggtggtcaacctcttccacgagctggagaagatgaccgaggtcctggaccacgaggagcgggtcatctcgaacctcagcaaggtcctggagatggtggaggagtgcgagcggcggatgcagcccgactgcagcaaccccctcaccctggacgagtgtgcccgcatcttcgaaaccctgcaggacaagtactatgaggagtacaggatgtccgaccgtgtggaccttgctgtggccatcgtctatccactcatgaaggagtacttcaaggagtgggatcccctcaaagactgcacttatggcaccgagatcatctctaagtggaaaagcctcctagagaatgaccagctcttgtcccatggcggacaggacctctcagcagatgcctttcacaggttgatatgggaagtctggatgccttttgttcgaaatattgtcacccagtggcagccaaggaactgtgacccgatggtggactttttggatagttgggtgcacattattcctgtgtggatcttagataacatactggaccaactcatcttccccaagctgcaaaaggaggtggaaaactggaacccgctcacagacactgttcccatccactcttggatccacccatggctgccccttatgcaggcacggctggagccactctattcccccatccgtagtaagctgtccagcgccatgcaggagaggcgggaggctgagaacatggctcagaggggcattggcgtggccgctagctctgtgcccatgaactttaaggacctcattgagaccaaggctgaggagcacaacattgtcttcatgcccgtcattgggaagcgacacgaagggaagcagctctacacctttggccgcattgtgatctacatcgaccggggagtggtctttgtccagggcgagaagacgtgggtgcccacctcactgcagagcctgatcgacatggccaagtgaactgtggcaggtccagaaccagtcagagacttgcccctaagagggatgtactgtaaataaacagtatttttag

SEQ ID NO: 405535 - DNA, 411 bp, Homo sapiens
agagaaccctgactaatacaatgattaacctaatcatgggactaaagtagaagctatcgtttcttgagcacttattttgaactcattgaatttgctttgtaagccttctctaaggttggtatggtagttaatcccaatttaagaaagacaactgaatctggtcacccagctactgtgaggtagattctctatatcaatctctggacatctgactattaaaatagtgttcataattactacagtctttcagttcatcagaagaaattcatgttttgtgaggaaaactgaaaattttgtttcatcaagtaatgtatttcaaaaagcatattctaaaaaaaatcactctcctaggaccaccaaggatccagatataattctttcctcagtaatagaaaaaagaatctgggatct

SEQ ID NO: 405536 - DNA, 2961 bp, Homo sapiens
acaaggggactcagcgccagtgagagtagggacgaaggctcagggaaggcgagcttcggtccaagccgttggggtgtggggaggggaatccatttcgtagacagctctgccgaggcacggagaggggcggtgctgcttggggtcaactgggatttagggcttggattcatttaagaacctgagcttccttcaccaaacctagacagcaagagagagacaagcccgaggcctgacttctagcactcctgagtttgagccctatgagcagtggaacctagggaccaccaaggatccagatataattctttcctcagtaatagaaaaaagaatctgggatctaagaagatacctactcattttctaagtgactggccatgtcattgtcccacttataccgggatggggaaggccgcattgatgatgatgatgacgagcgggagaactttgagatcactgactgggatctccagaatgagttcaaccccaaccgacagcgccactggcagaccaaggaagaagccacctacggggtgtgggcagagcgagactcggatgatgagaggcccagctttggaggcaaacgggcccgtgactactctgcgccagtcaacttcatcagcgcagggctcaagaaaggggcagcggaggaggcagagttggaagattctgatgacgaagagaaacctgttaagcaggacgactttcctaaggattttggaccaaggaagctaaaaacgggtggcaattttaagcccagccagaaaggttttgcaggaggaaccaaatctttcatggacttcggcagctgggaaagacacacaaaaggaattggacagaagcttcttcagaagatgggctacgtccctggacggggcctcgggaagaatgcacaaggtatcattaacccaattgaagccaagcagagaaagggaaaaggtgctgtgggggcttatggatccgagcgcaccactcagtccatgcaagacttccctgtggttgactcagaggaagaagctgaagaggagtttcagaaggagctgagccagtggaggaaagacccaagtggaagcaagaagaagcccaaatactcttacaagaccgtggaagagttgaaggccaagggcaggattagcaagaagctcactgctccccagaaggaactttctcaagtcaaggtcatagacatgacaggccgggagcagaaggtctactacagctacagtcagatcagccacaagcacaacgttcccgatgatgggctgccgctacagtcccaacagctgccacagtctggcaaagaggccaaggcccccggcttcgcgctgcccgagctggagcacaacctgcagctgctcatcgacctcacggagcaggagatcatccagaatgaccggcagctacagtatgagcgggacatggtggtcaacctcttccacgagctggagaagatgaccgaggtcctggaccacgaggagcgggtcatctcgaacctcagcaaggtcctggagatggtggaggagtgcgagcggcggatgcagcccgactgcagcaaccccctcaccctggacgagtgtgcccgcatcttcgaaaccctgcaggacaagtactatgaggagtacaggatgtccgaccgtgtggaccttgctgtggccatcgtctatccactcatgaaggagtacttcaaggagtgggatcccctcaaagactgcacttatggcaccgagatcatctctaagtggaaaagcctcctagagaatgaccagctcttgtcccatggcggacaggacctctcagcagatgcctttcacaggttgatatgggaagtctggatgccttttgttcgaaatattgtcacccagtggcagccaaggaactgtgacccgatggtggactttttggatagttgggtgcacattattcctgtgtggatcttagataacatactggaccaactcatcttccccaagctgcaaaaggaggtggaaaactggaacccgctcacagacactgttcccatccactcttggatccacccatggctgccccttatgcaggcacggctggagccactctattcccccatccgtagtaagctgtccagcgccctgcagaagtggcaccccagcgactcctctgccaagctcatcctccagccctggaaggatgtcttcactcctggctcctgggaagcattcatggtcaaaaacatagtgcccaagctggggatgtgtcttggtgagctagtcattaacccccaccagcagcacatggatgcattctattgggtgattgactgggaagggatgatctctgtctctagcctggtgggacttcttgaaaagcacttcttccccaagtggcttcaggtgctgtgctcttggctcagtaacagcccaaattatgaggagatcaccaagtggtacctgggttggaagtcgatgttctcagaccaagtgctggcacatccatctgtcaaggacaaatttaatgaggcacttgatatcatgaaccgggcggtgtcctccaacgttggtgcctacatgcagccaggagcacgggagaacattgcctatctcacccacacggagcggaggaaggacttccagtacgaggccatgcaggagaggcgggaggctgagaacatggctcagaggggcattggcgtggccgctagctctgtgcccatgaactttaaggacctcattgagaccaaggctgaggagcacaacattgtcttcatgcccgtcattgggaagcgacacgaagggaagcagctctacacctttggccgcattgtgatctacatcgaccggggagtggtctttgtccagggcgagaagacgtgggtgcccacctcactgcagagcctgatcgacatggccaagtgaactgtggcaggtccagaaccagtcagagacttgcccctaagagggatgtactgtaaataaacagtatttttag

SEQ ID NO: 405537 - DNA, 3642 bp, Homo sapiens
ccggccacggtgcttccgggttctggtgtaggagcggcgtcttctcgcgcggatggtgaagctgaatttggtacgctggaccctcggacagacagcaagagagagacaagcccgaggcctgacttctagcactcctgagtttgagccctatgagcagtggaacctaggttcttcagctttggaacttgactggctctccttgctcctcagcctgcagacagcctattgtgggaccttttgatcgtgaccaccaaggatccagatataattctttcctcagtaatagaaaaaagaatctgggatctaagaagatacctactcattttctaagtgactggccatgtcattgtcccacttataccgggatggggaaggccgcattgatgatgatgatgacgagcgggagaactttgagatcactgactgggatctccagaatgagttcaaccccaaccgacagcgccactggcagaccaaggaagaagccacctacggggtgtgggcagagcgagactcggatgatgagaggcccagctttggaggcaaacgggcccgtgactactctgcgccagtcaacttcatcagcgcagggctcaagaaaggggcagcggaggaggcagagttggaagattctgatgacgaagagaaacctgttaagcaggacgactttcctaaggattttggaccaaggaagctaaaaacgggtggcaattttaagcccagccagaaaggttttgcaggaggaaccaaatctttcatggacttcggcagctgggaaagacacacaaaaggaattggacagaagcttcttcagaagatgggctacgtccctggacggggcctcgggaagaatgcacaaggtatcattaacccaattgaagccaagcagagaaagggaaaaggtgctgtgggggcttatggatccgagcgcaccactcagtccatgcaagacttccctgtggttgactcagaggaagaagctgaagaggagtttcagaaggagctgagccagtggaggaaagacccaagtggaagcaagaagaagcccaaatactcttacaagaccgtggaagagttgaaggccaagggcaggattagcaagaagctcactgctccccagaaggaactttctcaagtcaaggtcatagacatgacaggccgggagcagaaggtctactacagctacagtcagatcagccacaagcacaacgttcccgatgatgggctgccgctacagtcccaacagctgccacagtctggcaaagaggccaaggcccccggcttcgcgctgcccgagctggagcacaacctgcagctgctcatcgacctcacggagcaggagatcatccagaatgaccggcagctacagtatgagcgggacatggtggtcaacctcttccacgagctggagaagatgaccgaggtcctggaccacgaggagcgggtcatctcgaacctcagcaaggtcctggagatggtggaggagtgcgagcggcggatgcagcccgactgcagcaaccccctcaccctggacgagtgtgcccgcatcttcgaaaccctgcaggacaagtactatgaggagtacaggatgtccgaccgtgtggaccttgctgtggccatcgtctatccactcatgaaggagtacttcaaggagtgggatcccctcaaagactgcacttatggcaccgagatcatctctaagtggaaaagcctcctagagaatgaccagctcttgtcccatggcggacaggacctctcagcagatgcctttcacaggttgatatgggaagtctggatgccttttgttcgaaatattgtcacccagtggcagccaaggaactgtgacccgatggtggactttttggatagttgggtgcacattattcctgtgtggatcttagataacatactggaccaactcatcttccccaagctgcaaaaggaggtggaaaactggaacccgctcacagacactgttcccatccactcttggatccacccatggctgccccttatgcaggcacggctggagccactctattcccccatccgtagtaagctgtccagcgccctgcagaagtggcaccccagcgactcctctgccaagctcatcctccagccctggaaggatgtcttcactcctggctcctgggaagcattcatggtcaaaaacatagtgcccaagctggggatgtgtcttggtgagctagtcattaacccccaccagcagcacatggatgcattctattgggtgattgactgggaagggatgatctctgtctctagcctggtgggacttcttgaaaagcacttcttccccaagtggcttcaggtgctgtgctcttggctcagtaacagcccaaattatgaggagatcaccaagtggtacctgggttggaagtcgatgttctcagaccaagtgctggcacatccatctgtcaaggacaaatttaatgaggcacttgatatcatgaaccgggcggtgtcctccaacgttggtgcctacatgcagccaggagcacgggagaacattgcctatctcacccacacggagcggaggaaggacttccagtacgaggccatgcaggagaggcgggaggctgagaacatggctcagaggggcattggcgtggccgctagctctgtgcccatgaactttaaggacctcattgagaccaaggctgaggagcacaacattgtcttcatgcccgtcattgggaagcgacacgaagggaagcagctctacacctttggccgcattgtgatctacatcgaccggggagtggtctttgtccagggcgagaagacgtgggtgcccacctcactgcagagcctgatcgacatggccaagtgaactgtggcaggtccagaaccagtcagagacttgcccctaagagggatgtactgtaaataaacagtatttttagatcaccttcaaaagggtaacttctttactcaggagctactccacatcaggccaggtcatgagggaaggatgtaaaacgggacaatgccacgtagggcaggaatctttataccaagtcctcatgtggggtatcgtcctcaaaacaggacagccaagttgatgttctttcctggcaaaggagttctctgtagttcctccatagcagccttccctttagtctctggtggcagcttctacctcagccaacactgagtacctcacaacgagttcagtcagtagcagaaggatcttctctcttgttcctgatgatttcaaggtcctcacagtcctgataatctggttcttcccgaaactcccaaatatctatggagagctgttctagcttttgcacagggaaccagtggacagaggtatcattaaatatgtccatgtattgtgaagtctgaggaaactcaagctcctccagtccttttaaaatctgagcagaaaaattcaagtataaaaacttcagatagtcacagtaatccccactcttctgggataaatttccactttacttgtcatccccactttactttttaaaaaaataacaaatagggtattttgatttaaatgcttttgcacaatgaattgggcgccccaaggacagtggatatcatggactgtgatactaagaataaaggaaataaggaaaaaactaagagatgcattaaaga

SEQ ID NO: 405538 - DNA, 3107 bp, Homo sapiens
ttgactggcgcagatgaagttgactggcgcagagtagtcaacttcatcagcgcagggctcaagaaaggggcagcggaggaggcagagttggaagattctgatgacgaagagaaacctgttaagcaggacgactttcctaaggattttggaccaaggaagctaaaaacgggtggcaattttaagcccagccagaaaggttttgcaggaggaaccaaatctttcatggacttcggcagctgggaaagacacacaaaaggaattggacagaagcttcttcagaagatgggctacgtccctggacggggcctcgggaagaatgcacaaggtatcattaacccaattgaagccaagcagagaaagggaaaaggtgctgtgggggcttatggatccgagcgcaccactcagtccatgcaagacttccctgtggttgactcagaggaagaagctgaagaggagtttcagaaggagctgagccagtggaggaaagacccaagtggaagcaagaagaagcccaaatactcttacaagaccgtggaagagttgaaggccaagggcaggattagcaagaagctcactgctccccagaaggaactttctcaagtcaaggtcatagacatgacaggccgggagcagaaggtctactacagctacagtcagatcagccacaagcacaacgttcccgatgatgggctgccgctacagtcccaacagctgccacagtctggcaaagaggccaaggcccccggcttcgcgctgcccgagctggagcacaacctgcagctgctcatcgacctcacggagcaggagatcatccagaatgaccggcagctacagtatgagcgggacatggtggtcaacctcttccacgagctggagaagatgaccgaggtcctggaccacgaggagcgggtcatctcgaacctcagcaaggtcctggagatggtggaggagtgcgagcggcggatgcagcccgactgcagcaaccccctcaccctggacgagtgtgcccgcatcttcgaaaccctgcaggacaagtactatgaggagtacaggatgtccgaccgtgtggaccttgctgtggccatcgtctatccactcatgaaggagtacttcaaggagtgggatcccctcaaagactgcacttatggcaccgagatcatctctaagtggaaaagcctcctagagaatgaccagctcttgtcccatggcggacaggacctctcagcagatgcctttcacaggttgatatgggaagtctggatgccttttgttcgaaatattgtcacccagtggcagccaaggaactgtgacccgatggtggactttttggatagttgggtgcacattattcctgtgtggatcttagataacatactggaccaactcatcttccccaagctgcaaaaggaggtggaaaactggaacccgctcacagacactgttcccatccactcttggatccacccatggctgccccttatgcaggcacggctggagccactctattcccccatccgtagtaagctgtccagcgccctgcagaagtggcaccccagcgactcctctgccaagctcatcctccagccctggaaggatgtcttcactcctggctcctgggaagcattcatggtcaaaaacatagtgcccaagctggggatgtgtcttggtgagctagtcattaacccccaccagcagcacatggatgcattctattgggtgattgactgggaagggatgatctctgtctctagcctggtgggacttcttgaaaagcacttcttccccaagtggcttcaggtgctgtgctcttggctcagtaacagcccaaattatgaggagatcaccaagtggtacctgggttggaagtcgatgttctcagaccaagtgctggcacatccatctgtcaaggacaaatttaatgaggcacttgatatcatgaaccgggcggtgtcctccaacgttggtgcctacatgcagccaggagcacgggagaacattgcctatctcacccacacggagcggaggaaggacttccagtacgaggccatgcaggagaggcgggaggctgagaacatggctcagaggggcattggcgtggccgctagctctgtgcccatgaactttaaggacctcattgagaccaaggctgaggagcacaacattgtcttcatgcccgtcattgggaagcgacacgaagggaagcagctctacacctttggccgcattgtgatctacatcgaccggggagtggtctttgtccagggcgagaagacgtgggtgcccacctcactgcagagcctgatcgacatggccaagtgaactgtggcaggtccagaaccagtcagagacttgcccctaagagggatgtactgtaaataaacagtatttttagatcaccttcaaaagggtaacttctttactcaggagctactccacatcaggccaggtcatgagggaaggatgtaaaacgggacaatgccacgtagggcaggaatctttataccaagtcctcatgtggggtatcgtcctcaaaacaggacagccaagttgatgttctttcctggcaaaggagttctctgtagttcctccatagcagccttccctttagtctctggtggcagcttctacctcagccaacactgagtacctcacaacgagttcagtcagtagcagaaggatcttctctcttgttcctgatgatttcaaggtcctcacagtcctgataatctggttcttcccgaaactcccaaatatctatggagagctgttctagcttttgcacagggaaccagtggacagaggtatcattaaatatgtccatgtattgtgaagtctgaggaaactcaagctcctccagtccttttaaaatctgagcagaaaaattcaagtataaaaacttcagatagtcacagtaatccccactcttctgggataaatttccactttacttgtcatccccactttactttttaaaaaaataacaaatagggtattttgatttaaatgcttttgcacaatgaattgggcgccccaaggacagtggatatcatggactgtgatactaagaataaaggaaataaggaaaaaactaagagatgcattaaaga

SEQ ID NO: 405539 - DNA, 3356 bp, Homo sapiens
ccggccacggtgcttccgggttctggtgtaggagcggcgtcttctcgcgcggatggtgaagctgaatttggtacgctggaccctcggacagacagcaagagagagacaagcccgaggcctgacttctagcactcctgagtttgagccctatgagcagtggaacctagggaccaccaaggatccagatataattctttcctcagtaatagaaaaaagaatctgggatctaagaagatacctactcattttctaagtgactggccatgtcattgtcccacttataccgggatggggaaggccgcattgatgatgatgatgacgagcgggagaactttgagatcactgactgggatctccagaatgagttcaaccccaaccgacagcgccactggcagaccaaggaagaagccacctacggggtgtgggcagagcgagactcggatgatgagaggcccagctttggaggcaaacgggcccgtgactactctgcgccagtcaacttcatcagcgcagggctcaagaaaggggcagcggaggaggcagagttggaagattctgatgacgaagagaaacctgttaagcaggacgactttcctaaggattttggaccaaggaagctaaaaacgggtggcaattttaagcccagccagaaaggttttgcaggaggaaccaaatctttcatggacttcggcagctgggaaagacacacaaaaggaattggacagaagcttcttcagaagatgggctacgtccctggacggggcctcgggaagaatgcacaaggtatcattaacccaattgaagccaagcagagaaagggaaaaggtgctgtgggggcttatggatccgagcgcaccactcagtccatgcaagacttccctgtggttgactcagaggaagaagctgaagaggagtttcagaaggagctgagccagtggaggaaagacccaagtggaagcaagaagaaagtctggcaaagaggccaaggcccccggcttcgcgctgcccgagctggagcacaacctgcagctgctcatcgacctcacggagcaggagatcatccagaatgaccggcagctacagtatgagcgggacatggtggtcaacctcttccacgagctggagaagatgaccgaggtcctggaccacgaggagcgggtcatctcgaacctcagcaaggtcctggagatggtggaggagtgcgagcggcggatgcagcccgactgcagcaaccccctcaccctggacgagtgtgcccgcatcttcgaaaccctgcaggacaagtactatgaggagtacaggatgtccgaccgtgtggaccttgctgtggccatcgtctatccactcatgaaggagtacttcaaggagtgggatcccctcaaagactgcacttatggcaccgagatcatctctaagtggaaaagcctcctagagaatgaccagctcttgtcccatggcggacaggacctctcagcagatgcctttcacaggttgatatgggaagtctggatgccttttgttcgaaatattgtcacccagtggcagccaaggaactgtgacccgatggtggactttttggatagttgggtgcacattattcctgtgtggatcttagataacatactggaccaactcatcttccccaagctgcaaaaggaggtggaaaactggaacccgctcacagacactgttcccatccactcttggatccacccatggctgccccttatgcaggcacggctggagccactctattcccccatccgtagtaagctgtccagcgccctgcagaagtggcaccccagcgactcctctgccaagctcatcctccagccctggaaggatgtcttcactcctggctcctgggaagcattcatggtcaaaaacatagtgcccaagctggggatgtgtcttggtgagctagtcattaacccccaccagcagcacatggatgcattctattgggtgattgactgggaagggatgatctctgtctctagcctggtgggacttcttgaaaagcacttcttccccaagtggcttcaggtgctgtgctcttggctcagtaacagcccaaattatgaggagatcaccaagtggtacctgggttggaagtcgatgttctcagaccaagtgctggcacatccatctgtcaaggacaaatttaatgaggcacttgatatcatgaaccgggcggtgtcctccaacgttggtgcctacatgcagccaggagcacgggagaacattgcctatctcacccacacggagcggaggaaggacttccagtacgaggccatgcaggagaggcgggaggctgagaacatggctcagaggggcattggcgtggccgctagctctgtgcccatgaactttaaggacctcattgagaccaaggctgaggagcacaacattgtcttcatgcccgtcattgggaagcgacacgaagggaagcagctctacacctttggccgcattgtgatctacatcgaccggggagtggtctttgtccagggcgagaagacgtgggtgcccacctcactgcagagcctgatcgacatggccaagtgaactgtggcaggtccagaaccagtcagagacttgcccctaagagggatgtactgtaaataaacagtatttttagatcaccttcaaaagggtaacttctttactcaggagctactccacatcaggccaggtcatgagggaaggatgtaaaacgggacaatgccacgtagggcaggaatctttataccaagtcctcatgtggggtatcgtcctcaaaacaggacagccaagttgatgttctttcctggcaaaggagttctctgtagttcctccatagcagccttccctttagtctctggtggcagcttctacctcagccaacactgagtacctcacaacgagttcagtcagtagcagaaggatcttctctcttgttcctgatgatttcaaggtcctcacagtcctgataatctggttcttcccgaaactcccaaatatctatggagagctgttctagcttttgcacagggaaccagtggacagaggtatcattaaatatgtccatgtattgtgaagtctgaggaaactcaagctcctccagtccttttaaaatctgagcagaaaaattcaagtataaaaacttcagatagtcacagtaatccccactcttctgggataaatttccactttacttgtcatccccactttactttttaaaaaaataacaaatagggtattttgatttaaatgcttttgcacaatgaattgggcgccccaaggacagtggatatcatggactgtgatactaagaataaaggaaataaggaaaaaactaagagatgcattaaaga

SEQ ID NO: 405540 - DNA, 2640 bp, Homo sapiens
  misc_feature (2555)..(2555): n is a, c, g, or t
ccggccacggtgcttccgggttctggtgtaggagcggcgtcttctcgcgcggatggtgaagctgaatttggtacgctggaccctcggacagacagcaagagagagacaagcccgaggcctgacttctagcactcctgagtttgagccctatgagcagtggaacctagggaccaccaaggatccagatataattctttcctcagtaatagaaaaaagaatctgggatctaagaagatacctactcattttctaagtgactggccatgtcattgtcccacttataccgggatggggaaggccgcattgatgatgatgatgacgagcgggagaactttgagatcactgactgggatctccagaatgagttcaaccccaaccgacagcgccactggcagaccaaggaagaagccacctacggggtgtgggcagagcgagactcggatgatgagaggcccagctttggaggcaaacgggcccgtgactactctgcgccagtcaacttcatcagcgcagggctcaagaaaggggcagcggaggaggcagagttggaagattctgatgacgaagagaaacctgttaagcaggacgactttcctaaggattttggaccaaggaagctaaaaacgggtggcaattttaagcccagccagaaaggttttgcaggaggaaccaaatctttcatggacttcggcagctgggaaagacacacaaaaggaattggacagaagcttcttcagaagatgggctacgtccctggacggggcctcgggaagaatgcacaaggtatcattaacccaattgaagccaagcagagaaagggaaaaggtgctgtgggggcttatggatccgagcgcaccactcagtccatgcaagacttccctgtggttgactcagaggaagaagctgaagaggagtttcagaaggagctgagccagtggaggaaagacccaagtggaagcaagaagaagcccaaatactcttacaagaccgtggaagagttgaaggccaagggcaggattagcaagaagctcactgctccccagaaggaactttctcaagtcaaggtcatagacatgacaggccgggagcagaaggtctactacagctacagtcagatcagccacaagcacaacgttcccgatgatgggctgccgctacagtcccaacagctgccacagtctggcaaagaggccaaggcccccggcttcgcgctgcccgagctggagcacaacctgcagctgctcatcgacctcacggagcaggagatcatccagaatgaccggcagctacagtatgagcgggacatggtggtcaacctcttccacgagctggagaagatgaccgaggtcctggaccacgaggagcgggtcatctcgaacctcagcaaggtcctggagatggtggaggagtgcgagcggcggatgcagcccgactgcagcaaccccctcaccctggacgagtgtgcccgcatcttcgaaaccctgcaggacaagtactatgaggagtacaggatgtccgaccgtgtggaccttgctgtggccatcgtctatccactcatgaaggagtacttcaaggagtgggatcccctcaaagactgcacttatggcaccgagatcatctctaagtggaaaagcctcctagagaatgaccagctcttgtcccatggcggacaggacctctcagcagatgcctttcacaggttgatatgggaagtctggatgccttttgttcgaaatattgtcacccagtggcagccaaggaactgtgacccgatggtggactttttggatagttgggtgcacattattcctgtgtggatcttagataacatactggaccaactcatcttccccaagctgcaaaaggaggtggaaaactggaacccgctcacagacactgttcccatccactcttggatccacccatggctgccccttatgcaggcacggctggagccactctattcccccatccgtagtaagctgtccagcgccctgcagaagtggcaccccagcgactcctctgccaagctcatcctccagccctggaaggatgtcttcactcctggctcctgggaagcattcatggtcaaaaacatagtgcccaagctggggatgtgtcttggtgagctagtcattaacccccaccagcagcacatggatgcattctattgggtgattgactgggaagggatgatctctgtctctagcctggtgggacttcttgaaaagcacttcttccccaagtggcttcaggtgctgtgctcttggctcagtaacagcccaaattatgaggagatcaccaagtggtacctgggttggaagtcgatgttctcagaccaagtgctggcacatccatctgtcaaggacaaatttaatgaggcacttgatatcatgaaccgggcggtgtcctccaacgttggtgcctacatgcagccaggagcacgggagaacattgcctatctcacccacacggagcggaggaaggacttccagtacgaggccatgcaggagaggcgggaggctgagaacatggcggcggcggcggtagcaagngcgtgtggtggcgcgggatcttgggggcctcggcgctgaccagggggacttggcgaccctccgttctgttgctgccggtgaggcg

SEQ ID NO: 405541 - DNA, 723 bp, Homo sapiens
ccggccacggtgcttccgggttctggtgtaggagcggcgtcttctcgcgcggatggtgaagctgaatttggtacgctggaccctcggacagacagcaagagagagacaagcccgaggcctgacttctagcactcctgagtttgagccctatgagcagtggaacctagggaccaccaaggatccagatataattctttcctcagtaatagaaaaaagaatctgggatctaagaagatacctactcattttctaagtgactggccatgtcattgtcccacttataccgggatggggaaggccgcattgatgatgatgatgacgagcgggagaactttgagatcactgactgggatctccagaatgagttcaaccccaaccgacagcgccactggcagaccaaggaagaagccacctacggggtgtgggcagagcgagactcggatgatgagaggcccagctttggaggcaaacgggcccgtgactactctgcgccagtcaacttcatcagcgcagggctcaagaaaggggcagcggaggaggcagagttggaagattctgatgacgaagagaaacctgttaagcaggacgactttcctaaggattttggaccaaggaagctaaaaacgagcctgatcgacatggccaagtgaactgtggcaggtccagaaccagtcagagacttgcccctaagagggatgtactgtaaataaacagtatttttag

SEQ ID NO: 405542 - DNA, 315 bp, Homo sapiens
tagctaaacatggcaggagaaaaacacaactatactgactagcctcgcttgacattcatgaagccaatctcaagcttaggacttgcttcctagtctgtctattgcctctcttgcttccttatatcttctcctctttcctcaaacctctgacatcaccttctcacatgtagagtgagctttttaaaactgtgaaaatggaagcaaccagaagagaattccataaacttctataactcaaccatcatcatttgaacttcgtcttatatcttctgtctttcctcctattactctggaagaattttcccagttcttaag

SEQ ID NO: 405543 - DNA, 719 bp, Homo sapiens
actgctttactgaggcatagtttatataccacaaaatccacacattataagcatccaatttaatgatatttaatgatttttagtaaatgtatagagtagtacaaccattaccataatttagttttagaaacaagttcaatttgaaaaaaatagtgctttgaaaaggtatcactgcttgcccattatagcactatagggtttattcttactgataatctgcctaaagtaggctccacaaaacactgggtaagggcagccacgctttggaggacttcctctttccctggcttctgagtgattatgtgctgggattcaggagtgagctcagagctcaccacctcgtgctcaggctcagggaggggcccttggtgtggacatggaaatccctgccatgtccatagcctctatgctcaccacctggaaagttacagagagctcccagttacacctctggtttctagagccagtagagcaagcctgtgatcagcccctccaccccagcctcctacagccacctctcccaggaaagcctagaggaaattggccaacgtcttggtattccattctggttgccaagtgcccttattgtttttgcatttctaagagactgtcagtacaacttcccccgtgactgccacgtgacaggctgtgctgtcctttatctcagggcaccaaatgacttacttcattccaggtctttctgtttcactgtgagtcag

SEQ ID NO: 405544 - DNA, 250 bp, Homo sapiens
tgcacctgctaaatggatttgctcaaacaaaatcttaactactttgtaacacaaatttacaaagaggacaagctctgttacaaaaagagacaacaattaatccagactcaataataaataagattttaagtttctctaacactcattttaaaataaatatttgaaaagaacatttaatccctctataaatccccaagatacatgatctgaacttccacatataacatactgtgtagaacatttgacatta

SEQ ID NO: 405545 - DNA, 468 bp, Homo sapiens
gaagaagaatataggctatgagtggtggcatgttcctgcagtccaagctactcaggcagttgaggtgggaggatctcttgagcccaggagagattggtagaatgtattaaatgaataggtggatgacagagccttgggaaatgtaaaaaaattagttaaataaaataaaacatgatccatctatatactgtctataaatacagacttactttagatacaaagacacaatgagattgaaaacaaaagaatgaagaaatgaattccatgccttgctaagtttttgtgtttttagtggagatggggttttgccttgttggccaggtcagtctcgaactcctgaactgaggtgatccatcctcctcggcctcccagagtgctgagattgcagcatgagccaccgcgcccagcccttatcttggatttccagactccataaccaagagaagtaaatttctgttgtttaagcca

SEQ ID NO: 405546 - DNA, 365 bp, Homo sapiens
gaagaagaatataggctatgagtggtggcatgttcctgcagtccaagctactcaggcagttgaggtgggaggatctcttgagcccaggagagattggtagaatgtattaaatgaataggtggatgacagagccttgggaaatgtaaaaaaattagttaaataaaataaaacatgatccatctatatactgtctataaatacagacttactttagatacaaagacacaatgagattgaaaacaaaagaatgaagaaatgaattccatgcgagtgctgagattgcagcatgagccaccgcgcccagcccttatcttggatttccagactccataaccaagagaagtaaatttctgttgtttaagcca

SEQ ID NO: 405547 - DNA, 698 bp, Homo sapiens
cttctaaaattaaaaacaacaaacaaacaaacaaagaaccttcaacattctcaccctggaagaaaagactgcttgccaaattcaaatttgccttggccaaagtaaccattagcaactcatcctttaaatgagattataaagaaagaatttccccttgaagttggagaaaacacctttcatgtgacctccaaactatgttacttattttaaagttacacaaaacaaacttgtctttttcagtttttgcttactcccaagccgtgctgcttacagaagtgtatgggatgaggagccagcaggatggtaaccttgagggagaacagggggcccggggtccctagatgctggtcaggttctgcttatccaggggttggtagttgtcccacaggtaagcttgcggtggaaactcattccaatgcatacgtgagttttgtgctctctgaacatatgctacacctcaataaaaagtttacttgcaaccaagacagaacaaaatacccactgcctctcagaagataacaaaactacctttgtatgtatgcacagcctgcagagaagcacgcgtccagaaacacccggcacatgtaacacacacacgttaccacagcaggcggcagctggacccacagaggaccaaactccatccctgaacagaatcactgtgcagctccaatctgtcactcccgaagacatttttg

SEQ ID NO: 405548 - DNA, 3927 bp, Homo sapiens
ggccctctgcgcgctgcgcccgaagcggcggtcggtggcaggggtggtagcggcggcggcgacggtttcgtgggggccgcgcgctgctctgtgagcggcgggtggcagcaggggactcctgacacttccccttccccaccgaaccgcgctttctgaaacaaagactcattttgaagatgtttaacaaatcatttggaacaccctttgggggtggcacaggtggctttggcacaacttcaacatttggacagaatactggctttggcactactagtggaggggcatttggaacatctgcatttggttctagcaacaatactggaggcctctttggaaattcacagactaaaccaggaggattgtttggaaccagttcatttagccagccagctacctccacaagcactggctttgggtttggtacgtcaacaggaacagcaaataccttgtttggaactgcaagcacagggaccagtctcttctcatcccaaaacaatgcctttgcacaaaataaaccaactggctttggcaattttggaaccagtactagcagtggaggactctttggaaccacaaataccacctctaatccttttggcagcacatctggctccctctttgggccaagtagttttacagctgctcctactgggactactattaaatttaaccctccaactggtacagatactatggtcaaagctggagttagcactaacataagtaccaagcaccagtgtattactgctatgaaagaatatgaaagcaagtcactagaggaacttcgtttagaggattatcaggctaacaggaagggcccacagaaccaggtgggagcaggtaccacaactggcttgtttgggtcttctccagccacttccagcgcaacaggactcttcagctcctccaccactaattcaggctttgcatatggtcagaacaaaactgcctttggaactagtacaactggatttggaacaaatccaggtggtctctttggccaacagaatcagcagactaccagcctcttcagcaaaccatttggccaggctacaaccacccagaacactggcttttcctttggtaataccagcaccataggacagccaagcaccaacaccatgggattatttggagtaacccaagcctcacagcctggaggtctttttgggacagctacaaacaccagcactgggacagcatttggaacaggaacaggtctctttgggcagaccaatactggatttggtgctgttggttcgaccctgtttggcaataacaagcttactacatttggaagcagcacaaccagtgcaccttcatttggtacaaccagtggcgggctctttggttttggcacaaataccagtgggaatagtatttttggaagtaaaccagcacctgggactcttggaactgggcttggtgcaggatttggaacagctcttggtgctggacaggcatctttgtttgggaacaaccaacctaagattggagggcctcttggtacaggagcctttggggcccctggatttaatactacgacagccactttgggctttggagccccccaggccccagtagctttgacagatccaaatgcttctgctgcccagcaggctgttctccagcagcacatcaatagtctaacatactcaccttttggagactctcctctcttccggaatccgatgtcagaccctaagaagaaggaagagagattgaaaccaacaaatccagcagcccagaaggctcttactacacctactcattataaactgacaccccgccctgccactagagtccggccaaaggctttacaaacaacaggcacagccaagtcacatctctttgatgggctggatgacgatgaaccatccctagccaatggagcattcatgcccaagaagagcattaagaagttggttttgaagaaccttaataatagcaatctcttttctcctgttaatcgtgattcagaaaatctagcttcaccatctgaatatccagaaaatggagagagatttagtttcctaagcaaacctgttgatgagaatcaccagcaggatggagatgaagattcccttgtttcacatttttatactaaccctattgccaaacctattcctcaaaccccagaaagtgctggaaataaacacagcaacagcaacagtgtggatgataccattgttgcattaaacatgcgtgctgctttgcgaaatgggctggaaggaagcagtgaagaaacgtcttttcatgatgagtcacttcaggatgaccgagaagaaatagaaaataattcttaccatatgcacccagcaggtattattctcactaaggttggttactatactattccatctatggatgaccttgctaaaattaccaatgaaaaaggagagtgcattgtctctgatttcactattggtcggaaaggttatggttcaatctattttgaaggagatgtgaatttgacaaatctaaatttggatgatattgtgcatatccggaggaaagaagtagttgtctacttagatgataaccaaaaaccacctgtgggtgaagggctaaataggaaggctgaagttacattggatggagtttggccaacagataaaacatctcgttgtttaataaagagcccagatcgccttgctgatatcaactatgaaggaagattggaagcagtttcaaggaaacagggagctcaattcaaagaataccggcctgaaactggttcttgggtgtttaaggtctcccatttttctaagtatggccttcaggattctgatgaagaggaggaggagcatccgtctaaaactagtacaaagaagttgaagactgctcctttgcctcctgcaagccagactacgcccttgcagatggctcttaatggcaaacctgcacctccacctcaggtagagaaaaaaggacagtgaatttgaatggaatccgtgataccgaagttgaaagcaagtcattcagctaatacaaagctgttttatgacccttggaactttgaagagtacaaacattggcaatcacgttgaaacaagtgcaagggagggcgtgaggtcttgcaggcatctgtctttttactggagagatttaaagaattctcttgctgtttggattattcctctacagattgtcatttttaaaccctttgttctctctcatttggacttgctgaattctctgctcagtgattaacttaagatttgctcatgtgggttcatgcacagtaaattctgcctttattgactacctgatgtgcagtttaatctttttctttacctccatggttttttaaaagttaaattagctttctgaaagggtttttaatctccatttttttaaagttgtttgcttatacttcgggtaaccttgatatttgtattttaatagtacataatctttatgaaaaatagtttgggaatgtaaatgaattattatttggcttggggagattagggcctacattgtttatcgcaattacttgtatcattgatacgggatttctttgtaaagcatcctctacctctcagctgctgaaagctagacctttggtattttccatgctataattcttatggctgctgaaatgtgtggtttttatgatttattaaataatctcttaggaggcatttctggagaatgtgtgtatatacatgtttgcgcgtacaggggaggggagggtatgataaatgtgggaaactggaaatatattgacttttatgtttataatcttggtagcatttagaatgcccctaagaaatctccattgacaaatgaaatgctatagacttggttttccagttatccatattcattttgtctgtcatatgctttgtatcatctccttctttcctaattttttataaccttatatatatatttattataaatatatgtatttctgaggga

SEQ ID NO: 405549 - DNA, 2150 bp, Homo sapiens
agcggggcgaggggcgggactccacggcctctcaccgctcctaccctgtgcctccccgaactccttctgcccctcctcttccctctcgccccttcccccttcagttcggtttcaaaagacgcgtgcccaatgaataacagggtcgacccagagtggcggcgcgtcaccaattcgcggacggcgagggcggagcgtccgcaacgagcctctgacgccgggcggcgtgtgacgcagtcgggccctctgcgcgctgcgcccgaagcggcggtcggtggcaggggtggtagcggcggcggcgacggtttcgtgggggccgcgcgctgctctgtgagcggcgggtggcagcaggggactcctgacacttccccttccccaccgaaccgcgctttctgaaacaaagactcattttgaagatgtttaacaaatcatttggaacaccctttgggggtggcacaggtggctttggcacaacttcaacatttggacagaatactggctttggcactactagtggaggggcatttggaacatctgcatttggttctagcaacaatactggaggcctctttggaaattcacagactaaaccaggaggattgtttggaaccagttcatttagccagccagctacctccacaagcactggctttgggtttggtacgtcaacaggaacagcaaataccttgtttggaactgcaagcacagggaccagtctcttctcatcccaaaacaatgcctttgcacaaaataaaccaactggctttggcaattttggaaccagtactagcagtggaggactctttggaaccacaaataccacctctaatccttttggcagcacatctggctccctctttgggccaagtagttttacagctgctcctactgggactactattaaatttaaccctccaactggtacagatactatggtcaaagctggagttagcactaacataagtaccaagcaccagtgtattactgctatgaaagaatatgaaagcaagtcactagaggaacttcgtttagaggattatcaggctaacaggaagggcccacagaaccaggtgggagcaggtaccacaactggcttgtttgggtcttctccagccacttccagcgcaacaggactcttcagctcctccaccactaattcaggctttgcatatggtcagaacaaaactgcctttggaactagtacaactggatttggaacaaatccaggtggtctctttggccaacagaatcagcagactaccagcctcttcagcaaaccatttggccaggctacaaccacccagaacactggcttttcctttggtaataccagcaccataggacagccaagcaccaacaccatgggattatttggagtaacccaagcctcacagcctggaggtctttttgggacagctacaaacaccagcactgggacagcatttggaacaggaacaggtctctttgggcagaccaatactggatttggtgctgttggttcgaccctgtttggcaataacaagcttactacatttggaagcagcacaaccagtgcaccttcatttggtacaaccagtggcgggctctttggtaacaaaccaaccctgactttaggaaccaatacaaacacttctaattttggttttggcacaaataccagtgggaatagtatttttggaagtaaaccagcacctgggactcttggaactgggcttggtgcaggatttggaacagctcttggtgctggacaggcatctttgtttgggaacaaccaacctaagattggagggcctcttggtacaggagcctttggggcccctggatttaatactacgacagccactttgggctttggagccccccaggccccagtagggatgtggctctaaatcagccggacatgtgcgtctaccgaagagggaggaagaagagagtgccttacaccaaactgcagcttaaagaactggagaacgagtatgccattaacaaattcattaacaaggacaagcggcggcgtatctcggctgctacgaacctatctgagagacaagtgaccatttggtttcagaaccgaagagtgaaggacaagaaaattgtctccaagctcaaagatactgtctcctgatgtggtccaggttggccacagacagctt

SEQ ID NO: 405550 - DNA, 560 bp, Homo sapiens
ctagaggatcccccaaagatgccatcgactggatttattttgaagagttttgccacttttgggattataaggaacaaatcacaggaaaagccagaatcagtaagctatataaagggcttgttgcattccactgtcactacacatttagcctggtagcttcctgttttcttttctttttattttttaaatagagatggggtctgtatgttgaccagcctggccaacatggtgaaaccccatctctactaaaaatacaaaaaattagccgggcttggtggcatgcgcctgtaatcccagctgtaatcaagaggctgaggcaggagaatggcttgaacccgggaagtggaggttgcagtgagccgagattgtgccattgcactccagcctgggcaacaagagtgaaactctgtctcaaaaaaaaaaaaaaaaaaaaaattccggcagggggggggggggcgcctataaccccagttactcgggaggcagaggacaagaagggctggatcattggacccggggaggcagagtcacaaggacgcgagatgggccatggactcaag

SEQ ID NO: 405551 - DNA, 337 bp, Homo sapiens
ccggaccagaatgtgtataacgaccttaaagttacactgactataccacacgttattctcctgattcgtatgattggaaatatttaaaagttctcaggtaagcggtagcttgatgtgaagtaccagagggaaaggtttaaagtcctggatatggcttgagataattagtaggcatgtaaattgcctttcatttactttggattacttcagcaatagctgagaaaccataaaggaaacacatttggttaagtaacacattgtatgaggccaggtttcaaacctgtggtagcatacagaagataattggttattcttatttttgtcgttgttggtttgt

SEQ ID NO: 405552 - DNA, 7513 bp, Homo sapiens
cctccgtgacaggcattcacttctgccctaagtgtgtcagaaagatcccattttgtttcctaactcaggccaaccctcctttgcctccaaaattcagtgttaactaaccaattacttaagagacggatccctcttccttctgtggatagttcatctgttaaggatccattatcacctgtctcactcctcctaaggagtcctagtataaaagggccagggtaggagtagggaagctggttggcatggagggtcacaagatccagaatggctagggatggaaaaagaataccctggttctttgggggattctgccaaaggagctttattgaccatttttttaaaggaaaaacactgaatgatcttgaggatggtaaactgtctcctcttctgggttccagaagcccttatgctacgttcagtattaagaaaagccctgaacaagtggaggatgctgctttcatattctttcatagcagtaatacactggtgcttggtacttatgttagtgctaactccagctttgaccatagtatctgtaccagttggagggttaaatttaatagtagtcccagtaggagcagctgtaaaactacttggcccaaagagggagccagatgtgctgccaaaaggattagaggtggtatttgtggttccaaggagtcctccactgctagtactggttccaaaattgccaaagccagttggtttattttgtccaaatgttgaagttgtgccaaagccacctgtgccacccccaaagggtgttccaaatgatttgttaaacatcttcaaaatgagtctttgtttcagaaagcgcggtttcgtgggggccgcgcgctgctctgtgagcggcgggtggcagcaggggactcctgacacttccccttccccaccgaaccgcgctttctgaaacaaagactcattttgaagatgtttaacaaatcatttggaacaccctttgggggtggcacaggtggctttggcacaacttcaacatttggacagaatactggctttggcactactagtggaggggcatttggaacatctgcatttggttctagcaacaatactggaggcctctttggaaattcacagactaaaccaggaggattgtttggaaccagttcatttagccagccagctacctccacaagcactggctttgggtttggtacgtcaacaggaacagcaaataccttgtttggaactgcaagcacagggaccagtctcttctcatcccaaaacaatgcctttgcacaaaataaaccaactggctttggcaattttggaaccagtactagcagtggaggactctttggaaccacaaataccacctctaatccttttggcagcacatctggctccctctttgggccaagtagttttacagctgctcctactgggactactattaaatttaaccctccaactggtacagatactatggtcaaagctggagttagcactaacataagtaccaagcaccagtgtattactgctatgaaagaatatgaaagcaagtcactagaggaacttcgtttagaggattatcaggctaacaggaagggcccacagaaccaggtgggagcaggtaccacaactggcttgtttgggtcttctccagccacttccagcgcaacaggactcttcagctcctccaccactaattcaggctttgcatatggtcagaacaaaactgcctttggaactagtacaactggatttggaacaaatccaggtggtctctttggccaacagaatcagcagactaccagcctcttcagcaaaccatttggccaggctacaaccacccagaacactggcttttcctttggtaataccagcaccataggacagccaagcaccaacaccatgggattatttggagtaacccaagcctcacagcctggaggtctttttgggacagctacaaacaccagcactgggacagcatttggaacaggaacaggtctctttgggcagaccaatactggatttggtgctgttggttcgaccctgtttggcaataacaagcttactacatttggaagcagcacaaccagtgcaccttcatttggtacaaccagtggcgggctctttggttttggcacaaataccagtgggaatagtatttttggaagtaaaccagcacctgggactcttggaactgggcttggtgcaggatttggaacagctcttggtgctggacaggcatctttgtttgggaacaaccaacctaagattggagggcctcttggtacaggagcctttggggcccctggatttaatactacgacagccactttgggctttggagccccccaggccccagtagctttgacagatccaaatgcttctgctgcccagcaggctgttctccagcagcacatcaatagtctaacatactcaccttttggagactctcctctcttccggaatccgatgtcagaccctaagaagaaggaagagagattgaaaccaacaaatccagcagcccagaaggctcttactacacctactcattataaactgacaccccgccctgccactagagtccggccaaaggctttacaaacaacaggcacagccaagtcacatctctttgatgggctggatgacgatgaaccatccctagccaatggagcattcatgcccaagaagagcattaagaagttggttttgaagaaccttaataatagcaatctcttttctcctgttaatcgtgattcagaaaatctagcttcaccatctgaatatccagaaaatggagagagatttagtttcctaagcaaacctgttgatgagaatcaccagcaggatggagatgaagattcccttgtttcacatttttatactaaccctattgccaaacctattcctcaaaccccagaaagtgctggaaataaacacagcaacagcaacagtgtggatgataccattgttgcattaaacatgcgtgctgctttgcgaaatgggctggaaggaagcagtgaagaaacgtcttttcatgatgagtcacttcaggatgaccgagaagaaatagaaaataattcttaccatatgcacccagcaggtattattctcactaaggttggttactatactattccatctatggatgaccttgctaaaattaccaatgaaaaaggagagtgcattgtctctgatttcactattggtcggaaaggttatggttcaatctattttgaaggagatgtgaatttgacaaatctaaatttggatgatattgtgcatatccggaggaaagaagtagttgtctacttagatgataaccaaaaaccacctgtgggtgaagggctaaataggaaggctgaagttacattggatggagtttggccaacagataaaacatctcgttgtttaataaagagcccagatcgccttgctgatatcaactatgaaggaagattggaagcagtttcaaggaaacagggagctcaattcaaagaataccggcctgaaactggttcttgggtgtttaaggtctcccatttttctaagtatggccttcaggattctgatgaagaggaggaggagcatccgtctaaaactagtacaaagaagttgaagactgctcctttgcctcctgcaagccagactacgcccttgcagatggctcttaatggcaaacctgcacctccacctcagagccagagcccagaggtggagcagttagggagggttgtggaactggacagtgacatggtagatatcacccaggagccagttttggataccatgttagaagagagcatgcctgaggatcaggaacctgtgtctgcctcaacacatattgcatcttcactgggaattaatccacatgtcttacagatcatgaaagcatcattgcttactgatgaagaagatgtagatatggcactggatcaacgcttcagtcgcctgccttccaaagcagatacttctcaagaaatctgttctcccagactccccatttcagcatcccactcgtcgaaaactcgttcactagttggtgggttactacaatcaaaatttacaagtggagcttttctttcaccaagtgtctctgtgcaagaatgtcgtactcccagagcagcatctttaatgaatatcccatccacatcctcttggtctgtccctccacccctgacttctgtgttcacaatgcccagcccagcccctgaggttccgttgaaaacagtgggtacacgtaggcaactaggcctagtccctcgtgaaaagtctgtcacctatggcaagggaaaactcttgatggacatggccctattcatgggacgctcatttcgtgttggttggggccccaactggactcttgctaatagtggagaacagctgaatggctctcatgaactagaaaatcatcagattgccgattccatggagtttggattcctgcccaatccagtagctgttaaacccctaactgagtccccattcaaagttcacttagaaaaactcagtttgagacaaagaaagccagatgaagacatgaaattatatcagacacctctggagctcaaattaaaacacagcactgtccatgtggatgaactgtgtcctctcattgtccccaatctgggagttgctgtcattcatgactatgcagattgggttaaagaagcatcaggagacttaccagaagcacaaattgtgaagcactggagcctgacatggacactatgtgaagccctatggggccacctgaaggagcttgacagccagctaaatgaaccccgtgaatacattcaaattctggagcgaagaagagctttctcccgctggctatcctgtactgccacacctcagattgaagaggaagtctccttaacccaaaaaaacagccctgtggaggctgtattcagctacctcacaggcaaaaggatcagtgaggcctgctctctggcccagcagtcaggggatcatcgtcttgctcttcttttatctcagtttgtgggtagccagtcagtccgggagctgctcaccatgcagttggtggactggcatcagctccaagcagactccttcatccaggatgagagactgcgcatctttgctctgttggctggaaaaccggtgtggcagctctcagaaaagaagcaaataaacgtgtgctcccagttggattggaaacgctccctggctatccatctttggtatttgcttccaccaacagcctccatttctagggcgctcagcatgtatgaagaagcatttcagaatacctctgacagtgacagatatgcctgctccccacttccttcgtatctggagggttctggctgtgtgatagcggaggagcaaaactcacagacaccacttcgagatgtctgctttcaccttctaaaactctacagtgacagacattatgatctcaaccagctgctggagcctcgaagcataacagcagatcctttggactaccgcctaagctggcacttgtgggaagtgctgagggctcttaactacacccatctctcagcgcagtgtgaaggtgtgctacaggccagttacgctggccagcttgaaagtgaggggctctgggagtgggccatctttgtcctcctgcacattgacaactcaggcatacgtgagaaggctgttcgagagctgcttacccggcactgccagctgttggagacccctgaatcttgggctaaagagactttccttacccagaagctccgtgtacctgccaaatggatccacgaggccaaagctgtgcgagcacacatggaatctgacaagcacttagaggccctttgcttatttaaggctgagcactggaaccgctgccacaagctcatcatccgacacttagcttctgatgccatcattaatgagaactatgactacctgaaggggttcttggaagacctggcacctccagagcgcagcagcctaattcaggattgggaaacatctgggcttgtttacctggactatattagagtcattgaaatgctccgccatatacagcagggagcatttcaatgactctaatatagtccaggtggattgctcaggtaatgacctggagcagttacacatcaaagtgacttcactgtgcagtcggatagagcagattcagtgttacagtgctaaagatcgcctggctcagtcagacatggccaaacgtgtagccaacctgctgcgcgtggtgctgagtctgcatcatcctcctgatagaacctccgactcaacaccagaccctcagcgagtccctttgcgcctcttggctccccacattggccggcttcccatgcctgaggactatgccatggacgaactgcgcagccttacccagtcctatctgcgagaactggctgttgggagcctgtgagccccaggcactttgcatcacagtcacatgcccattcacaccacacagaggttccctgccttgtttggattggcactgtttgccattctctgggttggctgtggcatctaccctccctccctgctgccagaagcagcatcctccacttgttcagggcttttcttaatactgaacgtagcataagggcttctggaacccagaagaggagacagtttaccatcctcaagatcattcagtgtttttcctttaaaaaaatggtcaataaagctcctttggcagaatcccccaaagaaccagggtattctttttccatccctagccattctggatcttgtgaccctccatgccaaccagcttccctactcctaccctggcccttttatactaggactccttaggaggagtgagacaggtgataatggatccttaacagatgaactatccacagaaggaagagggatccgtctcttaagtaattggttagttaacactgaattttggaggcaaaggagggttggcctgagttaggaaacaaaatgggatctttctgacacacttagggcagaagtgaatgcctgtcacggagggattgatcttcagggctgtttttgttcctgcctttagagttccatgaacaccatacctttgctactactatgtgcaggaacccttggtcacatgtgacatgtctgtgggaagctcccagagtttggtttggtccctggttttcagtcttgctgagactctgtctggatttgcctgcagagtttggataaaaaatggcaggttgggtaaccctccctgttcatcccatgttagctccaaagcatttcccaccctccatctaccccttccagaagcaaaaacaaaccatgactgaggcaggcatggagttgggcgttaggggcaggcagagggcctttgctacactgctgacagctatagggagccccaggtaatggcatgagatagctggtgttagggctatctcaggcaatatggccacacctgggtctttatgcatgaagataatgtaaaggtttttattaaaaaatatatatatgtataaataaatgatctagatattttcctctttttctgaagctactttcttaaaaaataaataaaatgtttatagcattcctggta

SEQ ID NO: 405553 - DNA, 7016 bp, Homo sapiens
agcggggcgaggggcgggactccacggcctctcaccgctcctaccctgtgcctccccgaactccttctgcccctcctcttccctctcgccccttcccccttcagttcggtttcaaaagacgcgtgcccaatgaataacagggtcgacccagagtggcggcgcgtcaccaattcgcggacggcgagggcggagcgtccgcaacgagcctctgacgccgggcggcgtgtgacgcagtcgggccctctgcgcgctgcgcccgaagcggcggtcggtggcaggggtggtagcggcggcggcgacggtttcgtgggggccgcgcgctgctctgtgagcggcgggtggcagcaggggactcctgacacttccccttccccaccgaaccgcgctttctgaaacaaagactcattttgaagatgtttaacaaatcatttggaacaccctttgggggtggcacaggtggctttggcacaacttcaacatttggacagaatactggctttggcactactagtggaggggcatttggaacatctgcatttggttctagcaacaatactggaggcctctttggaaattcacagactaaaccaggaggattgtttggaaccagttcatttagccagccagctacctccacaagcactggctttgggtttggtacgtcaacaggaacagcaaataccttgtttggaactgcaagcacagggaccagtctcttctcatcccaaaacaatgcctttgcacaaaataaaccaactggctttggcaattttggaaccagtactagcagtggaggactctttggaaccacaaataccacctctaatccttttggcagcacatctggctccctctttgggccaagtagttttacagctgctcctactgggactactattaaatttaaccctccaactggtacagatactatggtcaaagctggagttagcactaacataagtaccaagcaccagtgtattactgctatgaaagaatatgaaagcaagtcactagaggaacttcgtttagaggattatcaggctaacaggaagggcccacagaaccaggtgggagcaggtaccacaactggcttgtttgggtcttctccagccacttccagcgcaacaggactcttcagctcctccaccactaattcaggctttgcatatggtcagaacaaaactgcctttggaactagtacaactggatttggaacaaatccaggtggtctctttggccaacagaatcagcagactaccagcctcttcagcaaaccatttggccaggctacaaccacccagaacactggcttttcctttggtaataccagcaccataggacagccaagcaccaacaccatgggattatttggagtaacccaagcctcacagcctggaggtctttttgggacagctacaaacaccagcactgggacagcatttggaacaggaacaggtctctttgggcagaccaatactggatttggtgctgttggttcgaccctgtttggcaataacaagcttactacatttggaagcagcacaaccagtgcaccttcatttggtacaaccagtggcgggctctttggtaacaaaccaaccctgactttaggaaccaatacaaacacttctaattttggttttggcacaaataccagtgggaatagtatttttggaagtaaaccagcacctgggactcttggaactgggcttggtgcaggatttggaacagctcttggtgctggacaggcatctttgtttgggaacaaccaacctaagattggagggcctcttggtacaggagcctttggggcccctggatttaatactacgacagccactttgggctttggagccccccaggccccagtagctttgacagatccaaatgcttctgctgcccagcaggctgttctccagcagcacatcaatagtctaacatactcaccttttggagactctcctctcttccggaatccgatgtcagaccctaagaagaaggaagagagattgaaaccaacaaatccagcagcccagaaggctcttactacacctactcattataaactgacaccccgccctgccactagagtccggccaaaggctttacaaacaacaggcacagccaagtcacatctctttgatgggctggatgacgatgaaccatccctagccaatggagcattcatgcccaagaagagcattaagaagttggttttgaagaaccttaataatagcaatctcttttctcctgttaatcgtgattcagaaaatctagcttcaccatctgaatatccagaaaatggagagagatttagtttcctaagcaaacctgttgatgagaatcaccagcaggatggagatgaagattcccttgtttcacatttttatactaaccctattgccaaacctattcctcaaaccccagaaagtgctggaaataaacacagcaacagcaacagtgtggatgataccattgttgcattaaacatgcgtgctgctttgcgaaatgggctggaaggaagcagtgaagaaacgtcttttcatgatgagtcacttcaggatgaccgagaagaaatagaaaataattcttaccatatgcacccagcaggtattattctcactaaggttggttactatactattccatctatggatgaccttgctaaaattaccaatgaaaaaggagagtgcattgtctctgatttcactattggtcggaaaggttatggttcaatctattttgaaggagatgtgaatttgacaaatctaaatttggatgatattgtgcatatccggaggaaagaagtagttgtctacttagatgataaccaaaaaccacctgtgggtgaagggctaaataggaaggctgaagttacattggatggagtttggccaacagataaaacatctcgttgtttaataaagagcccagatcgccttgctgatatcaactatgaaggaagattggaagcagtttcaaggaaacagggagctcaattcaaagaataccggcctgaaactggttcttgggtgtttaaggtctcccatttttctaagtatggccttcaggattctgatgaagaggaggaggagcatccgtctaaaactagtacaaagaagttgaagactgctcctttgcctcctgcaagccagactacgcccttgcagatggctcttaatggcaaacctgcacctccacctcagagccagagcccagaggtggagcagttagggagggttgtggaactggacagtgacatggtagatatcacccaggagccagttttggataccatgttagaagagagcatgcctgaggatcaggaacctgtgtctgcctcaacacatattgcatcttcactgggaattaatccacatgtcttacagatcatgaaagcatcattgcttactgatgaagaagatgtagatatggcactggatcaacgcttcagtcgcctgccttccaaagcagatacttctcaagaaatctgttctcccagactccccatttcagcatcccactcgtcgaaaactcgttcactagttggtgggttactacaatcaaaatttacaagtggagcttttctttcaccaagtgtctctgtgcaagaatgtcgtactcccagagcagcatctttaatgaatatcccatccacatcctcttggtctgtccctccacccctgacttctgtgttcacaatgcccagcccagcccctgaggttccgttgaaaacagtgggtacacgtaggcaactaggcctagtccctcgtgaaaagtctgtcacctatggcaagggaaaactcttgatggacatggccctattcatgggacgctcatttcgtgttggttggggccccaactggactcttgctaatagtggagaacagctgaatggctctcatgaactagaaaatcatcagattgccgattccatggagtttggattcctgcccaatccagtagctgttaaacccctaactgagtccccattcaaagttcacttagaaaaactcagtttgagacaaagaaagccagatgaagacatgaaattatatcagacacctctggagctcaaattaaaacacagcactgtccatgtggatgaactgtgtcctctcattgtccccaatctgggagttgctgtcattcatgactatgcagattgggttaaagaagcatcaggagacttaccagaagcacaaattgtgaagcactggagcctgacatggacactatgtgaagccctatggggccacctgaaggagcttgacagccagctaaatgaaccccgtgaatacattcaaattctggagcgaagaagagctttctcccgctggctatcctgtactgccacacctcagattgaagaggaagtctccttaacccaaaaaaacagccctgtggaggctgtattcagctacctcacaggcaaaaggatcagtgaggcctgctctctggcccagcagtcaggggatcatcgtcttgctcttcttttatctcagtttgtgggtagccagtcagtccgggagctgctcaccatgcagttggtggactggcatcagctccaagcagactccttcatccaggatgagagactgcgcatctttgctctgttggctggaaaaccggtgtggcagctctcagaaaagaagcaaataaacgtgtgctcccagttggattggaaacgctccctggctatccatctttggtatttgcttccaccaacagcctccatttctagggcgctcagcatgtatgaagaagcatttcagaatacctctgacagtgacagatatgcctgctccccacttccttcgtatctggagggttctggctgtgtgatagcggaggagcaaaactcacagacaccacttcgagatgtctgctttcaccttctaaaactctacagtgacagacattatgatctcaaccagctgctggagcctcgaagcataacagcagatcctttggactaccgcctaagctggcacttgtgggaagtgctgagggctcttaactacacccatctctcagcgcagtgtgaaggtgtgctacaggccagttacgctggccagcttgaaagtgaggggctctgggagtgggccatctttgtcctcctgcacattgacaactcaggcatacgtgagaaggctgttcgagagctgcttacccggcactgccagctgttggagacccctgaatcttgggctaaagagactttccttacccagaagctccgtgtacctgccaaatggatccacgaggccaaagctgtgcgagcacacatggaatctgacaagcacttagaggccctttgcttatttaaggctgagcactggaaccgctgccacaagctcatcatccgacacttagcttctgatgccatcattaatgagaactatgactacctgaaggggttcttggaagacctggcacctccagagcgcagcagcctaattcaggattgggaaacatctgggcttgtttacctggactatattagagtcattgaaatgctccgccatatacagcaggtggattgctcaggtaatgacctggagcagttacacatcaaagtgacttcactgtgcagtcggatagagcagattcagtgttacagtgctaaagatcgcctggctcagtcagacatggccaaacgtgtagccaacctgctgcgcgtggtgctgagtctgcatcatcctcctgatagaacctccgactcaacaccagaccctcagcgagtccctttgcgcctcttggctccccacattggccggcttcccatgcctgaggactatgccatggacgaactgcgcagccttacccagtcctatctgcgagaactggctgttgggagcctgtgagccccaggcactttgcatcacagtcacatgcccattcacaccacacagaggttccctgccttgtttggattggcactgtttgccattctctgggttggctgtggcatctaccctccctccctgctgccagaagcagcatcctccacttgttcagggcttttcttaatactgaacgtagcataagggcttctggaacccagaagaggagacagtttaccatcctcaagatcattcagtgtttttcctttaaaaaaatggtcaataaagctcctttggcagaatcccccaaagaaccagggtattctttttccatccctagccattctggatcttgtgaccctccatgccaaccagcttccctactcctaccctggcccttttatactaggactccttaggaggagtgagacaggtgataatggatccttaacagatgaactatccacagaaggaagagggatccgtctcttaagtaattggttagttaacactgaattttggaggcaaaggagggttggcctgagttaggaaacaaaatgggatctttctgacacacttagggcagaagtgaatgcctgtcacggagggattgatcttcagggctgtttttgttcctgcctttagagttccatgaacaccatacctttgctactactatgtgcaggaacccttggtcacatgtgacatgtctgtgggaagctcccagagtttggtttggtccctggttttcagtcttgctgagactctgtctggatttgcctgcagagtttggataaaaaatggcaggttgggtaaccctccctgttcatcccatgttagctccaaagcatttcccaccctccatctaccccttccagaagcaaaaacaaaccatgactgaggcaggcatggagttgggcgttaggggcaggcagagggcctttgctacactgctgacagctatagggagccccaggtaatggcatgagatagctggtgttagggctatctcaggcaatatggccacacctgggtctttatgcatgaagataatgtaaaggtttttattaaaaaatatatatatgtataaataaatgatctagatattttcctctttttctgaagctactttcttaaaaaataaataaaatgtttatagcattcctggta

SEQ ID NO: 405554 - DNA, 5230 bp, Homo sapiens
aaatatactcgtgtgcacaccaggtcggcttcttcaacacatggatgaaacagtatcttttcatgctaccgacctccaaatgttagctttgacagatccaaatgcttctgctgcccagcaggctgttctccagcagcacatcaatagtctaacatactcaccttttggagactctcctctcttccggaatccgatgtcagaccctaagaagaaggaagagagattgaaaccaacaaatccagcagcccagaaggctcttactacacctactcattataaactgacaccccgccctgccactagagtccggccaaaggctttacaaacaacaggcacagccaagtcacatctctttgatgggctggatgacgatgaaccatccctagccaatggagcattcatgcccaagaagagcattaagaagttggttttgaagaaccttaataatagcaatctcttttctcctgttaatcgtgattcagaaaatctagcttcaccatctgaatatccagaaaatggagagagatttagtttcctaagcaaacctgttgatgagaatcaccagcaggatggagatgaagattcccttgtttcacatttttatactaaccctattgccaaacctattcctcaaaccccagaaagtgctggaaataaacacagcaacagcaacagtgtggatgataccattgttgcattaaacatgcgtgctgctttgcgaaatgggctggaaggaagcagtgaagaaacgtcttttcatgatgagtcacttcaggatgaccgagaagaaatagaaaataattcttaccatatgcacccagcaggtattattctcactaaggttggttactatactattccatctatggatgaccttgctaaaattaccaatgaaaaaggagagtgcattgtctctgatttcactattggtcggaaaggttatggttcaatctattttgaaggagatgtgaatttgacaaatctaaatttggatgatattgtgcatatccggaggaaagaagtagttgtctacttagatgataaccaaaaaccacctgtgggtgaagggctaaataggaaggctgaagttacattggatggagtttggccaacagataaaacatctcgttgtttaataaagagcccagatcgccttgctgatatcaactatgaaggaagattggaagcagtttcaaggaaacagggagctcaattcaaagaataccggcctgaaactggttcttgggtgtttaaggtctcccatttttctaagtatggccttcaggattctgatgaagaggaggaggagcatccgtctaaaactagtacaaagaagttgaagactgctcctttgcctcctgcaagccagactacgcccttgcagatggctcttaatggcaaacctgcacctccacctcagagccagagcccagaggtggagcagttagggagggttgtggaactggacagtgacatggtagatatcacccaggagccagttttggataccatgttagaagagagcatgcctgaggatcaggaacctgtgtctgcctcaacacatattgcatcttcactgggaattaatccacatgtcttacagatcatgaaagcatcattgcttactgatgaagaagatgtagatatggcactggatcaacgcttcagtcgcctgccttccaaagcagatacttctcaagaaatctgttctcccagactccccatttcagcatcccactcgtcgaaaactcgttcactagttggtgggttactacaatcaaaatttacaagtggagcttttctttcaccaagtgtctctgtgcaagaatgtcgtactcccagagcagcatctttaatgaatatcccatccacatcctcttggtctgtccctccacccctgacttctgtgttcacaatgcccagcccagcccctgaggttccgttgaaaacagtgggtacacgtaggcaactaggcctagtccctcgtgaaaagtctgtcacctatggcaagggaaaactcttgatggacatggccctattcatgggacgctcatttcgtgttggttggggccccaactggactcttgctaatagtggagaacagctgaatggctctcatgaactagaaaatcatcagattgccgattccatggagtttggattcctgcccaatccagtagctgttaaacccctaactgagtccccattcaaagttcacttagaaaaactcagtttgagacaaagaaagccagatgaagacatgaaattatatcagacacctctggagctcaaattaaaacacagcactgtccatgtggatgaactgtgtcctctcattgtccccaatctgggagttgctgtcattcatgactatgcagattgggttaaagaagcatcaggagacttaccagaagcacaaattgtgaagcactggagcctgacatggacactatgtgaagccctatggggccacctgaaggagcttgacagccagctaaatgaaccccgtgaatacattcaaattctggagcgaagaagagctttctcccgctggctatcctgtactgccacacctcagattgaagaggaagtctccttaacccaaaaaaacagccctgtggaggctgtattcagctacctcacaggcaaaaggatcagtgaggcctgctctctggcccagcagtcaggggatcatcgtcttgctcttcttttatctcagtttgtgggtagccagtcagtccgggagctgctcaccatgcagttggtggactggcatcagctccaagcagactccttcatccaggatgagagactgcgcatctttgctctgttggctggaaaaccggtgtggcagctctcagaaaagaagcaaataaacgtgtgctcccagttggattggaaacgctccctggctatccatctttggtatttgcttccaccaacagcctccatttctagggcgctcagcatgtatgaagaagcatttcagaatacctctgacagtgacagatatgcctgctccccacttccttcgtatctggagggttctggctgtgtgatagcggaggagcaaaactcacagacaccacttcgagatgtctgctttcaccttctaaaactctacagtgacagacattatgatctcaaccagctgctggagcctcgaagcataacagcagatcctttggactaccgcctaagctggcacttgtgggaagtgctgagggctcttaactacacccatctctcagcgcagtgtgaaggtgtgctacaggccagttacgctggccagcttgaaagtgaggggctctgggagtgggccatctttgtcctcctgcacattgacaactcaggcatacgtgagaaggctgttcgagagctgcttacccggcactgccagctgttggagacccctgaatcttgggctaaagagactttccttacccagaagctccgtgtacctgccaaatggatccacgaggccaaagctgtgcgagcacacatggaatctgacaagcacttagaggccctttgcttatttaaggctgagcactggaaccgctgccacaagctcatcatccgacacttagcttctgatgccatcattaatgagaactatgactacctgaaggggttcttggaagacctggcacctccagagcgcagcagcctaattcaggattgggaaacatctgggcttgtttacctggactatattagagtcattgaaatgctccgccatatacagcaggtggattgctcaggtaatgacctggagcagttacacatcaaagtgacttcactgtgcagtcggatagagcagattcagtgttacagtgctaaagatcgcctggctcagtcagacatggccaaacgtgtagccaacctgctgcgcgtggtgctgagtctgcatcatcctcctgatagaacctccgactcaacaccagaccctcagcgagtccctttgcgcctcttggctccccacattggccggcttcccatgcctgaggactatgccatggacgaactgcgcagccttacccagtcctatctgcgagaactggctgttgggagcctgtgagccccaggcactttgcatcacagtcacatgcccattcacaccacacagaggttccctgccttgtttggattggcactgtttgccattctctgggttggctgtggcatctaccctccctccctgctgccagaagcagcatcctccacttgttcagggcttttcttaatactgaacgtagcataagggcttctggaacccagaagaggagacagtttaccatcctcaagatcattcagtgtttttcctttaaaaaaatggtcaataaagctcctttggcagaatcccccaaagaaccagggtattctttttccatccctagccattctggatcttgtgaccctccatgccaaccagcttccctactcctaccctggcccttttatactaggactccttaggaggagtgagacaggtgataatggatccttaacagatgaactatccacagaaggaagagggatccgtctcttaagtaattggttagttaacactgaattttggaggcaaaggagggttggcctgagttaggaaacaaaatgggatctttctgacacacttagggcagaagtgaatgcctgtcacggagggattgatcttcagggctgtttttgttcctgcctttagagttccatgaacaccatacctttgctactactatgtgcaggaacccttggtcacatgtgacatgtctgtgggaagctcccagagtttggtttggtccctggttttcagtcttgctgagactctgtctggatttgcctgcagagtttggataaaaaatggcaggttgggtaaccctccctgttcatcccatgttagctccaaagcatttcccaccctccatctaccccttccagaagcaaaaacaaaccatgactgaggcaggcatggagttgggcgttaggggcaggcagagggcctttgctacactgctgacagctatagggagccccaggtaatggcatgagatagctggtgttagggctatctcaggcaatatggccacacctgggtctttatgcatgaagataatgtaaaggtttttattaaaaaatatatatatgtataaataaatgatctagatattttcctctttttctgaagctactttcttaaaaaataaataaaatgtttatagcattcctggta

SEQ ID NO: 405555 - DNA, 4620 bp, Homo sapiens
ttcttcaaacctatttgaccatgaagcttttcacacacacacacacacacacacacacacacactcacacaccccttctcctaggaatcatgtttggtagaaaagtagtttggaaaattcttcattctgatatattttctctttatatgatgatttagttgctgattatttcaggttatttttttttctgtttttttttttttttttgtcacaggtattattctcactaaggttggttactatactattccatctatggatgaccttgctaaaattaccaatgaaaaaggagagtgcattgtctctgatttcactattggtcggaaaggttatggttcaatctattttgaaggagatgtgaatttgacaaatctaaatttggatgatattgtgcatatccggaggaaagaagtagttgtctacttagatgataaccaaaaaccacctgtgggtgaagggctaaataggaaggctgaagttacattggatggagtttggccaacagataaaacatctcgttgtttaataaagagcccagatcgccttgctgatatcaactatgaaggaagattggaagcagtttcaaggaaacagggagctcaattcaaagaataccggcctgaaactggttcttgggtgtttaaggtctcccatttttctaagtatggccttcaggattctgatgaagaggaggaggagcatccgtctaaaactagtacaaagaagttgaagactgctcctttgcctcctgcaagccagactacgcccttgcagatggctcttaatggcaaacctgcacctccacctcagagccagagcccagaggtggagcagttagggagggttgtggaactggacagtgacatggtagatatcacccaggagccagttttggataccatgttagaagagagcatgcctgaggatcaggaacctgtgtctgcctcaacacatattgcatcttcactgggaattaatccacatgtcttacagatcatgaaagcatcattgcttactgatgaagaagatgtagatatggcactggatcaacgcttcagtcgcctgccttccaaagcagatacttctcaagaaatctgttctcccagactccccatttcagcatcccactcgtcgaaaactcgttcactagttggtgggttactacaatcaaaatttacaagtggagcttttctttcaccaagtgtctctgtgcaagaatgtcgtactcccagagcagcatctttaatgaatatcccatccacatcctcttggtctgtccctccacccctgacttctgtgttcacaatgcccagcccagcccctgaggttccgttgaaaacagtgggtacacgtaggcaactaggcctagtccctcgtgaaaagtctgtcacctatggcaagggaaaactcttgatggacatggccctattcatgggacgctcatttcgtgttggttggggccccaactggactcttgctaatagtggagaacagctgaatggctctcatgaactagaaaatcatcagattgccgattccatggagtttggattcctgcccaatccagtagctgttaaacccctaactgagtccccattcaaagttcacttagaaaaactcagtttgagacaaagaaagccagatgaagacatgaaattatatcagacacctctggagctcaaattaaaacacagcactgtccatgtggatgaactgtgtcctctcattgtccccaatctgggagttgctgtcattcatgactatgcagattgggttaaagaagcatcaggagacttaccagaagcacaaattgtgaagcactggagcctgacatggacactatgtgaagccctatggggccacctgaaggagcttgacagccagctaaatgaaccccgtgaatacattcaaattctggagcgaagaagagctttctcccgctggctatcctgtactgccacacctcagattgaagaggaagtctccttaacccaaaaaaacagccctgtggaggctgtattcagctacctcacaggcaaaaggatcagtgaggcctgctctctggcccagcagtcaggggatcatcgtcttgctcttcttttatctcagtttgtgggtagccagtcagtccgggagctgctcaccatgcagttggtggactggcatcagctccaagcagactccttcatccaggatgagagactgcgcatctttgctctgttggctggaaaaccggtgtggcagctctcagaaaagaagcaaataaacgtgtgctcccagttggattggaaacgctccctggctatccatctttggtatttgcttccaccaacagcctccatttctagggcgctcagcatgtatgaagaagcatttcagaatacctctgacagtgacagatatgcctgctccccacttccttcgtatctggagggttctggctgtgtgatagcggaggagcaaaactcacagacaccacttcgagatgtctgctttcaccttctaaaactctacagtgacagacattatgatctcaaccagctgctggagcctcgaagcataacagcagatcctttggactaccgcctaagctggcacttgtgggaagtgctgagggctcttaactacacccatctctcagcgcagtgtgaaggtgtgctacaggccagttacgctggccagcttgaaagtgaggggctctgggagtgggccatctttgtcctcctgcacattgacaactcaggcatacgtgagaaggctgttcgagagctgcttacccggcactgccagctgttggagacccctgaatcttgggctaaagagactttccttacccagaagctccgtgtacctgccaaatggatccacgaggccaaagctgtgcgagcacacatggaatctgacaagcacttagaggccctttgcttatttaaggctgagcactggaaccgctgccacaagctcatcatccgacacttagcttctgatgccatcattaatgagaactatgactacctgaaggggttcttggaagacctggcacctccagagcgcagcagcctaattcaggattgggaaacatctgggcttgtttacctggactatattagagtcattgaaatgctccgccatatacagcaggtggattgctcaggtaatgacctggagcagttacacatcaaagtgacttcactgtgcagtcggatagagcagattcagtgttacagtgctaaagatcgcctggctcagtcagacatggccaaacgtgtagccaacctgctgcgcgtggtgctgagtctgcatcatcctcctgatagaacctccgactcaacaccagaccctcagcgagtccctttgcgcctcttggctccccacattggccggcttcccatgcctgaggactatgccatggacgaactgcgcagccttacccagtcctatctgcgagaactggctgttgggagcctgtgagccccaggcactttgcatcacagtcacatgcccattcacaccacacagaggttccctgccttgtttggattggcactgtttgccattctctgggttggctgtggcatctaccctccctccctgctgccagaagcagcatcctccacttgttcagggcttttcttaatactgaacgtagcataagggcttctggaacccagaagaggagacagtttaccatcctcaagatcattcagtgtttttcctttaaaaaaatggtcaataaagctcctttggcagaatcccccaaagaaccagggtattctttttccatccctagccattctggatcttgtgaccctccatgccaaccagcttccctactcctaccctggcccttttatactaggactccttaggaggagtgagacaggtgataatggatccttaacagatgaactatccacagaaggaagagggatccgtctcttaagtaattggttagttaacactgaattttggaggcaaaggagggttggcctgagttaggaaacaaaatgggatctttctgacacacttagggcagaagtgaatgcctgtcacggagggattgatcttcagggctgtttttgttcctgcctttagagttccatgaacaccatacctttgctactactatgtgcaggaacccttggtcacatgtgacatgtctgtgggaagctcccagagtttggtttggtccctggttttcagtcttgctgagactctgtctggatttgcctgcagagtttggataaaaaatggcaggttgggtaaccctccctgttcatcccatgttagctccaaagcatttcccaccctccatctaccccttccagaagcaaaaacaaaccatgactgaggcaggcatggagttgggcgttaggggcaggcagagggcctttgctacactgctgacagctatagggagccccaggtaatggcatgagatagctggtgttagggctatctcaggcaatatggccacacctgggtctttatgcatgaagataatgtaaaggtttttattaaaaaatatatatatgtataaataaatgatctagatattttcctctttttctgaagctactttcttaaaaaataaataaaatgtttatagcattcctggta

SEQ ID NO: 405556 - DNA, 7291 bp, Homo sapiens
cctccgtgacaggcattcacttctgccctaagtgtgtcagaaagatcccattttgtttcctaactcaggccaaccctcctttgcctccaaaattcagtgttaactaaccaattacttaagagacggatccctcttccttctgtggatagttcatctgttaaggatccattatcacctgtctcactcctcctaaggagtcctagtataaaagggccagggtaggagtagggaagctggttggcatggagggtcacaagatccagaatggctagggatggaaaaagaataccctggttctttgggggattctgccaaaggagctttattgaccatttttttaaaggaaaaacactgaatgatcttgaggatggtaaactgtctcctcttctgggttccagaagcccttatgctacgttcagtattaagaaaagccctgaacaagtggaggatgctgctttcatattctttcatagcagtaatacactggtgcttggtacttatgttagtgctaactccagctttgaccatagtatctgtaccagttggagggttaaatttaatagtagtcccagtaggagcagctgtaaaactacttggcccaaagagggagccagatgtgctgccaaaaggattagaggtggtatttgtggttccaaggagtcctccactgctagtactggttccaaaattgccaaagccagttggtttattttgtccaaatgttgaagttgtgccaaagccacctgtgccacccccaaagggtgttccaaatgatttgttaaacatcttcaaaatgagtctttgtttcagaaagcgcggtttcgtgggggccgcgcgctgctctgtgagcggcgggtggcagcaggggactcctgacacttccccttccccaccgaaccgcgctttctgaaacaaagactcattttgaagatgtttaacaaatcatttggaacaccctttgggggtggcacaggtggctttggcacaacttcaacatttggacagaatactggctttggcactactagtggaggggcatttggaacatctgcatttggttctagcaacaatactggaggcctctttggaaattcacagactaaaccaggaggattgtttggaaccagttcatttagccagccagctacctccacaagcactggctttgggtttggtacgtcaacaggaacagcaaataccttgtttggaactgcaagcacagggaccagtctcttctcatcccaaaacaatgcctttgcacaaaataaaccaactggctttggcaattttggaaccagtactagcagtggaggactctttggaaccacaaataccacctctaatccttttggcagcacatctggctccctctttgggccaagtagttttacagctgctcctactgggactactattaaatttaaccctccaactggtacagatactatggtcaaagctggagttagcactaacataagtaccaagcaccagtgtattactgctatgaaagaatatgaaagcaagtcactagaggaacttcgtttagaggattatcaggctaacaggaagggcccacagaaccaggtgggagcaggtaccacaactggcttgtttgggtcttctccagccacttccagcgcaacaggactcttcagctcctccaccactaattcaggctttgcatatggtcagaacaaaactgcctttggaactagtacaactggatttggaacaaatccaggtggtctctttggccaacagaatcagcagactaccagcctcttcagcaaaccatttggccaggctacaaccacccagaacactggcttttcctttggtaataccagcaccataggacagccaagcaccaacaccatgggattatttggagtaacccaagcctcacagcctggaggtctttttgggacagctacaaacaccagcactgggacagcatttggaacaggaacaggtctctttgggcagaccaatactggatttggtgctgttggttcgaccctgtttggcaataacaagcttactacatttggaagcagcacaaccagtgcaccttcatttggtacaaccagtggcgggctctttggttttggcacaaataccagtgggaatagtatttttggaagtaaaccagcacctgggactcttggaactgggcttggtgcaggatttggaacagctcttggtgctggacaggcatctttgtttgggaacaaccaacctaagattggagggcctcttggtacaggagcctttggggcccctggatttaatactacgacagccactttgggctttggagccccccaggccccagtagctttgacagatccaaatgcttctgctgcccagcaggctgttctccagcagcacatcaatagtctaacatactcaccttttggagactctcctctcttccggaatccgatgtcagaccctaagaagaaggaagagagattgaaaccaacaaatccagcagcccagaaggctcttactacacctactcattataaactgacaccccgccctgccactagagtccggccaaaggctttacaaacaacaggcacagccaagtcacatctctttgatgggctggatgacgatgaaccatccctagccaatggagcattcatgcccaagaagagcattaagaagttggttttgaagaaccttaataatagcaatctcttttctcctgttaatcgtgattcagaaaatctagcttcaccatctgaatatccagaaaatggagagagatttagtttcctaagcaaacctgttgatgagaatcaccagcaggatggagatgaagattcccttgtttcacatttttatactaaccctattgccaaacctattcctcaaaccccagaaagtgctggaaataaacacagcaacagcaacagtgtggatgataccattgttgcattaaacatgcgtgctgctttgcgaaatgggctggaaggaagcagtgaagaaacgtcttttcatgatgagtcacttcaggatgaccgagaagaaatagaaaataattcttaccatatgcacccagcaggtattattctcactaaggttggttactatactattccatctatggatgaccttgctaaaattaccaatgaaaaaggagagtgcattgtctctgatttcactattggtcggaaaggttatggttcaatctattttgaaggagatgtgaatttgacaaatctaaatttggatgatattgtgcatatccggaggaaagaagtagttgtctacttagatgataaccaaaaaccacctgtgggtgaagggctaaataggaaggctgaagttacattggatggagtttggccaacagataaaacatctcgttgtttaataaagagcccagatcgccttgctgatatcaactatgaaggaagattggaagcagtttcaaggaaacagggagctcaattcaaagaataccggcctgaaactggttcttgggtgtttaaggtctcccatttttctaagtatggccttcaggattctgatgaagaggaggaggagcatccgtctaaaactagtacaaagaagttgaagactgctcctttgcctcctgcaagccagactacgcccttgcagatggctcttaatggcaaacctgcacctccacctcagagccagagcccagaggtggagcagttagggagggttgtggaactggacagtgacatggtagatatcacccaggagccagttttggataccatgttagaagagagcatgcctgaggatcaggaacctgtgtctgcctcaacacatattgcatcttcactgggaattaatccacatgtcttacagatcatgaaagcatcattgcttactgatgaagaagatgtagatatggcactggatcaacgcttcagtcgcctgccttccaaagcagatacttctcaagaaatctgttctcccagactccccatttcagcatcccactcgtcgaaaactcgttcactagttggtgggttactacaatcaaaatttacaagtggagcttttctttcaccaagtgtctctgtgcaagaatgtcgtactcccagagcagcatctttaatgaatatcccatccacatcctcttggtctgtccctccacccctgacttctgtgttcacaatgcccagcccagcccctgaggttccgttgaaaacagtgggtacacgtaggcaactaggcctagtccctcgtgaaaagtctgtcacctatggcaagggaaaactcttgatggacatggccctattcatgggacgctcatttcgtgttggttggggccccaactggactcttgctaatagtggagaacagctgaatggctctcatgaactagaaaatcatcagattgccgattccatggagtttggattcctgcccaatccagtagctgttaaacccctaactgagtccccattcaaagttcacttagaaaaactcagtttgagacaaagaaagccagatgaagacatgaaattatatcagacacctctggagctcaaattaaaacacagcactgtccatgtggatgaactgtgtcctctcattgtccccaatctgggagttgctgtcattcatgactatgcagattgggttaaagaagcatcaggagacttaccagaagcacaaattgtgaagcactggagcctgacatggacactatgtgaagccctatggggccacctgaaggagcttgacagccagctaaatgaaccccgtgaatacattcaaattctggagcgaagaagagctttctcccgctggctatcctgtactgccacacctcagattgaagaggaagtctccttaacccaaaaaaacagccctgtggaggctgtattcagctacctcacaggcaaaaggatcagtgaggcctgctctctggcccagcagtcaggggatcatcgtcttgctcttcttttatctcagtttgtgggtagccagtcagtccgggagctgctcaccatgcagttggtggactggcatcagctccaagcagactccttcatccaggatgagagactgcgcatctttgctctgttggctggaaaaccggtgtggcagctctcagaaaagaagcaaataaacgtgtgctcccagttggattggaaacgctccctggctatccatctttggtatttgcttccaccaacagcctccatttctagggcgctcagcatgtatgaagaagcatttcagaatacctctgacagtgacagatatgcctgctccccacttccttcgtatctggagggttctggctgtgtgatagcggaggagcaaaactcacagacaccacttcgagatgtctgctttcaccttctaaaactctacagtgacagcatacgtgagaaggctgttcgagagctgcttacccggcactgccagctgttggagacccctgaatcttgggctaaagagactttccttacccagaagctccgtgtacctgccaaatggatccacgaggccaaagctgtgcgagcacacatggaatctgacaagcacttagaggccctttgcttatttaaggctgagcactggaaccgctgccacaagctcatcatccgacacttagcttctgatgccatcattaatgagaactatgactacctgaaggggttcttggaagacctggcacctccagagcgcagcagcctaattcaggattgggaaacatctgggcttgtttacctggactatattagagtcattgaaatgctccgccatatacagcagggagcatttcaatgactctaatatagtccaggtggattgctcaggtaatgacctggagcagttacacatcaaagtgacttcactgtgcagtcggatagagcagattcagtgttacagtgctaaagatcgcctggctcagtcagacatggccaaacgtgtagccaacctgctgcgcgtggtgctgagtctgcatcatcctcctgatagaacctccgactcaacaccagaccctcagcgagtccctttgcgcctcttggctccccacattggccggcttcccatgcctgaggactatgccatggacgaactgcgcagccttacccagtcctatctgcgagaactggctgttgggagcctgtgagccccaggcactttgcatcacagtcacatgcccattcacaccacacagaggttccctgccttgtttggattggcactgtttgccattctctgggttggctgtggcatctaccctccctccctgctgccagaagcagcatcctccacttgttcagggcttttcttaatactgaacgtagcataagggcttctggaacccagaagaggagacagtttaccatcctcaagatcattcagtgtttttcctttaaaaaaatggtcaataaagctcctttggcagaatcccccaaagaaccagggtattctttttccatccctagccattctggatcttgtgaccctccatgccaaccagcttccctactcctaccctggcccttttatactaggactccttaggaggagtgagacaggtgataatggatccttaacagatgaactatccacagaaggaagagggatccgtctcttaagtaattggttagttaacactgaattttggaggcaaaggagggttggcctgagttaggaaacaaaatgggatctttctgacacacttagggcagaagtgaatgcctgtcacggagggattgatcttcagggctgtttttgttcctgcctttagagttccatgaacaccatacctttgctactactatgtgcaggaacccttggtcacatgtgacatgtctgtgggaagctcccagagtttggtttggtccctggttttcagtcttgctgagactctgtctggatttgcctgcagagtttggataaaaaatggcaggttgggtaaccctccctgttcatcccatgttagctccaaagcatttcccaccctccatctaccccttccagaagcaaaaacaaaccatgactgaggcaggcatggagttgggcgttaggggcaggcagagggcctttgctacactgctgacagctatagggagccccaggtaatggcatgagatagctggtgttagggctatctcaggcaatatggccacacctgggtctttatgcatgaagataatgtaaaggtttttattaaaaaatatatatatgtataaataaatgatctagatattttcctctttttctgaagctactttcttaaaaaataaataaaatgtttatagcattcctggta

SEQ ID NO: 405557 - DNA, 6735 bp, Homo sapiens
agcggggcgaggggcgggactccacggcctctcaccgctcctaccctgtgcctccccgaactccttctgcccctcctcttccctctcgccccttcccccttcagttcggtttcaaaagacgcgtgcccaatgaataacagggtcgacccagagtggcggcgcgtcaccaattcgcggacggcgagggcggagcgtccgcaacgagcctctgacgccgggcggcgtgtgacgcagtcgggccctctgcgcgctgcgcccgaagcggcggtcggtggcaggggtggtagcggcggcggcgacggtttcgtgggggccgcgcgctgctctgtgagcggcgggtggcagcaggggactcctgacacttccccttccccaccgaaccgcgctttctgaaacaaagactcattttgaagatgtttaacaaatcatttggaacaccctttgggggtggcacaggtggctttggcacaacttcaacatttggacagaatactggctttggcactactagtggaggggcatttggaacatctgcatttggttctagcaacaatactggaggcctctttggaaattcacagactaaaccaggaggattgtttggaaccagttcatttagccagccagctacctccacaagcactggctttgggtttggtacgtcaacaggaacagcaaataccttgtttggaactgcaagcacagggaccagtctcttctcatcccaaaacaatgcctttgcacaaaataaaccaactggctttggcaattttggaaccagtactagcagtggaggactctttggaaccacaaataccacctctaatccttttggcagcacatctggctccctctttgggccaagtagttttacagctgctcctactgggactactattaaatttaaccctccaactggtacagatactatggtcaaagctggagttagcactaacataagtaccaagcaccagtgtattactgctatgaaagaatatgaaagcaagtcactagaggaacttcgtttagaggattatcaggctaacaggaagggcccacagaaccaggtgggagcaggtaccacaactggcttgtttgggtcttctccagccacttccagcgcaacaggactcttcagctcctccaccactaattcaggctttgcatatggtcagaacaaaactgcctttggaactagtacaactggatttggaacaaatccaggtggtctctttggccaacagaatcagcagactaccagcctcttcagcaaaccatttggccaggctacaaccacccagaacactggcttttcctttggtaataccagcaccataggacagccaagcaccaacaccatgggattatttggagtaacccaagcctcacagcctggaggtctttttgggacagctacaaacaccagcactgggacagcatttggaacaggaacaggtctctttgggcagaccaatactggatttggtgctgttggttcgaccctgtttggcaataacaagcttactacatttggaagcagcacaaccagtgcaccttcatttggtacaaccagtggcgggctctttggttttggcacaaataccagtgggaatagtatttttggaagtaaaccagcacctgggactcttggaactgggcttggtgcaggatttggaacagctcttggtgctggacaggcatctttgtttgggaacaaccaacctaagattggagggcctcttggtacaggagcctttggggcccctggatttaatactacgacagccactttgggctttggagccccccaggccccagtagctttgacagatccaaatgcttctgctgcccagcaggctgttctccagcagcacatcaatagtctaacatactcaccttttggagactctcctctcttccggaatccgatgtcagaccctaagaagaaggaagagagattgaaaccaacaaatccagcagcccagaaggctcttactacacctactcattataaactgacaccccgccctgccactagagtccggccaaaggctttacaaacaacaggcacagccaagtcacatctctttgatgggctggatgacgatgaaccatccctagccaatggagcattcatgcccaagaagagcattaagaagttggttttgaagaaccttaataatagcaatctcttttctcctgttaatcgtgattcagaaaatctagcttcaccatctgaatatccagaaaatggagagagatttagtttcctaagcaaacctgttgatgagaatcaccagcaggatggagatgaagattcccttgtttcacatttttatactaaccctattgccaaacctattcctcaaaccccagaaagtgctggaaataaacacagcaacagcaacagtgtggatgataccattgttgcattaaacatgcgtgctgctttgcgaaatgggctggaaggaagcagtgaagaaacgtcttttcatgatgagtcacttcaggatgaccgagaagaaatagaaaataattcttaccatatgcacccagcaggtattattctcactaaggttggttactatactattccatctatggatgaccttgctaaaattaccaatgaaaaaggagagtgcattgtctctgatttcactattggtcggaaaggttatggttcaatctattttgaaggagatgtgaatttgacaaatctaaatttggatgatattgtgcatatccggaggaaagaagtagttgtctacttagatgataaccaaaaaccacctgtgggtgaagggctaaataggaaggctgaagttacattggatggagtttggccaacagataaaacatctcgttgtttaataaagagcccagatcgccttgctgatatcaactatgaaggaagattggaagcagtttcaaggaaacagggagctcaattcaaagaataccggcctgaaactggttcttgggtgtttaaggtctcccatttttctaagtatggccttcaggattctgatgaagaggaggaggagcatccgtctaaaactagtacaaagaagttgaagactgctcctttgcctcctgcaagccagactacgcccttgcagatggctcttaatggcaaacctgcacctccacctcagagccagagcccagaggtggagcagttagggagggttgtggaactggacagtgacatggtagatatcacccaggagccagttttggataccatgttagaagagagcatgcctgaggatcaggaacctgtgtctgcctcaacacatattgcatcttcactgggaattaatccacatgtcttacagatcatgaaagcatcattgcttactgatgaagaagatgtagatatggcactggatcaacgcttcagtcgcctgccttccaaagcagatacttctcaagaaatctgttctcccagactccccatttcagcatcccactcgtcgaaaactcgttcactagttggtgggttactacaatcaaaatttacaagtggagcttttctttcaccaagtgtctctgtgcaagaatgtcgtactcccagagcagcatctttaatgaatatcccatccacatcctcttggtctgtccctccacccctgacttctgtgttcacaatgcccagcccagcccctgaggttccgttgaaaacagtgggtacacgtaggcaactaggcctagtccctcgtgaaaagtctgtcacctatggcaagggaaaactcttgatggacatggccctattcatgggacgctcatttcgtgttggttggggccccaactggactcttgctaatagtggagaacagctgaatggctctcatgaactagaaaatcatcagattgccgattccatggagtttggattcctgcccaatccagtagctgttaaaccttgtgaagcactggagcctgacatggacactatgtgaagccctatggggccacctgaaggagcttgacagccagctaaatgaaccccgtgaatacattcaaattctggagcgaagaagagctttctcccgctggctatcctgtactgccacacctcagattgaagaggaagtctccttaacccaaaaaaacagccctgtggaggctgtattcagctacctcacaggcaaaaggatcagtgaggcctgctctctggcccagcagtcaggggatcatcgtcttgctcttcttttatctcagtttgtgggtagccagtcagtccgggagctgctcaccatgcagttggtggactggcatcagctccaagcagactccttcatccaggatgagagactgcgcatctttgctctgttggctggaaaaccggtgtggcagctctcagaaaagaagcaaataaacgtgtgctcccagttggattggaaacgctccctggctatccatctttggtatttgcttccaccaacagcctccatttctagggcgctcagcatgtatgaagaagcatttcagaatacctctgacagtgacagatatgcctgctccccacttccttcgtatctggagggttctggctgtgtgatagcggaggagcaaaactcacagacaccacttcgagatgtctgctttcaccttctaaaactctacagtgacagacattatgatctcaaccagctgctggagcctcgaagcataacagcagatcctttggactaccgcctaagctggcacttgtgggaagtgctgagggctcttaactacacccatctctcagcgcagtgtgaaggtgtgctacaggccagttacgctggccagcttgaaagtgaggggctctgggagtgggccatctttgtcctcctgcacattgacaactcaggcatacgtgagaaggctgttcgagagctgcttacccggcactgccagctgttggagacccctgaatcttgggctaaagagactttccttacccagaagctccgtgtacctgccaaatggatccacgaggccaaagctgtgcgagcacacatggaatctgacaagcacttagaggccctttgcttatttaaggctgagcactggaaccgctgccacaagctcatcatccgacacttagcttctgatgccatcattaatgagaactatgactacctgaaggggttcttggaagacctggcacctccagagcgcagcagcctaattcaggattgggaaacatctgggcttgtttacctggactatattagagtcattgaaatgctccgccatatacagcaggtggattgctcaggtaatgacctggagcagttacacatcaaagtgacttcactgtgcagtcggatagagcagattcagtgttacagtgctaaagatcgcctggctcagtcagacatggccaaacgtgtagccaacctgctgcgcgtggtgctgagtctgcatcatcctcctgatagaacctccgactcaacaccagaccctcagcgagtccctttgcgcctcttggctccccacattggccggcttcccatgcctgaggactatgccatggacgaactgcgcagccttacccagtcctatctgcgagaactggctgttgggagcctgtgagccccaggcactttgcatcacagtcacatgcccattcacaccacacagaggttccctgccttgtttggattggcactgtttgccattctctgggttggctgtggcatctaccctccctccctgctgccagaagcagcatcctccacttgttcagggcttttcttaatactgaacgtagcataagggcttctggaacccagaagaggagacagtttaccatcctcaagatcattcagtgtttttcctttaaaaaaatggtcaataaagctcctttggcagaatcccccaaagaaccagggtattctttttccatccctagccattctggatcttgtgaccctccatgccaaccagcttccctactcctaccctggcccttttatactaggactccttaggaggagtgagacaggtgataatggatccttaacagatgaactatccacagaaggaagagggatccgtctcttaagtaattggttagttaacactgaattttggaggcaaaggagggttggcctgagttaggaaacaaaatgggatctttctgacacacttagggcagaagtgaatgcctgtcacggagggattgatcttcagggctgtttttgttcctgcctttagagttccatgaacaccatacctttgctactactatgtgcaggaacccttggtcacatgtgacatgtctgtgggaagctcccagagtttggtttggtccctggttttcagtcttgctgagactctgtctggatttgcctgcagagtttggataaaaaatggcaggttgggtaaccctccctgttcatcccatgttagctccaaagcatttcccaccctccatctaccccttccagaagcaaaaacaaaccatgactgaggcaggcatggagttgggcgttaggggcaggcagagggcctttgctacactgctgacagctatagggagccccaggtaatggcatgagatagctggtgttagggctatctcaggcaatatggccacacctgggtctttatgcatgaagataatgtaaaggtttttattaaaaaatatatatatgtataaataaatgatctagatattttcctctttttctgaagctactttcttaaaaaataaataaaatgtttatagcattcctggta

SEQ ID NO: 405558 - DNA, 6810 bp, Homo sapiens
agcggggcgaggggcgggactccacggcctctcaccgctcctaccctgtgcctccccgaactccttctgcccctcctcttccctctcgccccttcccccttcagttcggtttcaaaagacgcgtgcccaatgaataacagggtcgacccagagtggcggcgcgtcaccaattcgcggacggcgagggcggagcgtccgcaacgagcctctgacgccgggcggcgtgtgacgcagtcgggccctctgcgcgctgcgcccgaagcggcggtcggtggcaggggtggtagcggcggcggcgacggtttcgtgggggccgcgcgctgctctgtgagcggcgggtggcagcaggggactcctgacacttccccttccccaccgaaccgcgctttctgaaacaaagactcattttgaagatgtttaacaaatcatttggaacaccctttgggggtggcacaggtggctttggcacaacttcaacatttggacagaatactggctttggcactactagtggaggggcatttggaacatctgcatttggttctagcaacaatactggaggcctctttggaaattcacagactaaaccaggaggattgtttggaaccagttcatttagccagccagctacctccacaagcactggctttgggtttggtacgtcaacaggaacagcaaataccttgtttggaactgcaagcacagggaccagtctcttctcatcccaaaacaatgcctttgcacaaaataaaccaactggctttggcaattttggaaccagtactagcagtggaggactctttggaaccacaaataccacctctaatccttttggcagcacatctggctccctctttgggccaagtagttttacagctgctcctactgggactactattaaatttaaccctccaactggtacagatactatggtcaaagctggagttagcactaacataagtaccaagcaccagtgtattactgctatgaaagaatatgaaagcaagtcactagaggaacttcgtttagaggattatcaggctaacaggaagggcccacagaaccaggtgggagcaggtaccacaactggcttgtttgggtcttctccagccacttccagcgcaacaggactcttcagctcctccaccactaattcaggctttgcatatggtcagaacaaaactgcctttggaactagtacaactggatttggaacaaatccaggtggtctctttggccaacagaatcagcagactaccagcctcttcagcaaaccatttggccaggctacaaccacccagaacactggcttttcctttggtaataccagcaccataggacagccaagcaccaacaccatgggattatttggagtaacccaagcctcacagcctggaggtctttttgggacagctacaaacaccagcactgggacagcatttggaacaggaacaggtctctttgggcagaccaatactggatttggtgctgttggttcgaccctgtttggcaataacaagcttactacatttggaagcagcacaaccagtgcaccttcatttggtacaaccagtggcgggctctttggttttggcacaaataccagtgggaatagtatttttggaagtaaaccagcacctgggactcttggaactgggcttggtgcaggatttggaacagctcttggtgctggacaggcatctttgtttgggaacaaccaacctaagattggagggcctcttggtacaggagcctttggggcccctggatttaatactacgacagccactttgggctttggagccccccaggccccagtagctttgacagatccaaatgcttctgctgcccagcaggctgttctccagcagcacatcaatagtctaacatactcaccttttggagactctcctctcttccggaatccgatgtcagaccctaagaagaaggaagagagattgaaaccaacaaatccagcagcccagaaggctcttactacacctactcattataaactgacaccccgccctgccactagagtccggccaaaggctttacaaacaacaggcacagccaagtcacatctctttgatgggctggatgacgatgaaccatccctagccaatggagcattcatgcccaagaagagcattaagaagttggttttgaagaaccttaataatagcaatctcttttctcctgttaatcgtgattcagaaaatctagcttcaccatctgaatatccagaaaatggagagagatttagtttcctaagcaaacctgttgatgagaatcaccagcaggatggagatgaagattcccttgtttcacatttttatactaaccctattgccaaacctattcctcaaaccccagaaagtgctggaaataaacacagcaacagcaacagtgtggatgataccattgttgcattaaacatgcgtgctgctttgcgaaatgggctggaaggaagcagtgaagaaacgtcttttcatgatgagtcacttcaggatgaccgagaagaaatagaaaataattcttaccatatgcacccagcaggtattattctcactaaggttggttactatactattccatctatggatgaccttgctaaaattaccaatgaaaaaggagagtgcattgtctctgatttcactattggtcggaaaggttatggttcaatctattttgaaggagatgtgaatttgacaaatctaaatttggatgatattgtgcatatccggaggaaagaagtagttgtctacttagatgataaccaaaaaccacctgtgggtgaagggctaaataggaaggctgaagttacattggatggagtttggccaacagataaaacatctcgttgtttaataaagagcccagatcgccttgctgatatcaactatgaaggaagattggaagcagtttcaaggaaacagggagctcaattcaaagaataccggcctgaaactggttcttgggtgtttaaggtctcccatttttctaagtatggccttcaggattctgatgaagaggaggaggagcatccgtctaaaactagtacaaagaagttgaagactgctcctttgcctcctgcaagccagactacgcccttgcagatggctcttaatggcaaacctgcacctccacctcagagccagagcccagaggtggagcagttagggagggttgtggaactggacagtgacatggtagatatcacccaggagccagttttggataccatgttagaagagagcatgcctgaggatcaggaacctgtgtctgcctcaacacatattgcatcttcactgggaattaatccacatgtcttacagatcatgaaagcatcattgcttactgatgaagaagatgtagatatggcactggatcaacgcttcagtcgcctgccttccaaagcagatacttctcaagaaatctgttctcccagactccccatttcagcatcccactcgtcgaaaactcgttcactagttggtgggttactacaatcaaaatttacaagtggagcttttctttcaccaagtgtctctgtgcaagaatgtcgtactcccagagcagcatctttaatgaatatcccatccacatcctcttggtctgtccctccacccctgacttctgtgttcacaatgcccagcccagcccctgaggttccgttgaaaacagtgggtacacgtaggcaactaggcctagtccctcgtgaaaagtctgtcacctatggcaagggaaaactcttgatggacatggccctattcatgggacgctcatttcgtgttggttggggccccaactggactcttgctaatagtggagaacagctgaatggctctcatgaactagaaaatcatcagattgccgattccatggagtttggattcctgcccaatccagtagctgttaaacccctaactgagtccccattcaaagttcacttagaaaaactcagtttgagacaaagaaagccagatgaagacatgaaattatatcagacacctctggagctcaaattaaaacacagcactgtccatgtggatgaactgtgtcctctcattgtccccaatctgggagttgctgtcattcatgactatgcagattgggttaaagaagcatcaggagacttaccagaagcacaaattgtgaagcactggagcctgacatggacactatgtgaagccctatggggccacctgaaggagcttgacagccagctaaatgaaccccgtgaatacattcaaattctggagcgaagaagagctttctcccgctggctatcctgtactgccacacctcagattgaagaggaagtctccttaacccaaaaaaacagccctgtggaggctgtattcagctacctcacaggcaaaaggatcagtgaggcctgctctctggcccagcagtcaggggatcatcgtcttgctcttcttttatctcagtttgtgggtagccagtcagtccgggagctgctcaccatgcagttggtggactggcatcagctccaagcagactccttcatccaggatgagagactgcgcatctttgctctgttggctggaaaaccggtgtggcagctctcagaaaagaagcaaataaacgtgtgctcccagttggattggaaacgctccctggctatccatctttggtatttgcttccaccaacagcctccatttctagggcgctcagcatgtatgaagaagcatttcagaatacctctgacagtgacagatatgcctgctccccacttccttcgtatctggagggttctggctgtgtgatagcggaggagcaaaactcacagacaccacttcgagatgtctgctttcaccttctaaaactctacagtgacagacattatgatctcaaccagctgctggagcctcgaagcataacagcagatcctttggactaccgcctaagctggcacttgtgggaagtgctgagggctcttaactacacccatctctcagcgcagtgtgaaggtgtgctacaggccagttacgctggccagcttgaaagtgaggggctctgggagtgggccatctttgtcctcctgcacattgacaactcaggcatacgtgagaaggctgttcgagagctgcttacccggcactgccagctgttggagacccctgaatcttgggctaaagagactttccttacccagaagctccgtgtacctgccaaatggatccacgaggccaaagctgtgcgagcacacatggaatctgacaagcacttagaggccctttgcttatttaaggctgagcactggaaccgctgccacaagctcatcatccgacacttagcttctggtggattgctcaggtaatgacctggagcagttacacatcaaagtgacttcactgtgcagtcggatagagcagattcagtgttacagtgctaaagatcgcctggctcagtcagacatggccaaacgtgtagccaacctgctgcgcgtggtgctgagtctgcatcatcctcctgatagaacctccgactcaacaccagaccctcagcgagtccctttgcgcctcttggctccccacattggccggcttcccatgcctgaggactatgccatggacgaactgcgcagccttacccagtcctatctgcgagaactggctgttgggagcctgtgagccccaggcactttgcatcacagtcacatgcccattcacaccacacagaggttccctgccttgtttggattggcactgtttgccattctctgggttggctgtggcatctaccctccctccctgctgccagaagcagcatcctccacttgttcagggcttttcttaatactgaacgtagcataagggcttctggaacccagaagaggagacagtttaccatcctcaagatcattcagtgtttttcctttaaaaaaatggtcaataaagctcctttggcagaatcccccaaagaaccagggtattctttttccatccctagccattctggatcttgtgaccctccatgccaaccagcttccctactcctaccctggcccttttatactaggactccttaggaggagtgagacaggtgataatggatccttaacagatgaactatccacagaaggaagagggatccgtctcttaagtaattggttagttaacactgaattttggaggcaaaggagggttggcctgagttaggaaacaaaatgggatctttctgacacacttagggcagaagtgaatgcctgtcacggagggattgatcttcagggctgtttttgttcctgcctttagagttccatgaacaccatacctttgctactactatgtgcaggaacccttggtcacatgtgacatgtctgtgggaagctcccagagtttggtttggtccctggttttcagtcttgctgagactctgtctggatttgcctgcagagtttggataaaaaatggcaggttgggtaaccctccctgttcatcccatgttagctccaaagcatttcccaccctccatctaccccttccagaagcaaaaacaaaccatgactgaggcaggcatggagttgggcgttaggggcaggcagagggcctttgctacactgctgacagctatagggagccccaggtaatggcatgagatagctggtgttagggctatctcaggcaatatggccacacctgggtctttatgcatgaagataatgtaaaggtttttattaaaaaatatatatatgtataaataaatgatctagatattttcctctttttctgaagctactttcttaaaaaataaataaaatgtttatagcattcctggta

SEQ ID NO: 405559 - DNA, 7237 bp, Homo sapiens
cctccgtgacaggcattcacttctgccctaagtgtgtcagaaagatcccattttgtttcctaactcaggccaaccctcctttgcctccaaaattcagtgttaactaaccaattacttaagagacggatccctcttccttctgtggatagttcatctgttaaggatccattatcacctgtctcactcctcctaaggagtcctagtataaaagggccagggtaggagtagggaagctggttggcatggagggtcacaagatccagaatggctagggatggaaaaagaataccctggttctttgggggattctgccaaaggagctttattgaccatttttttaaaggaaaaacactgaatgatcttgaggatggtaaactgtctcctcttctgggttccagaagcccttatgctacgttcagtattaagaaaagccctgaacaagtggaggatgctgctttcatattctttcatagcagtaatacactggtgcttggtacttatgttagtgctaactccagctttgaccatagtatctgtaccagttggagggttaaatttaatagtagtcccagtaggagcagctgtaaaactacttggcccaaagagggagccagatgtgctgccaaaaggattagaggtggtatttgtggttccaaggagtcctccactgctagtactggttccaaaattgccaaagccagttggtttattttgtccaaatgttgaagttgtgccaaagccacctgtgccacccccaaagggtgttccaaatgatttgttaaacatcttcaaaatgagtctttgtttcagaaagcgcggtttcgtgggggccgcgcgctgctctgtgagcggcgggtggcagcaggggactcctgacacttccccttccccaccgaaccgcgctttctgaaacaaagactcattttgaagatgtttaacaaatcatttggaacaccctttgggggtggcacaggtggctttggcacaacttcaacatttggacagaatactggctttggcactactagtggaggggcatttggaacatctgcatttggttctagcaacaatactggaggcctctttggaaattcacagactaaaccaggaggattgtttggaaccagttcatttagccagccagctacctccacaagcactggctttgggtttggtacgtcaacaggaacagcaaataccttgtttggaactgcaagcacagggaccagtctcttctcatcccaaaacaatgcctttgcacaaaataaaccaactggctttggcaattttggaaccagtactagcagtggaggactctttggaaccacaaataccacctctaatccttttggcagcacatctggctccctctttgggccaagtagttttacagctgctcctactgggactactattaaatttaaccctccaactggtacagatactatggtcaaagctggagttagcactaacataagtaccaagcaccagtgtattactgctatgaaagaatatgaaagcaagtcactagaggaacttcgtttagaggattatcaggctaacaggaagggcccacagaaccaggtgggagcaggtaccacaactggcttgtttgggtcttctccagccacttccagcgcaacaggactcttcagctcctccaccactaattcaggctttgcatatggtcagaacaaaactgcctttggaactagtacaactggatttggaacaaatccaggtggtctctttggccaacagaatcagcagactaccagcctcttcagcaaaccatttggccaggctacaaccacccagaacactggcttttcctttggtaataccagcaccataggacagccaagcaccaacaccatgggattatttggagtaacccaagcctcacagcctggaggtctttttgggacagctacaaacaccagcactgggacagcatttggaacaggaacaggtctctttgggcagaccaatactggatttggtgctgttggttcgaccctgtttggcaataacaagcttactacatttggaagcagcacaaccagtgcaccttcatttggtacaaccagtggcgggctctttggttttggcacaaataccagtgggaatagtatttttggaagtaaaccagcacctgggactcttggaactgggcttggtgcaggatttggaacagctcttggtgctggacaggcatctttgtttgggaacaaccaacctaagattggagggcctcttggtacaggagcctttggggcccctggatttaatactacgacagccactttgggctttggagccccccaggccccagtagctttgacagatccaaatgcttctgctgcccagcaggctgttctccagcagcacatcaatagtctaacatactcaccttttggagactctcctctcttccggaatccgatgtcagaccctaagaagaaggaagagagattgaaaccaacaaatccagcagcccagaaggctcttactacacctactcattataaactgacaccccgccctgccactagagtccggccaaaggctttacaaacaacaggcacagccaagtcacatctctttgatgggctggatgacgatgaaccatccctagccaatggagcattcatgcccaagaagagcattaagaagttggttttgaagaaccttaataatagcaatctcttttctcctgttaatcgtgattcagaaaatctagcttcaccatctgaatatccagaaaatggagagagatttagtttcctaagcaaacctgttgatgagaatcaccagcaggatggagatgaagattcccttgtttcacatttttatactaaccctattgccaaacctattcctcaaaccccagaaagtgctggaaataaacacagcaacagcaacagtgtggatgataccattgttgcattaaacatgcgtgctgctttgcgaaatgggctggaaggaagcagtgaagaaacgtcttttcatgatgagtcacttcaggatgaccgagaagaaatagaaaataattcttaccatatgcacccagcaggtattattctcactaaggttggttactatactattccatctatggatgaccttgctaaaattaccaatgaaaaaggagagtgcattgtctctgatttcactattggtcggaaaggttatggttcaatctattttgaaggagatgtgaatttgacaaatctaaatttggatgatattgtgcatatccggaggaaagaagtagttgtctacttagatgataaccaaaaaccacctgtgggtgaagggctaaataggaaggctgaagttacattggatggagtttggccaacagataaaacatctcgttgtttaataaagagcccagatcgccttgctgatatcaactatgaaggaagattggaagcagtttcaaggaaacagggagctcaattcaaagaataccggcctgaaactggttcttgggtgtttaaggtctcccatttttctaagtatggccttcaggattctgatgaagaggaggaggagcatccgtctaaaactagtacaaagaagttgaagactgctcctttgcctcctgcaagccagactacgcccttgcagatggctcttaatggcaaacctgcacctccacctcagagccagagcccagaggtggagcagttagggagggttgtggaactggacagtgacatggtagatatcacccaggagccagttttggataccatgttagaagagagcatgcctgaggatcaggaacctgtgtctgcctcaacacatattgcatcttcactgggaattaatccacatgtcttacagatcatgaaagcatcattgcttactgatgaagaagatgtagatatggcactggatcaacgcttcagtcgcctgccttccaaagcagatacttctcaagaaatctgttctcccagactccccatttcagcatcccactcgtcgaaaactcgttcactagttggtgggttactacaatcaaaatttacaagtggagcttttctttcaccaagtgtctctgtgcaagaatgtcgtactcccagagcagcatctttaatgaatatcccatccacatcctcttggtctgtccctccacccctgacttctgtgttcacaatgcccagcccagcccctgaggttccgttgaaaacagtgggtacacgtaggcaactaggcctagtccctcgtgaaaagtctgtcacctatggcaagggaaaactcttgatggacatggccctattcatgggacgctcatttcgtgttggttggggccccaactggactcttgctaatagtggagaacagctgaatggctctcatgaactagaaaatcatcagattgccgattccatggagtttggattcctgcccaatccagtagctgttaaacccctaactgagtccccattcaaagttcacttagaaaaactcagtttgagacaaagaaagccagatgaagacatgaaattatatcagacacctctggagctcaaattaaaacacagcactgtccatgtggatgaactgtgtcctctcattgtccccaatctgggagttgctgtcattcatgactatgcagattgggttaaagaagcatcaggagacttaccagaagcacaaattgtgaagcactggagcctgacatggacactatgtgaagccctatggggccacctgaaggagcttgacagccagctaaatgaaccccgtgaatacattcaaattctggagcgaagaagagctttctcccgctggctatcctgtactgccacacctcagattgaagaggaagtctccttaacccaaaaaaacagccctgtggaggctgtattcagctacctcacaggcaaaaggatcagtgaggcctgctctctggcccagcagtcaggggatcatcgtcttgctcttcttttatctcagtttgtgggtagccagtcagtccgggagctgctcaccatgcagttggtggactggcatcagctccaagcagactccttcatccaggatgagagactgcgcatctttgctctgttggctggaaaaccggtgtggcagctctcagaaaagaagcaaataaacgtgtgctcccagttggattggaaacgctccctggctatccatctttggtatttgcttccaccaacagcctccatttctagggcgctcagcatgtatgaagaagcatttcagaatacctctgacagtgacagatatgcctgctccccacttccttcgtatctggagggttctggctgtgtgatagcggaggagcaaaactcacagacaccacttcgagatgtctgctttcaccttctaaaactctacagtgacagcatacgtgagaaggctgttcgagagctgcttacccggcactgccagctgttggagacccctgaatcttgggctaaagagactttccttacccagaagctccgtgtacctgccaaatggatccacgaggccaaagctgtgcgagcacacatggaatctgacaagcacttagaggccctttgcttatttaaggctgagcactggaaccgctgccacaagctcatcatccgacacttagcttctgatgccatcattaatgagaactatgactacctgaaggggttcttggaagacctggcacctccagagcgcagcagcctaattcaggattgggaaacatctgggcttgtttacctggactatattagagtcattgaaatgctccgccatatacagcagggagcatttcaatgactctaatatagtccaggtggattgctcaggtaatgacctggagcagttacacatcaaagtgacttcactgtgcagtcggatagagcagattcagtgttacagtgctaaagatcgcctggctcagtcagacatggccaaacgtgtagccaacctgctgcgcgtggtgctgagtctgcatcatcctcctgatagaacctccgactcaacaccagaccctcagcgagtccctttgcgcctcttggctccccacattggccggcttcccatgcctgaggactatgccatggacgaactgcgcagccttacccagtcctatctgcgagaactggctgttgggagcctgtgagccccaggcactttgcatcacagtcacatgcccattcacaccacacagaggttccctgccttgtttggattggcactgtttgccattctctgggttggctgtggcatctaccctccctccctgctgccagaagcagcatcctccacttgttcagggcttttcttaatactgaacgtagcataagggcttctggaacccagaagaggagacagtttaccatcctcaagatcattcagtgtttttcctttaaaaaaatggtcaataaagctcctttggcagaatcccccaaagaaccagggtattctttttccatccctagccattctggatcttgtgaccctccatgccaaccagcttccctactcctaccctggcccttttatactaggactccttaggaggagtgagacaggtgataatggatccttaacagatgaactatccacagaaggaagagggatccgtctcttaagtaattggttagttaacactgaattttggaggcaaaggagggttggcctgagttaggaaacaaaatgggatctttctgacacacttagggcagaagtgaatgcctgtcacggagggattgatcttcagggctgtttttgttcctgcctttagagttccatgaacaccatacctttgctactactatgtgcaggaacccttggtcacatgtgacatgtctgtgggaagctcccagagtttggtttggtccctggttttcagtcttgctgagactctgtctggatttgcctgcagagtttggataaaaaatggcaggttgggtaaccctccctgttcatcccatgttagctccaaagcatttcccaccctccatctaccccttccagaagcaaaaacaaaccatgactgaggcaggcatggagttgggcgttaggggcaggcagagggcctttgctacactgctgacagctatagggagccccaggtaatggcatgagatagctggtgttagggctatctcaggcaatatggccacacctgggtctttatgcatgaagataatgtaaaggtttttattaaaaaatatatatatgtataaataaatgatctagatattttcctctt

SEQ ID NO: 405560 - DNA, 2767 bp, Homo sapiens
ctattcagtctataggtaatttaggttaaactactttgcaaattttctatccaagcagaaaatggtaagtttttgatcaatattttggcactactgcagaaagcagttaacaatgttaaatcctcccttctgaaggctggaagaaatgaagataatgcccccaagtgtttgacgaagtccataaacccttagtaataaccaaaaaacttccatttctcttataggggatcatcgtcttgctcttcttttatctcagtttgtgggtagccagtcagtccgggagctgctcaccatgcagttggtggactggcatcagctccaagcagactccttcatccaggatgagagactgcgcatctttgctctgttggctggaaaaccggtgtggcagctctcagaaaagaagcaaataaacgtgtgctcccagttggattggaaacgctccctggctatccatctttggtatttgcttccaccaacagcctccatttctagggcgctcagcatgtatgaagaagcatttcagaatacctctgacagtgacagatatgcctgctccccacttccttcgtatctggagggttctggctgtgtgatagcggaggagcaaaactcacagacaccacttcgagatgtctgctttcaccttctaaaactctacagtgacagacattatgatctcaaccagctgctggagcctcgaagcataacagcagatcctttggactaccgcctaagctggcacttgtgggaagtgctgagggctcttaactacacccatctctcagcgcagtgtgaaggtgtgctacaggccagttacgctggccagcttgaaagtgaggggctctgggagtgggccatctttgtcctcctgcacattgacaactcaggcatacgtgagaaggctgttcgagagctgcttacccggcactgccagctgttggagacccctgaatcttgggctaaagagactttccttacccagaagctccgtgtacctgccaaatggatccacgaggccaaagctgtgcgagcacacatggaatctgacaagcacttagaggccctttgcttatttaaggctgagcactggaaccgctgccacaagctcatcatccgacacttagcttctgatgccatcattaatgagaactatgactacctgaaggggttcttggaagacctggcacctccagagcgcagcagcctaattcaggattgggaaacatctgggcttgtttacctggactatattagagtcattgaaatgctccgccatatacagcaggtggattgctcaggtaatgacctggagcagttacacatcaaagtgacttcactgtgcagtcggatagagcagattcagtgttacagtgctaaagatcgcctggctcagtcagacatggccaaacgtgtagccaacctgctgcgcgtggtgctgagtctgcatcatcctcctgatagaacctccgactcaacaccagaccctcagcgagtccctttgcgcctcttggctccccacattggccggcttcccatgcctgaggactatgccatggacgaactgcgcagccttacccagtcctatctgcgagaactggctgttgggagcctgtgagccccaggcactttgcatcacagtcacatgcccattcacaccacacagaggttccctgccttgtttggattggcactgtttgccattctctgggttggctgtggcatctaccctccctccctgctgccagaagcagcatcctccacttgttcagggcttttcttaatactgaacgtagcataagggcttctggaacccagaagaggagacagtttaccatcctcaagatcattcagtgtttttcctttaaaaaaatggtcaataaagctcctttggcagaatcccccaaagaaccagggtattctttttccatccctagccattctggatcttgtgaccctccatgccaaccagcttccctactcctaccctggcccttttatactaggactccttaggaggagtgagacaggtgataatggatccttaacagatgaactatccacagaaggaagagggatccgtctcttaagtaattggttagttaacactgaattttggaggcaaaggagggttggcctgagttaggaaacaaaatgggatctttctgacacacttagggcagaagtgaatgcctgtcacggagggattgatcttcagggctgtttttgttcctgcctttagagttccatgaacaccatacctttgctactactatgtgcaggaacccttggtcacatgtgacatgtctgtgggaagctcccagagtttggtttggtccctggttttcagtcttgctgagactctgtctggatttgcctgcagagtttggataaaaaatggcaggttgggtaaccctccctgttcatcccatgttagctccaaagcatttcccaccctccatctaccccttccagaagcaaaaacaaaccatgactgaggcaggcatggagttgggcgttaggggcaggcagagggcctttgctacactgctgacagctatagggagccccaggtaatggcatgagatagctggtgttagggctatctcaggcaatatggccacacctgggtctttatgcatgaagataatgtaaaggtttttattaaaaaatatatatatgtataaataaatgatctagatattttcctctttttctgaagctactttcttaaaaaataaataaaatgtttatagcattcctggta

SEQ ID NO: 405561 - DNA, 2151 bp, Homo sapiens
gagattgtcccactgcactccagcctgggtgacagagtgagactgcctctcaaaaaaaaaagaagaaacataatggcatctagtaaaactgattaggagctaatgtattgttttatcaaattattccttcagaatacctctgacagtgacagatatgcctgctccccacttccttcgtatctggagggttctggctgtgtgatagcggaggagcaaaactcacagacaccacttcgagatgtctgctttcaccttctaaaactctacagtgacagcatacgtgagaaggctgttcgagagctgcttacccggcactgccagctgttggagacccctgaatcttgggctaaagagactttccttacccagaagctccgtgtacctgccaaatggatccacgaggccaaagctgtgcgagcacacatggaatctgacaagcacttagaggccctttgcttatttaaggctgagcactggaaccgctgccacaagctcatcatccgacacttagcttctgatgccatcattaatgagaactatgactacctgaaggggttcttggaagacctggcacctccagagcgcagcagcctaattcaggattgggaaacatctgggcttgtttacctggactatattagagtcattgaaatgctccgccatatacagcaggtggattgctcaggtaatgacctggagcagttacacatcaaagtgacttcactgtgcagtcggatagagcagattcagtgttacagtgctaaagatcgcctggctcagtcagacatggccaaacgtgtagccaacctgctgcgcgtggtgctgagtctgcatcatcctcctgatagaacctccgactcaacaccagaccctcagcgagtccctttgcgcctcttggctccccacattggccggcttcccatgcctgaggactatgccatggacgaactgcgcagccttacccagtcctatctgcgagaactggctgttgggagcctgtgagccccaggcactttgcatcacagtcacatgcccattcacaccacacagaggttccctgccttgtttggattggcactgtttgccattctctgggttggctgtggcatctaccctccctccctgctgccagaagcagcatcctccacttgttcagggcttttcttaatactgaacgtagcataagggcttctggaacccagaagaggagacagtttaccatcctcaagatcattcagtgtttttcctttaaaaaaatggtcaataaagctcctttggcagaatcccccaaagaaccagggtattctttttccatccctagccattctggatcttgtgaccctccatgccaaccagcttccctactcctaccctggcccttttatactaggactccttaggaggagtgagacaggtgataatggatccttaacagatgaactatccacagaaggaagagggatccgtctcttaagtaattggttagttaacactgaattttggaggcaaaggagggttggcctgagttaggaaacaaaatgggatctttctgacacacttagggcagaagtgaatgcctgtcacggagggattgatcttcagggctgtttttgttcctgcctttagagttccatgaacaccatacctttgctactactatgtgcaggaacccttggtcacatgtgacatgtctgtgggaagctcccagagtttggtttggtccctggttttcagtcttgctgagactctgtctggatttgcctgcagagtttggataaaaaatggcaggttgggtaaccctccctgttcatcccatgttagctccaaagcatttcccaccctccatctaccccttccagaagcaaaaacaaaccatgactgaggcaggcatggagttgggcgttaggggcaggcagagggcctttgctacactgctgacagctatagggagccccaggtaatggcatgagatagctggtgttagggctatctcaggcaatatggccacacctgggtctttatgcatgaagataatgtaaaggtttttattaaaaaatatatatatgtataaataaatgatctagatattttcctctttttctgaagctactttcttaaaaaataaataaaatgtttatagcattcctggta

SEQ ID NO: 405562 - DNA, 1572 bp, Homo sapiens
gttgtttcaaggttttgtgtagagtctataggtgggattggagtgataggaactccccttggattaattggcttctctgcttctttgtaggtggtggattgctcaggtaatgacctggagcagttacacatcaaagtgacttcactgtgcagtcggatagagcagattcagtgttacagtgctaaagatcgcctggctcagtcagacatggccaaacgtgtagccaacctgctgcgcgtggtgctgagtctgcatcatcctcctgatagaacctccgactcaacaccagaccctcagcgagtccctttgcgcctcttggctccccacattggccggcttcccatgcctgaggactatgccatggacgaactgcgcagccttacccagtcctatctgcgagaactggctgttgggagcctgtgagccccaggcactttgcatcacagtcacatgcccattcacaccacacagaggttccctgccttgtttggattggcactgtttgccattctctgggttggctgtggcatctaccctccctccctgctgccagaagcagcatcctccacttgttcagggcttttcttaatactgaacgtagcataagggcttctggaacccagaagaggagacagtttaccatcctcaagatcattcagtgtttttcctttaaaaaaatggtcaataaagctcctttggcagaatcccccaaagaaccagggtattctttttccatccctagccattctggatcttgtgaccctccatgccaaccagcttccctactcctaccctggcccttttatactaggactccttaggaggagtgagacaggtgataatggatccttaacagatgaactatccacagaaggaagagggatccgtctcttaagtaattggttagttaacactgaattttggaggcaaaggagggttggcctgagttaggaaacaaaatgggatctttctgacacacttagggcagaagtgaatgcctgtcacggagggattgatcttcagggctgtttttgttcctgcctttagagttccatgaacaccatacctttgctactactatgtgcaggaacccttggtcacatgtgacatgtctgtgggaagctcccagagtttggtttggtccctggttttcagtcttgctgagactctgtctggatttgcctgcagagtttggataaaaaatggcaggttgggtaaccctccctgttcatcccatgttagctccaaagcatttcccaccctccatctaccccttccagaagcaaaaacaaaccatgactgaggcaggcatggagttgggcgttaggggcaggcagagggcctttgctacactgctgacagctatagggagccccaggtaatggcatgagatagctggtgttagggctatctcaggcaatatggccacacctgggtctttatgcatgaagataatgtaaaggtttttattaaaaaatatatatatgtataaataaatgatctagatattttcctctttttctgaagctactttcttaaaaaataaataaaatgtttatagcattcctggta

SEQ ID NO: 405563 - DNA, 1540 bp, Homo sapiens
tgctgggattacaggcgtgagccacagcgcctgtccacccttggcattttgtatacagcaggtggattgctcaggtaatgacctggagcagttacacatcaaagtgacttcactgtgcagtcggatagagcagattcagtgttacagtgctaaagatcgcctggctcagtcagacatggccaaacgtgtagccaacctgctgcgcgtggtgctgagtctgcatcatcctcctgatagaacctccgactcaacaccagaccctcagcgagtccctttgcgcctcttggctccccacattggccggcttcccatgcctgaggactatgccatggacgaactgcgcagccttacccagtcctatctgcgagaactggctgttgggagcctgtgagccccaggcactttgcatcacagtcacatgcccattcacaccacacagaggttccctgccttgtttggattggcactgtttgccattctctgggttggctgtggcatctaccctccctccctgctgccagaagcagcatcctccacttgttcagggcttttcttaatactgaacgtagcataagggcttctggaacccagaagaggagacagtttaccatcctcaagatcattcagtgtttttcctttaaaaaaatggtcaataaagctcctttggcagaatcccccaaagaaccagggtattctttttccatccctagccattctggatcttgtgaccctccatgccaaccagcttccctactcctaccctggcccttttatactaggactccttaggaggagtgagacaggtgataatggatccttaacagatgaactatccacagaaggaagagggatccgtctcttaagtaattggttagttaacactgaattttggaggcaaaggagggttggcctgagttaggaaacaaaatgggatctttctgacacacttagggcagaagtgaatgcctgtcacggagggattgatcttcagggctgtttttgttcctgcctttagagttccatgaacaccatacctttgctactactatgtgcaggaacccttggtcacatgtgacatgtctgtgggaagctcccagagtttggtttggtccctggttttcagtcttgctgagactctgtctggatttgcctgcagagtttggataaaaaatggcaggttgggtaaccctccctgttcatcccatgttagctccaaagcatttcccaccctccatctaccccttccagaagcaaaaacaaaccatgactgaggcaggcatggagttgggcgttaggggcaggcagagggcctttgctacactgctgacagctatagggagccccaggtaatggcatgagatagctggtgttagggctatctcaggcaatatggccacacctgggtctttatgcatgaagataatgtaaaggtttttattaaaaaatatatatatgtataaataaatgatctagatattttcctctttttctgaagctactttcttaaaaaataaataaaatgtttatagcattcctggta

SEQ ID NO: 405564 - DNA, 6136 bp, Homo sapiens
agcggggcgaggggcgggactccacggcctctcaccgctcctaccctgtgcctccccgaactccttctgcccctcctcttccctctcgccccttcccccttcagttcggtttcaaaagacgcgtgcccaatgaataacagggtcgacccagagtggcggcgcgtcaccaattcgcggacggcgagggcggagcgtccgcaacgagcctctgacgccgggcggcgtgtgacgcagtcgggccctctgcgcgctgcgcccgaagcggcggtcggtggcaggggtggtagcggcggcggcgacggtttcgtgggggccgcgcgctgctctgtgagcggcgggtggcagcaggggactcctgacacttccccttccccaccgaaccgcgctttctgaaacaaagactcattttgaagatgtttaacaaatcatttggaacaccctttgggggtggcacaggtggctttggcacaacttcaacatttggacagaatactggctttggcactactagtggaggggcatttggaacatctgcatttggttctagcaacaatactggaggcctctttggaaattcacagactaaaccaggaggattgtttggaaccagttcatttagccagccagctacctccacaagcactggctttgggtttggtacgtcaacaggaacagcaaataccttgtttggaactgcaagcacagggaccagtctcttctcatcccaaaacaatgcctttgcacaaaataaaccaactggctttggcaattttggaaccagtactagcagtggaggactctttggaaccacaaataccacctctaatccttttggcagcacatctggctccctctttgggccaagtagttttacagctgctcctactgggactactattaaatttaaccctccaactggtacagatactatggtcaaagctggagttagcactaacataagtaccaagcaccagtgtattactgctatgaaagaatatgaaagcaagtcactagaggaacttcgtttagaggattatcaggctaacaggaagggcccacagaaccaggtgggagcaggtaccacaactggcttgtttgggtcttctccagccacttccagcgcaacaggactcttcagctcctccaccactaattcaggctttgcatatggtcagaacaaaactgcctttggaactagtacaactggatttggaacaaatccaggtggtctctttggccaacagaatcagcagactaccagcctcttcagcaaaccatttggccaggctacaaccacccagaacactggcttttcctttggtaataccagcaccataggacagccaagcaccaacaccatgggattatttggagtaacccaagcctcacagcctggaggtctttttgggacagctacaaacaccagcactgggacagcatttggaacaggaacaggtctctttgggcagaccaatactggatttggtgctgttggttcgaccctgtttggcaataacaagcttactacatttggaagcagcacaaccagtgcaccttcatttggtacaaccagtggcgggctctttggttttggcacaaataccagtgggaatagtatttttggaagtaaaccagcacctgggactcttggaactgggcttggtgcaggatttggaacagctcttggtgctggacaggcatctttgtttgggaacaaccaacctaagattggagggcctcttggtacaggagcctttggggcccctggatttaatactacgacagccactttgggctttggagccccccaggccccagtagctttgacagatccaaatgcttctgctgcccagcaggctgttctccagcagcacatcaatagtctaacatactcaccttttggagactctcctctcttccggaatccgatgtcagaccctaagaagaaggaagagagattgaaaccaacaaatccagcagcccagaaggctcttactacacctactcattataaactgacaccccgccctgccactagagtccggccaaaggctttacaaacaacaggcacagccaagtcacatctctttgatgggctggatgacgatgaaccatccctagccaatggagcattcatgcccaagaagagcattaagaagttggttttgaagaaccttaataatagcaatctcttttctcctgttaatcgtgattcagaaaatctagcttcaccatctgaatatccagaaaatggagagagatttagtttcctaagcaaacctgttgatgagaatcaccagcaggatggagatgaagattcccttgtttcacatttttatactaaccctattgccaaacctattcctcaaaccccagaaagtgctggaaataaacacagcaacagcaacagtgtggatgataccattgttgcattaaacatgcgtgctgctttgcgaaatgggctggaaggaagcagtgaagaaacgtcttttcatgatgagtcacttcaggatgaccgagaagaaatagaaaataattcttaccatatgcacccagcaggtattattctcactaaggttggttactatactattccatctatggatgaccttgctaaaattaccaatgaaaaaggagagtgcattgtctctgatttcactattggtcggaaaggttatggttcaatctattttgaaggagatgtgaatttgacaaatctaaatttggatgatattgtgcatatccggaggaaagaagtagttgtctacttagatgataaccaaaaaccacctgtgggtgaagggctaaataggaaggctgaagttacattggatggagtttggccaacagataaaacatctcgttgtttaataaagagcccagatcgccttgctgatatcaactatgaaggaagattggaagcagtttcaaggaaacagggagctcaattcaaagaataccggcctgaaactggttcttgggtgtttaaggtctcccatttttctaagtatggccttcaggattctgatgaagaggaggaggagcatccgtctaaaactagtacaaagaagttgaagactgctcctttgcctcctgcaagccagactacgcccttgcagatggctcttaatggcaaacctgcacctccacctcagagccagagcccagaggtggagcagttagggagggttgtggaactggacagtgacatggtagatatcacccaggagccagttttggataccatgttagaagagagcatgcctgaggatcaggaacctgtgtctgcctcaacacatattgcatcttcactgggaattaatccacatgtcttacagatcatgaaagcatcattgcttactgatgaagaagatgtagatatggcactggatcaacgcttcagtcgcctgccttccaaagcagatacttctcaagaaatctgttctcccagactccccatttcagcatcccactcgtcgaaaactcgttcactagttggtgggttactacaatcaaaatttacaagtggagcttttctttcaccaagtgtctctgtgcaagaatgtcgtactcccagagcagcatctttaatgaatatcccatccacatcctcttggtctgtccctccacccctgacttctgtgttcacaatgcccagcccagcccctgaggttccgttgaaaacagtgggtacacgtaggcaactaggcctagtccctcgtgaaaagtctgtcacctatggcaagggaaaactcttgatggacatggccctattcatgggacgctcatttcgtgttggttggggccccaactggactcttgctaatagtggagaacagctgaatggctctcatgaactagaaaatcatcagattgccgattccatggagtttggattcctgcccaatccagtagctgttaaacccctaactgagtccccattcaaagttcacttagaaaaactcagtttgagacaaagaaagccagatgaagacatgaaattatatcagacacctctggagctcaaattaaaacacagcactgtccatgtggatgaactgtgtcctctcattgtccccaatctgggagttgctgtcattcatgactatgcagattgggttaaagaagcatcaggagacttaccagaagcacaaattgtgaagcactggagcctgacatggacactatgtgaagccctatggggccacctgaaggagcttgacagccagctaaatgaaccccgtgaatacattcaaattctggagcgaagaagagctttctcccgctggctatcctgtactgccacacctcagattgaagaggaagtctccttaacccaaaaaaacagccctgtggaggctgtattcagctacctcacaggcaaaaggatcagtgaggcctgctctctggcccagcagtcaggggatcatcgtcttgctcttcttttatctcagtttgtgggtagccagtcagtccgggagctgctcaccatgcagttggtggactggcatcagctccaagcagactccttcatccaggatgagagactgcgcatctttgctctgttggctggaaaaccggtgtggcagctctcagaaaagaagcaaataaacgtgtgctcccagttggattggaaacgctccctggctatccatctttggtatttgcttccaccaacagcctccatttctagggcgctcagcatgtatgaagaagcatttcagaatacctctgacagtgacagatatgcctgctccccacttccttcgtatctggagggttctggctgtgtgatagcggaggagcaaaactcacagacaccacttcgagatgtctgctttcaccttctaaaactctacagtgacagacattatgatctcaaccagctgctggagcctcgaagcataacagcagatcctttggactaccgcctaagctggcacttgtgggaagtgctgagggctcttaactacacccatctctcagcgcagtgtgaaggtgtgctacaggccagttacgctggccagcttgaaagtgaggggctctgggagtgggccatctttgtcctcctgcacattgacaactcaggcatacgtgagaaggctgttcgagagctgcttacccggcactgccagctgttggagacccctgaatcttgggctaaagagactttccttacccagaagctccgtgtacctgccaaatggatccacgaggccaaagctgtgcgagcacacatggaatctgacaagcacttagaggccctttgcttatttaaggctgagcactggaaccgctgccacaagctcatcatccgacacttagcttctgatgccatcattaatgagaactatgactacctgaaggggttcttggaagacctggcacctccagagcgcagcagcctaattcaggattgggaaacatctgggcttgtttacctggactatattagagtcattgaaatgctccgccatatacagcaggtggattgctcaggtaatgacctggagcagttacacatcaaagtgacttcactgtgcagtcggatagagcagattcagtgttacagtgctaaagatcgcctggctcagtcagacatggccaaacgtgtagccaacctgctgcgcgtggtgctgagtctgcatcatcctcctgatagaacctccgactcaacaccagaccctcagcgagtccctttgcgcctcttggctccccacattggccggcttcccatgcctgaggactatgccatggacgaactgcgcagccttacccagtcctatctgcgagaactggctgttgggagcctgtgagccccaggcactttgcatcacagtcacatgcccattcacaccacacagaggttccctgccttgtttggattggcactgtttgccattctctgggttggctgtggcatctaccctccctccctgctgccagaagcagcatcctccacttgttcagggcttttcttaatactgaacgtagcataagggcttctggaacccagaagaggagacagtttaccatcctcaagatcattcagtgtttttcctttaaaaaaatggtcaataaagctcctttgccgatgcgacaaggtttatatttctccctattactacgaccaaca

SEQ ID NO: 405565 - DNA, 4899 bp, Homo sapiens
agcggggcgaggggcgggactccacggcctctcaccgctcctaccctgtgcctccccgaactccttctgcccctcctcttccctctcgccccttcccccttcagttcggtttcaaaagacgcgtgcccaatgaataacagggtcgacccagagtggcggcgcgtcaccaattcgcggacggcgagggcggagcgtccgcaacgagcctctgacgccgggcggcgtgtgacgcagtcgggccctctgcgcgctgcgcccgaagcggcggtcggtggcaggggtggtagcggcggcggcgacggtttcgtgggggccgcgcgctgctctgtgagcggcgggtggcagcaggggactcctgacacttccccttccccaccgaaccgcgctttctgaaacaaagactcattttgaagatgtttaacaaatcatttggaacaccctttgggggtggcacaggtggctttggcacaacttcaacatttggacagaatactggctttggcactactagtggaggggcatttggaacatctgcatttggttctagcaacaatactggaggcctctttggaaattcacagactaaaccaggaggattgtttggaaccagttcatttagccagccagctacctccacaagcactggctttgggtttggtacgtcaacaggaacagcaaataccttgtttggaactgcaagcacagggaccagtctcttctcatcccaaaacaatgcctttgcacaaaataaaccaactggctttggcaattttggaaccagtactagcagtggaggactctttggaaccacaaataccacctctaatccttttggcagcacatctggctccctctttgggccaagtagttttacagctgctcctactgggactactattaaatttaaccctccaactggtacagatactatggtcaaagctggagttagcactaacataagtaccaagcaccagtgtattactgctatgaaagaatatgaaagcaagtcactagaggaacttcgtttagaggattatcaggctaacaggaagggcccacagaaccaggtgggagcaggtaccacaactggcttgtttgggtcttctccagccacttccagcgcaacaggactcttcagctcctccaccactaattcaggctttgcatatggtcagaacaaaactgcctttggaactagtacaactggatttggaacaaatccaggtggtctctttggccaacagaatcagcagactaccagcctcttcagcaaaccatttggccaggctacaaccacccagaacactggcttttcctttggtaataccagcaccataggacagccaagcaccaacaccatgggattatttggagtaacccaagcctcacagcctggaggtctttttgggacagctacaaacaccagcactgggacagcatttggaacaggaacaggtctctttgggcagaccaatactggatttggtgctgttggttcgaccctgtttggcaataacaagcttactacatttggaagcagcacaaccagtgcaccttcatttggtacaaccagtggcgggctctttggttttggcacaaataccagtgggaatagtatttttggaagtaaaccagcacctgggactcttggaactgggcttggtgcaggatttggaacagctcttggtgctggacaggcatctttgtttgggaacaaccaacctaagattggagggcctcttggtacaggagcctttggggcccctggatttaatactacgacagccactttgggctttggagccccccaggccccagtagctttgacagatccaaatgcttctgctgcccagcaggctgttctccagcagcacatcaatagtctaacatactcaccttttggagactctcctctcttccggaatccgatgtcagaccctaagaagaaggaagagagattgaaaccaacaaatccagcagcccagaaggctcttactacacctactcattataaactgacaccccgccctgccactagagtccggccaaaggctttacaaacaacaggcacagccaagtcacatctctttgatgggctggatgacgatgaaccatccctagccaatggagcattcatgcccaagaagagcattaagaagttggttttgaagaaccttaataatagcaatctcttttctcctgttaatcgtgattcagaaaatctagcttcaccatctgaatatccagaaaatggagagagatttagtttcctaagcaaacctgttgatgagaatcaccagcaggatggagatgaagattcccttgtttcacatttttatactaaccctattgccaaacctattcctcaaaccccagaaagtgctggaaataaacacagcaacagcaacagtgtggatgataccattgttgcattaaacatgcgtgctgctttgcgaaatgggctggaaggaagcagtgaagaaacgtcttttcatgatgagtcacttcaggatgaccgagaagaaatagaaaataattcttaccatatgcacccagcaggtattattctcactaaggttggttactatactattccatctatggatgaccttgctaaaattaccaatgaaaaaggagagtgcattgtctctgatttcactattggtcggaaaggttatggttcaatctattttgaaggagatgtgaatttgacaaatctaaatttggatgatattgtgcatatccggaggaaagaagtagttgtctacttagatgataaccaaaaaccacctgtgggtgaagggctaaataggaaggctgaagttacattggatggagtttggccaacagataaaacatctcgttgtttaataaagagcccagatcgccttgctgatatcaactatgaaggaagattggaagcagtttcaaggaaacagggagctcaattcaaagaataccggcctgaaactggttcttgggtgtttaaggtctcccatttttctaagtatggccttcaggattctgatgaagaggaggaggagcatccgtctaaaactagtacaaagaagttgaagactgctcctttgcctcctgcaagccagactacgcccttgcagatggctcttaatggcaaacctgcacctccacctcagagccagagcccagaggtggagcagttagggagggttgtggaactggacagtgacatggtagatatcacccaggagccagttttggataccatgttagaagagagcatgcctgaggatcaggaacctgtgtctgcctcaacacatattgcatcttcactgggaattaatccacatgtcttacagatcatgaaagcatcattgcttactgatgaagaagatgtagatatggcactggatcaacgcttcagtcgcctgccttccaaagcagatacttctcaagaaatctgttctcccagactccccatttcagcatcccactcgtcgaaaactcgttcactagttggtgggttactacaatcaaaatttacaagtggagcttttctttcaccaagtgtctctgtgcaagaatgtcgtactcccagagcagcatctttaatgaatatcccatccacatcctcttggtctgtccctccacccctgacttctgtgttcacaatgcccagcccagcccctgaggttccgttgaaaacagtgggtacacgtaggcaactaggcctagtccctcgtgaaaagtctgtcacctatggcaagggaaaactcttgatggacatggccctattcatgggacgctcatttcgtgttggttggggccccaactggactcttgctaatagtggagaacagctgaatggctctcatgaactagaaaatcatcagattgccgattccatggagtttggattcctgcccaatccagtagctgttaaacccctaactgagtccccattcaaagttcacttagaaaaactcagtttgagacaaagaaagccagatgaagacatgaaattatatcagacacctctggagctcaaattaaaacacagcactgtccatgtggatgaactgtgtcctctcattgtccccaatctgggagttgctgtcattcatgactatgcagattgggttaaagaagcatcaggagacttaccagaagcacaaattgtgaagcactggagcctgacatggacactatgtgaagccctatggggccacctgaaggagcttgacagccagctaaatgaaccccgtgaatacattcaaattctggagcgaagaagagctttctcccgctggctatcctgtactgccacacctcagattgaagaggaagtctccttaacccaaaaaaacagccctgtggaggctgtattcagctacctcacaggcaaaaggatcagtgaggcctgctctctggcccagcagtcaggggatcatcgtcttgctcttcttttatctcagtttgtgggtagccagtcagtccgggagctgctcaccatgcagttggtggactggcatcagctccaagcagactccttcatccaggatgagagactgcgcatctttgctctgttggctggaaaaccggtgtggcagctctcagaaaagaagcaaataaacgtgtgctcccagttggattggaaacgctccctggctatccatctttggtatttgcttccaccaacagcctccatttctagggcgctcagcatgtatgaagaagcatttcaggtatatgtggccaatagagccaagcaaaaatcttgctgggtgttaaagtattgtcaaattgaagcggagccaggaaatctgatgggaaactatcctttactccttcctctggacaaggctacttccccaagtgtctgtttttattttattaaatatcatgagattccacagttga

SEQ ID NO: 405566 - DNA, 3582 bp, Homo sapiens
agcggggcgaggggcgggactccacggcctctcaccgctcctaccctgtgcctccccgaactccttctgcccctcctcttccctctcgccccttcccccttcagttcggtttcaaaagacgcgtgcccaatgaataacagggtcgacccagagtggcggcgcgtcaccaattcgcggacggcgagggcggagcgtccgcaacgagcctctgacgccgggcggcgtgtgacgcagtcgggccctctgcgcgctgcgcccgaagcggcggtcggtggcaggggtggtagcggcggcggcgacggtttcgtgggggccgcgcgctgctctgtgagcggcgggtggcagcaggggactcctgacacttccccttccccaccgaaccgcgctttctgaaacaaagactcattttgaagatgtttaacaaatcatttggaacaccctttgggggtggcacaggtggctttggcacaacttcaacatttggacagaatactggctttggcactactagtggaggggcatttggaacatctgcatttggttctagcaacaatactggaggcctctttggaaattcacagactaaaccaggaggattgtttggaaccagttcatttagccagccagctacctccacaagcactggctttgggtttggtacgtcaacaggaacagcaaataccttgtttggaactgcaagcacagggaccagtctcttctcatcccaaaacaatgcctttgcacaaaataaaccaactggctttggcaattttggaaccagtactagcagtggaggactctttggaaccacaaataccacctctaatccttttggcagcacatctggctccctctttgggccaagtagttttacagctgctcctactgggactactattaaatttaaccctccaactggtacagatactatggtcaaagctggagttagcactaacataagtaccaagcaccagtgtattactgctatgaaagaatatgaaagcaagtcactagaggaacttcgtttagaggattatcaggctaacaggaagggcccacagaaccaggtgggagcaggtaccacaactggcttgtttgggtcttctccagccacttccagcgcaacaggactcttcagctcctccaccactaattcaggctttgcatatggtcagaacaaaactgcctttggaactagtacaactggatttggaacaaatccaggtggtctctttggccaacagaatcagcagactaccagcctcttcagcaaaccatttggccaggctacaaccacccagaacactggcttttcctttggtaataccagcaccataggacagccaagcaccaacaccatgggattatttggagtaacccaagcctcacagcctggaggtctttttgggacagctacaaacaccagcactgggacagcatttggaacaggaacaggtctctttgggcagaccaatactggatttggtgctgttggttcgaccctgtttggcaataacaagcttactacatttggaagcagcacaaccagtgcaccttcatttggtacaaccagtggcgggctctttggttttggcacaaataccagtgggaatagtatttttggaagtaaaccagcacctgggactcttggaactgggcttggtgcaggatttggaacagctcttggtgctggacaggcatctttgtttgggaacaaccaacctaagattggagggcctcttggtacaggagcctttggggcccctggatttaatactacgacagccactttgggctttggagccccccaggccccagtagctttgacagatccaaatgcttctgctgcccagcaggctgttctccagcagcacatcaatagtctaacatactcaccttttggagactctcctctcttccggaatccgatgtcagaccctaagaagaaggaagagagattgaaaccaacaaatccagcagcccagaaggctcttactacacctactcattataaactgacaccccgccctgccactagagtccggccaaaggctttacaaacaacaggcacagccaagtcacatctctttgatgggctggatgacgatgaaccatccctagccaatggagcattcatgcccaagaagagcattaagaagttggttttgaagaaccttaataatagcaatctcttttctcctgttaatcgtgattcagaaaatctagcttcaccatctgaatatccagaaaatggagagagatttagtttcctaagcaaacctgttgatgagaatcaccagcaggatggagatgaagattcccttgtttcacatttttatactaaccctattgccaaacctattcctcaaaccccagaaagtgctggaaataaacacagcaacagcaacagtgtggatgataccattgttgcattaaacatgcgtgctgctttgcgaaatgggctggaaggaagcagtgaagaaacgtcttttcatgatgagtcacttcaggatgaccgagaagaaatagaaaataattcttaccatatgcacccagcaggtattattctcactaaggttggttactatactattccatctatggatgaccttgctaaaattaccaatgaaaaaggagagtgcattgtctctgatttcactattggtcggaaaggttatggttcaatctattttgaaggagatgtgaatttgacaaatctaaatttggatgatattgtgcatatccggaggaaagaagtagttgtctacttagatgataaccaaaaaccacctgtgggtgaagggctaaataggaaggctgaagttacattggatggagtttggccaacagataaaacatctcgttgtttaataaagagcccagatcgccttgctgatatcaactatgaaggaagattggaagcagtttcaaggaaacagggagctcaattcaaagaataccggcctgaaactggttcttgggtgtttaaggtctcccatttttctaagtatggccttcaggattctgatgaagaggaggaggagcatccgtctaaaactagtacaaagaagttgaagactgctcctttgcctcctgcaagccagactacgcccttgcagatggctcttaatggcaaacctgcacctccacctcagagccagagcccagaggtggagcagttagggagggttgtggaactggacagtgacatggtagatatcacccaggagccagttttggataccatgttagctccaaagcatttcccaccctccatctaccccttccagaagcaaaaacaaaccatgactgaggcaggcatggagttgggcgttaggggcaggcagagggcctttgctacactgctgacagctatagggagccccaggtaatggcatgagatagctggtgttagggctatctcaggcaatatggccacacctgggtctttatgcatgaagataatgtaaaggtttttattaaaaaatatatatatgtataaataaatgatctagatattttcctctttttctgaagctactttcttaaaaaataaataaaatgtttatagcattcctggta

SEQ ID NO: 405567 - DNA, 4216 bp, Homo sapiens
agcggggcgaggggcgggactccacggcctctcaccgctcctaccctgtgcctccccgaactccttctgcccctcctcttccctctcgccccttcccccttcagttcggtttcaaaagacgcgtgcccaatgaataacagggtcgacccagagtggcggcgcgtcaccaattcgcggacggcgagggcggagcgtccgcaacgagcctctgacgccgggcggcgtgtgacgcagtcgggccctctgcgcgctgcgcccgaagcggcggtcggtggcaggggtggtagcggcggcggcgacggtttcgtgggggccgcgcgctgctctgtgagcggcgggtggcagcaggggactcctgacacttccccttccccaccgaaccgcgctttctgaaacaaagactcattttgaagatgtttaacaaatcatttggaacaccctttgggggtggcacaggtggctttggcacaacttcaacatttggacagaatactggctttggcactactagtggaggggcatttggaacatctgcatttggttctagcaacaatactggaggcctctttggaaattcacagactaaaccaggaggattgtttggaaccagttcatttagccagccagctacctccacaagcactggctttgggtttggtacgtcaacaggaacagcaaataccttgtttggaactgcaagcacagggaccagtctcttctcatcccaaaacaatgcctttgcacaaaataaaccaactggctttggcaattttggaaccagtactagcagtggaggactctttggaaccacaaataccacctctaatccttttggcagcacatctggctccctctttgggccaagtagttttacagctgctcctactgggactactattaaatttaaccctccaactggtacagatactatggtcaaagctggagttagcactaacataagtaccaagcaccagtgtattactgctatgaaagaatatgaaagcaagtcactagaggaacttcgtttagaggattatcaggctaacaggaagggcccacagaaccaggtgggagcaggtaccacaactggcttgtttgggtcttctccagccacttccagcgcaacaggactcttcagctcctccaccactaattcaggctttgcatatggtcagaacaaaactgcctttggaactagtacaactggatttggaacaaatccaggtggtctctttggccaacagaatcagcagactaccagcctcttcagcaaaccatttggccaggctacaaccacccagaacactggcttttcctttggtaataccagcaccataggacagccaagcaccaacaccatgggattatttggagtaacccaagcctcacagcctggaggtctttttgggacagctacaaacaccagcactgggacagcatttggaacaggaacaggtctctttgggcagaccaatactggatttggtgctgttggttcgaccctgtttggcaataacaagcttactacatttggaagcagcacaaccagtgcaccttcatttggtacaaccagtggcgggctctttggttttggcacaaataccagtgggaatagtatttttggaagtaaaccagcacctgggactcttggaactgggcttggtgcaggatttggaacagctcttggtgctggacaggcatctttgtttgggaacaaccaacctaagattggagggcctcttggtacaggagcctttggggcccctggatttaatactacgacagccactttgggctttggagccccccaggccccagtagctttgacagatccaaatgcttctgctgcccagcaggctgttctccagcagcacatcaatagtctaacatactcaccttttggagactctcctctcttccggaatccgatgtcagaccctaagaagaaggaagagagattgaaaccaacaaatccagcagcccagaaggctcttactacacctactcattataaactgacaccccgccctgccactagagtccggccaaaggctttacaaacaacaggcacagccaagtcacatctctttgatgggctggatgacgatgaaccatccctagccaatggagcattcatgcccaagaagagcattaagaagttggttttgaagaaccttaataatagcaatctcttttctcctgttaatcgtgattcagaaaatctagcttcaccatctgaatatccagaaaatggagagagatttagtttcctaagcaaacctgttgatgagaatcaccagcaggatggagatgaagattcccttgtttcacatttttatactaaccctattgccaaacctattcctcaaaccccagaaagtgctggaaataaacacagcaacagcaacagtgtggatgataccattgttgcattaaacatgcgtgctgctttgcgaaatgggctggaaggaagcagtgaagaaacgtcttttcatgatgagtcacttcaggatgaccgagaagaaatagaaaataattcttaccatatgcacccagcaggtattattctcactaaggttggttactatactattccatctatggatgaccttgctaaaattaccaatgaaaaaggagagtgcattgtctctgatttcactattggtcggaaaggttatggttcaatctattttgaaggagatgtgaatttgacaaatctaaatttggatgatattgtgcatatccggaggaaagaagtagttgtctacttagatgataaccaaaaaccacctgtgggtgaagggctaaataggaaggctgaagttacattggatggagtttggccaacagataaaacatctcgttgtttaataaagagcccagatcgccttgctgatatcaactatgaaggaagattggaagcagtttcaaggaaacagggagctcaattcaaagaataccggcctgaaactggttcttgggtgtttaaggtctcccatttttctaagtatggccttcaggattctgatgaagaggaggaggagcatccgtctaaaactagtacaaagaagttgaagactgctcctttgcctcctgcaagccagactacgcccttgcagatggctcttaatggcaaacctgcacctccacctcagagccagagcccagaggtggagcagttagggagggttgtggaactggacagtgacatggtagatatcacccaggagccagttttggataccatgttagaagagagcatgcctgaggatcaggaacctgtgtctgcctcaacacatattgcatcttcactgggaattaatccacatgtcttacagatcatgaaagcatcattgcttactgatgaagaagatgtagatatggcactggatcaacgcttcagtcgcctgccttccaaagcagatacttctcaagaaatctgttctcccagactccccatttcagcatcccactcgtcgaaaactcgttcactagttggtgggttactacaatcaaaatttacaagtggagcttttctttcaccaagtgtctctgtgcaagaatgtcgtactcccagagcagcatctttaatgaatatcccatccacatcctcttggtctgtccctccacccctgacttctgtgttcacaatgcccagcccagcccctgaggttccgttgaaaacagtgggtacacgtaggcaactaggcctagtccctcgtgaaaagtctgtcacctatggcaagggaaaactcttgatggacatggccctattcatgggacgctcatttcgtgttggttggggccccaactggactcttgctaatagtggagaacagctgaatggctctcatgaactagaaaatcatcagattgccgattccatggagtttggattcctgcccaatccagtagctgttaaaccgtgagtcacatttcttgatgctttttgagaaaggcaacatgataggtgaaaaaaactaatcaggaggatagggccctgctttgtcatctttctagagagagagagagagagagagagtgtgtgtgtgtgtgtgtgtgtgtgtgtgtgtgtgtctcagttttgctctgtttcccaggagaatggtgtgaacccgggaggcggagcttgcagtgagctgagatcgcgccattgcactctagcctgggcaactgaatgagactcagtctcaaaaaaaaaaaagagagaaaagaa

SEQ ID NO: 405568 - DNA, 2061 bp, Homo sapiens
agcggggcgaggggcgggactccacggcctctcaccgctcctaccctgtgcctccccgaactccttctgcccctcctcttccctctcgccccttcccccttcagttcggtttcaaaagacgcgtgcccaatgaataacagggtcgacccagagtggcggcgcgtcaccaattcgcggacggcgagggcggagcgtccgcaacgagcctctgacgccgggcggcgtgtgacgcagtcgggccctctgcgcgctgcgcccgaagcggcggtcggtggcaggggtggtagcggcggcggcgacggtttcgtgggggccgcgcgctgctctgtgagcggcgggtggcagcaggggactcctgacacttccccttccccaccgaaccgcgctttctgaaacaaagactcattttgaagatgtttaacaaatcatttggaacaccctttgggggtggcacaggtggctttggcacaacttcaacatttggacagaatactggctttggcactactagtggaggggcatttggaacatctgcatttggttctagcaacaatactggaggcctctttggaaattcacagactaaaccaggaggattgtttggaaccagttcatttagccagccagctacctccacaagcactggctttgggtttggtacgtcaacaggaacagcaaataccttgtttggaactgcaagcacagggaccagtctcttctcatcccaaaacaatgcctttgcacaaaataaaccaactggctttggcaattttggaaccagtactagcagtggaggactctttggaaccacaaataccacctctaatccttttggcagcacatctggctccctctttgggccaagtagttttacagctgctcctactgggactactattaaatttaaccctccaactggtacagatactatggtcaaagctggagttagcactaacataagtaccaagcaccagtgtattactgctatgaaagaatatgaaagcaagtcactagaggaacttcgtttagaggattatcaggctaacaggaagggcccacagaaccaggtgggagcaggtaccacaactggcttgtttgggtcttctccagccacttccagcgcaacaggactcttcagctcctccaccactaattcaggctttgcatatggtcagaacaaaactgcctttggaactagtacaactggatttggaacaaatccaggtggtctctttggccaacagaatcagcagactaccagcctcttcagcaaaccatttggccaggctacaaccacccagaacactggcttttcctttggtaataccagcaccataggacagccaagcaccaacaccatgggattatttggagtaacccaagcctcacagcctggaggtctttttgggacagctacaaacaccagcactgggacagcatttggaacaggaacaggtctctttgggcagaccaatactggatttggtgctgttggttcgaccctgtttggcaataacaagcttactacatttggaagcagcacaaccagtgcaccttcatttggtacaaccagtggcgggctctttggttttggcacaaataccagtgggaatagtatttttggaagtaaaccagcacctgggactcttggaactgggcttggtgcaggatttggaacagctcttggtgctggacaggcatctttgtttgggaacaaccaacctaagattggagggcctcttggtacaggagcctttggggcccctggatttaatactacgacagccactttgggctttggagccccccaggccccagtagttcttgatgaagcagatagaatcttggatatgggctttgctgataccatgaatgctgttattgaaaatctccccaagaaacgtcagactttacttttctcagcaacacaaactaaatctgtaaaggaccttgcacgcttgagtttgaaaaaccctgagtatgtctgggttcatgaaaaagcaaaatatagcacccctgccactttggaacagaactacatagtctgtgagctgcagcaaa

SEQ ID NO: 405569 - DNA, 2405 bp, Homo sapiens
agcggggcgaggggcgggactccacggcctctcaccgctcctaccctgtgcctccccgaactccttctgcccctcctcttccctctcgccccttcccccttcagttcggtttcaaaagacgcgtgcccaatgaataacagggtcgacccagagtggcggcgcgtcaccaattcgcggacggcgagggcggagcgtccgcaacgagcctctgacgccgggcggcgtgtgacgcagtcgggccctctgcgcgctgcgcccgaagcggcggtcggtggcaggggtggtagcggcggcggcgacggtttcgtgggggccgcgcgctgctctgtgagcggcgggtggcagcaggggactcctgacacttccccttccccaccgaaccgcgctttctgaaacaaagactcattttgaagatgtttaacaaatcatttggaacaccctttgggggtggcacaggtggctttggcacaacttcaacatttggacagaatactggctttggcactactagtggaggggcatttggaacatctgcatttggttctagcaacaatactggaggcctctttggaaattcacagactaaaccaggaggattgtttggaaccagttcatttagccagccagctacctccacaagcactggctttgggtttggtacgtcaacaggaacagcaaataccttgtttggaactgcaagcacagggaccagtctcttctcatcccaaaacaatgcctttgcacaaaataaaccaactggctttggcaattttggaaccagtactagcagtggaggactctttggaaccacaaataccacctctaatccttttggcagcacatctggctccctctttgggccaagtagttttacagctgctcctactgggactactattaaatttaaccctccaactggtacagatactatggtcaaagctggagttagcactaacataagtaccaagcaccagtgtattactgctatgaaagaatatgaaagcaagtcactagaggaacttcgtttagaggattatcaggctaacaggaagggcccacagaaccaggtgggagcaggtaccacaactggcttgtttgggtcttctccagccacttccagcgcaacaggactcttcagctcctccaccactaattcaggctttgcatatggtcagaacaaaactgcctttggaactagtacaactggatttggaacaaatccaggtggtctctttggccaacagaatcagcagactaccagcctcttcagcaaaccatttggccaggctacaaccacccagaacactggcttttcctttggtaataccagcaccataggacagccaagcaccaacaccatgggattatttggagtaacccaagcctcacagcctggaggtctttttgggacagctacaaacaccagcactgggacagcatttggaacaggaacaggtctctttgggcagaccaatactggatttggtgctgttggttcgaccctgtttggcaataacaagcttactacatttggaagcagcacaaccagtgcaccttcatttggtacaaccagtggcgggctctttggttttggcacaaataccagtgggaatagtatttttggaagtaaaccagcacctgggactcttggaactgggcttggtgcaggatttggaacaggtaagaaactgctaccatgagatctaggaagtgacacagcttgactttctagtttctggaacttgagagatctgtttgattatgttactggaattaagaagtctaccttttcgtttttccagttgcgtttataagacattcccagcagttatgctttaccaggctttaaaatattggcatgtttgtgttagaagctgtatgctcccttttctacaaaatgtcctctgatagtcctggtctttttgggatttttagtatttaatgtgagaattgtcatgaggacattaactttcagtttccccatgttacttttgtaacagggatttgagaccttaaactgttcatcaaagtaagccctaatagaaaggcagagcaataagagcacatgctgatgtaattctcctttgcaaggagaatttcatttagttccattgtcatatagaccagtgtcaccccttttccctgattcctactgttaacaactatttttcagtgcctttgaagatactgacccttctacctgcccagctgtttttaaacagctggagcgtgatgatggtcataaaatatataagtgttttagcatgtacagtaaaactaggttgtttagttaaacatagagttttgcctactttttcaattcgtttgactgcaggtgtggtcatttagttgcaaaccatttccatagtctgcttccactgtccagttaatctgttttttttttc

SEQ ID NO: 405570 - DNA, 596 bp, Homo sapiens
ggctgaggcaggagaattgtttgaatctgggaagcggaggttgcagtgagccgagattgtcccactgcactccagcctgggtgacagagtgagactgcctctcaaaaaaaaaagaagaaacataatggcatctagtaaaactgattaggagctaatgtattgttttatcaaattattccttcagaatacctctgacagtgacagatatgcctgctccccacttccttcgtatctggagggttctggctgtgtgatagcggaggagcaaaactcacagacaccacttcgagatgtctgctttcaccttctaaaactctacagtgacaggtaaatgagagccaggctttattgtcacttgagtgctccatgagccccaggggagtcctttgctgcgtcctttcccttttatatgtccccagattgctgtaagtccatataaactaccaaatataacttaaagtagttgaatggaaagagcattagaactagaattagaagtctaaaaattattttaatcaactttaatgagtatagtttacatataataaagtatgcagtgtgataagttttatagtaactatcgcattgtaactacc

SEQ ID NO: 405571 - DNA, 224 bp, Homo sapiens
gaacttcgtttagaggattatcaggctaacaggaagggcccacagaaccaggtgggagcaggtaccacaactggcttgtttgggtcttctccagccacttccagcgcaacaggactcttcagctcctccaccactaattcaggctttgcatatggtcagaacaaaactgcctttggaactagtaagcacttgatatcatgttagattatactgaggagagacag

SEQ ID NO: 405572 - DNA, 3697 bp, Homo sapiens
ggccctctgcgcgctgcgcccgaagcggcggtcggtggcaggggtggtagcggcggcggcgacggtttcgtgggggccgcgcgctgctctgtgagcggcgggtggcagcaggggactcctgacacttccccttccccaccgaaccgcgctttctgaaacaaagactcattttgaagatgtttaacaaatcatttggaacaccctttgggggtggcacaggtggctttggcacaacttcaacatttggacagaatactggctttggcactactagtggaggggcatttggaacatctgcatttggttctagcaacaatactggaggcctctttggaaattcacagactaaaccaggaggattgtttggaaccagttcatttagccagccagctacctccacaagcactggctttgggtttggtacgtcaacaggaacagcaaataccttgtttggaactgcaagcacagggaccagtctcttctcatcccaaaacaatgcctttgcacaaaataaaccaactggctttggcaattttggaaccagtactagcagtggaggactctttggaaccacaaataccacctctaatccttttggcagcacatctggctccctctttgggccaagtagttttacagctgctcctactgggactactattaaatttaaccctccaactggtacagatactatggtcaaagctggagttagcactaacataagtaccaagcaccagtgtattactgctatgaaagaatatgaaagcaagtcactagaggaacttcgtttagaggattatcaggctaacaggaagggcccacagaaccaggtgggagcaggtaccacaactggcttgtttgggtcttctccagccacttccagcgcaacaggactcttcagctcctccaccactaattcaggctttgcatatggtcagaacaaaactgcctttggaactagtacaactggatttggaacaaatccaggtggtctctttggccaacagaatcagcagactaccagcctcttcagcaaaccatttggccaggctacaaccacccagaacactggcttttcctttggtaataccagcaccataggacagccaagcaccaacaccatgggattatttggagtaacccaagcctcacagcctggaggtctttttgggacagctacaaacaccagcactgggacagcatttggaacaggaacaggtctctttgggcagaccaatactggatttggtgctgttggttcgaccctgtttggcaataacaagcttactacatttggaagcagcacaaccagtgcaccttcatttggtacaaccagtggcgggctctttggtaacaaaccaaccctgactttaggaaccaatacaaacacttctaattttggttttggcacaaataccagtgggaatagtatttttggaagtaaaccagcacctgggactcttggaactgggcttggtgcaggatttggaacagctcttggtgctggacaggcatctttgtttgggaacaaccaacctaagattggagggcctcttggtacaggagcctttggggcccctggatttaatactacgacagccactttgggctttggagccccccaggccccagtagctttgacagatccaaatgcttctgctgcccagcaggctgttctccagcagcacatcaatagtctaacatactcaccttttggagactctcctctcttccggaatccgatgtcagaccctaagaagaaggaagagagattgaaaccaacaaatccagcagcccagaaggctcttactacacctactcattataaactgacaccccgccctgccactagagtccggccaaaggctttacaaacaacaggcacagccaagtcacatctctttgatgggctggatgacgatgaaccatccctagccaatggagcattcatgcccaagaagagcattaagaagttggttttgaagaaccttaataatagcaatctcttttctcctgttaatcgtgattcagaaaatctagcttcaccatctgaatatccagaaaatggagagagatttagtttcctaagcaaacctgttgatgagaatcaccagcaggatggagatgaagattcccttgtttcacatttttatactaaccctattgccaaacctattcctcaaaccccagaaagtgctggaaataaacacagcaacagcaacagtgtggatgataccattgttgcattaaacatgcgtgctgctttgcgaaatgggctggaaggaagcagtgaagaaacgtcttttcatgatgagtcacttcaggatgaccgagaagaaatagaaaataattcttaccatatgcacccagcaggtattattctcactaaggttggttactatactattccatctatggatgaccttgctaaaattaccaatgaaaaaggagagtgcattgtctctgatttcactattggtcggaaaggttatggttcaatctattttgaaggagatgtgaatttgacaaatctaaatttggatgatattgtgcatatccggaggaaagaagtagttgtctacttagatgataaccaaaaaccacctgtgggtgaagggctaaataggaaggctgaagttacattggatggagtttggccaacagataaaacatctcgttgtttaataaagagcccagatcgccttgctgatatcaactatgaaggaagattggaagcagtttcaaggaaacagggagctcaattcaaagaataccggcctgaaactggttcttgggtgtttaaggtctcccatttttctaagtatggccttcaggattctgatgaagaggaggaggagcatccgtctaaaactagtacaaagaagttgaagactgctcctttgcctcctgcaagccagactacgcccttgcagatggctcttaatggcaaacctgcacctccacctcaggtagagaaaaaaggacagtgaatttgaatggaatccgtgataccgaagttgaaagcaagtcattcagctaatacaaagctgttttatgacccttggaactttgaagagtacaaacattggcaatcacgttgaaacaagtgcaagggagggcgtgaggtcttgcaggcatctgtctttttactggagagatttaaagaattctcttgctgtttggattattcctctacagattgtcatttttaaaccctttgttctctctcatttggacttgctgaattctctgctcagtgattaacttaagatttgctcatgtgggttcatgcacagtaaattctgcctttattgactacctgatgtgcagtttaatctttttctttacctccatggttttttaaaagttaaattagctttctgaaagggtttttaatctccatttttttaaagttgtttgcttatacttcgggtaaccttgatatttgtattttaatagtacataatctttatgaaaaatagtttgggaatgtaaatgaattattatttggcttggggagattagggcctacattgtttatcgcaattacttgtatcattgatacgggatttctttgtaaagcatcctctacctctcagctgctgaaagctagacctttggtattttccatgctataattcttatggctgctgaaatgtgtggtttttatgatttattaaataatctcttaggaggc

SEQ ID NO: 405573 - DNA, 6965 bp, Homo sapiens
agcggggcgaggggcgggactccacggcctctcaccgctcctaccctgtgcctccccgaactccttctgcccctcctcttccctctcgccccttcccccttcagttcggtttcaaaagacgcgtgcccaatgaataacagggtcgacccagagtggcggcgcgtcaccaattcgcggacggcgagggcggagcgtccgcaacgagcctctgacgccgggcggcgtgtgacgcagtcgggccctctgcgcgctgcgcccgaagcggcggtcggtggcaggggtggtagcggcggcggcgacggtttcgtgggggccgcgcgctgctctgtgagcggcgggtggcagcaggggactcctgacacttccccttccccaccgaaccgcgctttctgaaacaaagactcattttgaagatgtttaacaaatcatttggaacaccctttgggggtggcacaggtggctttggcacaacttcaacatttggacagaatactggctttggcactactagtggaggggcatttggaacatctgcatttggttctagcaacaatactggaggcctctttggaaattcacagactaaaccaggaggattgtttggaaccagttcatttagccagccagctacctccacaagcactggctttgggtttggtacgtcaacaggaacagcaaataccttgtttggaactgcaagcacagggaccagtctcttctcatcccaaaacaatgcctttgcacaaaataaaccaactggctttggcaattttggaaccagtactagcagtggaggactctttggaaccacaaataccacctctaatccttttggcagcacatctggctccctctttgggccaagtagttttacagctgctcctactgggactactattaaatttaaccctccaactggtacagatactatggtcaaagctggagttagcactaacataagtaccaagcaccagtgtattactgctatgaaagaatatgaaagcaagtcactagaggaacttcgtttagaggattatcaggctaacaggaagggcccacagaaccaggtgggagcaggtaccacaactggcttgtttgggtcttctccagccacttccagcgcaacaggactcttcagctcctccaccactaattcaggctttgcatatggtcagaacaaaactgcctttggaactagtacaactggatttggaacaaatccaggtggtctctttggccaacagaatcagcagactaccagcctcttcagcaaaccatttggccaggctacaaccacccagaacactggcttttcctttggtaataccagcaccataggacagccaagcaccaacaccatgggattatttggagtaacccaagcctcacagcctggaggtctttttgggacagctacaaacaccagcactgggacagcatttggaacaggaacaggtctctttgggcagaccaatactggatttggtgctgttggttcgaccctgtttggcaataacaagcttactacatttggaagcagcacaaccagtgcaccttcatttggtacaaccagtggcgggctctttggttttggcacaaataccagtgggaatagtatttttggaagtaaaccagcacctgggactcttggaactgggcttggtgcaggatttggaacagctcttggtgctggacaggcatctttgtttgggaacaaccaacctaagattggagggcctcttggtacaggagcctttggggcccctggatttaatactacgacagccactttgggctttggagccccccaggccccagtagctttgacagatccaaatgcttctgctgcccagcaggctgttctccagcagcacatcaatagtctaacatactcaccttttggagactctcctctcttccggaatccgatgtcagaccctaagaagaaggaagagagattgaaaccaacaaatccagcagcccagaaggctcttactacacctactcattataaactgacaccccgccctgccactagagtccggccaaaggctttacaaacaacaggcacagccaagtcacatctctttgatgggctggatgacgatgaaccatccctagccaatggagcattcatgcccaagaagagcattaagaagttggttttgaagaaccttaataatagcaatctcttttctcctgttaatcgtgattcagaaaatctagcttcaccatctgaatatccagaaaatggagagagatttagtttcctaagcaaacctgttgatgagaatcaccagcaggatggagatgaagattcccttgtttcacatttttatactaaccctattgccaaacctattcctcaaaccccagaaagtgctggaaataaacacagcaacagcaacagtgtggatgataccattgttgcattaaacatgcgtgctgctttgcgaaatgggctggaaggaagcagtgaagaaacgtcttttcatgatgagtcacttcaggatgaccgagaagaaatagaaaataattcttaccatatgcacccagcaggtattattctcactaaggttggttactatactattccatctatggatgaccttgctaaaattaccaatgaaaaaggagagtgcattgtctctgatttcactattggtcggaaaggttatggttcaatctattttgaaggagatgtgaatttgacaaatctaaatttggatgatattgtgcatatccggaggaaagaagtagttgtctacttagatgataaccaaaaaccacctgtgggtgaagggctaaataggaaggctgaagttacattggatggagtttggccaacagataaaacatctcgttgtttaataaagagcccagatcgccttgctgatatcaactatgaaggaagattggaagcagtttcaaggaaacagggagctcaattcaaagaataccggcctgaaactggttcttgggtgtttaaggtctcccatttttctaagtatggccttcaggattctgatgaagaggaggaggagcatccgtctaaaactagtacaaagaagttgaagactgctcctttgcctcctgcaagccagactacgcccttgcagatggctcttaatggcaaacctgcacctccacctcagagccagagcccagaggtggagcagttagggagggttgtggaactggacagtgacatggtagatatcacccaggagccagttttggataccatgttagaagagagcatgcctgaggatcaggaacctgtgtctgcctcaacacatattgcatcttcactgggaattaatccacatgtcttacagatcatgaaagcatcattgcttactgatgaagaagatgtagatatggcactggatcaacgcttcagtcgcctgccttccaaagcagatacttctcaagaaatctgttctcccagactccccatttcagcatcccactcgtcgaaaactcgttcactagttggtgggttactacaatcaaaatttacaagtggagcttttctttcaccaagtgtctctgtgcaagaatgtcgtactcccagagcagcatctttaatgaatatcccatccacatcctcttggtctgtccctccacccctgacttctgtgttcacaatgcccagcccagcccctgaggttccgttgaaaacagtgggtacacgtaggcaactaggcctagtccctcgtgaaaagtctgtcacctatggcaagggaaaactcttgatggacatggccctattcatgggacgctcatttcgtgttggttggggccccaactggactcttgctaatagtggagaacagctgaatggctctcatgaactagaaaatcatcagattgccgattccatggagtttggattcctgcccaatccagtagctgttaaacccctaactgagtccccattcaaagttcacttagaaaaactcagtttgagacaaagaaagccagatgaagacatgaaattatatcagacacctctggagctcaaattaaaacacagcactgtccatgtggatgaactgtgtcctctcattgtccccaatctgggagttgctgtcattcatgactatgcagattgggttaaagaagcatcaggagacttaccagaagcacaaattgtgaagcactggagcctgacatggacactatgtgaagccctatggggccacctgaaggagcttgacagccagctaaatgaaccccgtgaatacattcaaattctggagcgaagaagagctttctcccgctggctatcctgtactgccacacctcagattgaagaggaagtctccttaacccaaaaaaacagccctgtggaggctgtattcagctacctcacaggcaaaaggatcagtgaggcctgctctctggcccagcagtcaggggatcatcgtcttgctcttcttttatctcagtttgtgggtagccagtcagtccgggagctgctcaccatgcagttggtggactggcatcagctccaagcagactccttcatccaggatgagagactgcgcatctttgctctgttggctggaaaaccggtgtggcagctctcagaaaagaagcaaataaacgtgtgctcccagttggattggaaacgctccctggctatccatctttggtatttgcttccaccaacagcctccatttctagggcgctcagcatgtatgaagaagcatttcagaatacctctgacagtgacagatatgcctgctccccacttccttcgtatctggagggttctggctgtgtgatagcggaggagcaaaactcacagacaccacttcgagatgtctgctttcaccttctaaaactctacagtgacagacattatgatctcaaccagctgctggagcctcgaagcataacagcagatcctttggactaccgcctaagctggcacttgtgggaagtgctgagggctcttaactacacccatctctcagcgcagtgtgaaggtgtgctacaggccagttacgctggccagcttgaaagtgaggggctctgggagtgggccatctttgtcctcctgcacattgacaactcaggcatacgtgagaaggctgttcgagagctgcttacccggcactgccagctgttggagacccctgaatcttgggctaaagagactttccttacccagaagctccgtgtacctgccaaatggatccacgaggccaaagctgtgcgagcacacatggaatctgacaagcacttagaggccctttgcttatttaaggctgagcactggaaccgctgccacaagctcatcatccgacacttagcttctgatgccatcattaatgagaactatgactacctgaaggggttcttggaagacctggcacctccagagcgcagcagcctaattcaggattgggaaacatctgggcttgtttacctggactatattagagtcattgaaatgctccgccatatacagcaggtggattgctcaggtaatgacctggagcagttacacatcaaagtgacttcactgtgcagtcggatagagcagattcagtgttacagtgctaaagatcgcctggctcagtcagacatggccaaacgtgtagccaacctgctgcgcgtggtgctgagtctgcatcatcctcctgatagaacctccgactcaacaccagaccctcagcgagtccctttgcgcctcttggctccccacattggccggcttcccatgcctgaggactatgccatggacgaactgcgcagccttacccagtcctatctgcgagaactggctgttgggagcctgtgagccccaggcactttgcatcacagtcacatgcccattcacaccacacagaggttccctgccttgtttggattggcactgtttgccattctctgggttggctgtggcatctaccctccctccctgctgccagaagcagcatcctccacttgttcagggcttttcttaatactgaacgtagcataagggcttctggaacccagaagaggagacagtttaccatcctcaagatcattcagtgtttttcctttaaaaaaatggtcaataaagctcctttggcagaatcccccaaagaaccagggtattctttttccatccctagccattctggatcttgtgaccctccatgccaaccagcttccctactcctaccctggcccttttatactaggactccttaggaggagtgagacaggtgataatggatccttaacagatgaactatccacagaaggaagagggatccgtctcttaagtaattggttagttaacactgaattttggaggcaaaggagggttggcctgagttaggaaacaaaatgggatctttctgacacacttagggcagaagtgaatgcctgtcacggagggattgatcttcagggctgtttttgttcctgcctttagagttccatgaacaccatacctttgctactactatgtgcaggaacccttggtcacatgtgacatgtctgtgggaagctcccagagtttggtttggtccctggttttcagtcttgctgagactctgtctggatttgcctgcagagtttggataaaaaatggcaggttgggtaaccctccctgttcatcccatgttagctccaaagcatttcccaccctccatctaccccttccagaagcaaaaacaaaccatgactgaggcaggcatggagttgggcgttaggggcaggcagagggcctttgctacactgctgacagctatagggagccccaggtaatggcatgagatagctggtgttagggctatctcaggcaatatggccacacctgggtctttatgcatgaagataatgtaaaggtttttattaaaaaatatatatatgtataaataaatgatctagatattttcctctttttctgaagctactttcttaaaaaataaataaaatgtttatagcattcctggta

SEQ ID NO: 405574 - DNA, 6824 bp, Homo sapiens
agcggggcgaggggcgggactccacggcctctcaccgctcctaccctgtgcctccccgaactccttctgcccctcctcttccctctcgccccttcccccttcagttcggtttcaaaagacgcgtgcccaatgaataacagggtcgacccagagtggcggcgcgtcaccaattcgcggacggcgagggcggagcgtccgcaacgagcctctgacgccgggcggcgtgtgacgcagtcgggccctctgcgcgctgcgcccgaagcggcggtcggtggcaggggtggtagcggcggcggcgacggtttcgtgggggccgcgcgctgctctgtgagcggcgggtggcagcaggggactcctgacacttccccttccccaccgaaccgcgctttctgaaacaaagactcattttgaagatgtttaacaaatcatttggaacaccctttgggggtggcacaggtggctttggcacaacttcaacatttggacagaatactggctttggcactactagtggaggggcatttggaacatctgcatttggttctagcaacaatactggaggcctctttggaaattcacagactaaaccaggaggattgtttggaaccagttcatttagccagccagctacctccacaagcactggctttgggtttggtacgtcaacaggaacagcaaataccttgtttggaactgcaagcacagggaccagtctcttctcatcccaaaacaatgcctttgcacaaaataaaccaactggctttggcaattttggaaccagtactagcagtggaggactctttggaaccacaaataccacctctaatccttttggcagcacatctggctccctctttgggccaagtagttttacagctgctcctactgggactactattaaatttaaccctccaactggtacagatactatggtcaaagctggagttagcactaacataagtaccaagcaccagtgtattactgctatgaaagaatatgaaagcaagtcactagaggaacttcgtttagaggattatcaggctaacaggaagggcccacagaaccaggtgggagcaggtaccacaactggcttgtttgggtcttctccagccacttccagcgcaacaggactcttcagctcctccaccactaattcaggctttgcatatggtcagaacaaaactgcctttggaactagtacaactggatttggaacaaatccaggtggtctctttggccaacagaatcagcagactaccagcctcttcagcaaaccatttggccaggctacaaccacccagaacactggcttttcctttggtaataccagcaccataggacagccaagcaccaacaccatgggattatttggagtaacccaagcctcacagcctggaggtctttttgggacagctacaaacaccagcactgggacagcatttggaacaggaacaggtctctttgggcagaccaatactggatttggtgctgttggttcgaccctgtttggcaataacaagcttactacatttggaagcagcacaaccagtgcaccttcatttggtacaaccagtggcgggctctttggttttggcacaaataccagtgggaatagtatttttggaagtaaaccagcacctgggactcttggaactgggcttggtgcaggatttggaacagctttgacagatccaaatgcttctgctgcccagcaggctgttctccagcagcacatcaatagtctaacatactcaccttttggagactctcctctcttccggaatccgatgtcagaccctaagaagaaggaagagagattgaaaccaacaaatccagcagcccagaaggctcttactacacctactcattataaactgacaccccgccctgccactagagtccggccaaaggctttacaaacaacaggcacagccaagtcacatctctttgatgggctggatgacgatgaaccatccctagccaatggagcattcatgcccaagaagagcattaagaagttggttttgaagaaccttaataatagcaatctcttttctcctgttaatcgtgattcagaaaatctagcttcaccatctgaatatccagaaaatggagagagatttagtttcctaagcaaacctgttgatgagaatcaccagcaggatggagatgaagattcccttgtttcacatttttatactaaccctattgccaaacctattcctcaaaccccagaaagtgctggaaataaacacagcaacagcaacagtgtggatgataccattgttgcattaaacatgcgtgctgctttgcgaaatgggctggaaggaagcagtgaagaaacgtcttttcatgatgagtcacttcaggatgaccgagaagaaatagaaaataattcttaccatatgcacccagcaggtattattctcactaaggttggttactatactattccatctatggatgaccttgctaaaattaccaatgaaaaaggagagtgcattgtctctgatttcactattggtcggaaaggttatggttcaatctattttgaaggagatgtgaatttgacaaatctaaatttggatgatattgtgcatatccggaggaaagaagtagttgtctacttagatgataaccaaaaaccacctgtgggtgaagggctaaataggaaggctgaagttacattggatggagtttggccaacagataaaacatctcgttgtttaataaagagcccagatcgccttgctgatatcaactatgaaggaagattggaagcagtttcaaggaaacagggagctcaattcaaagaataccggcctgaaactggttcttgggtgtttaaggtctcccatttttctaagtatggccttcaggattctgatgaagaggaggaggagcatccgtctaaaactagtacaaagaagttgaagactgctcctttgcctcctgcaagccagactacgcccttgcagatggctcttaatggcaaacctgcacctccacctcagagccagagcccagaggtggagcagttagggagggttgtggaactggacagtgacatggtagatatcacccaggagccagttttggataccatgttagaagagagcatgcctgaggatcaggaacctgtgtctgcctcaacacatattgcatcttcactgggaattaatccacatgtcttacagatcatgaaagcatcattgcttactgatgaagaagatgtagatatggcactggatcaacgcttcagtcgcctgccttccaaagcagatacttctcaagaaatctgttctcccagactccccatttcagcatcccactcgtcgaaaactcgttcactagttggtgggttactacaatcaaaatttacaagtggagcttttctttcaccaagtgtctctgtgcaagaatgtcgtactcccagagcagcatctttaatgaatatcccatccacatcctcttggtctgtccctccacccctgacttctgtgttcacaatgcccagcccagcccctgaggttccgttgaaaacagtgggtacacgtaggcaactaggcctagtccctcgtgaaaagtctgtcacctatggcaagggaaaactcttgatggacatggccctattcatgggacgctcatttcgtgttggttggggccccaactggactcttgctaatagtggagaacagctgaatggctctcatgaactagaaaatcatcagattgccgattccatggagtttggattcctgcccaatccagtagctgttaaacccctaactgagtccccattcaaagttcacttagaaaaactcagtttgagacaaagaaagccagatgaagacatgaaattatatcagacacctctggagctcaaattaaaacacagcactgtccatgtggatgaactgtgtcctctcattgtccccaatctgggagttgctgtcattcatgactatgcagattgggttaaagaagcatcaggagacttaccagaagcacaaattgtgaagcactggagcctgacatggacactatgtgaagccctatggggccacctgaaggagcttgacagccagctaaatgaaccccgtgaatacattcaaattctggagcgaagaagagctttctcccgctggctatcctgtactgccacacctcagattgaagaggaagtctccttaacccaaaaaaacagccctgtggaggctgtattcagctacctcacaggcaaaaggatcagtgaggcctgctctctggcccagcagtcaggggatcatcgtcttgctcttcttttatctcagtttgtgggtagccagtcagtccgggagctgctcaccatgcagttggtggactggcatcagctccaagcagactccttcatccaggatgagagactgcgcatctttgctctgttggctggaaaaccggtgtggcagctctcagaaaagaagcaaataaacgtgtgctcccagttggattggaaacgctccctggctatccatctttggtatttgcttccaccaacagcctccatttctagggcgctcagcatgtatgaagaagcatttcagaatacctctgacagtgacagatatgcctgctccccacttccttcgtatctggagggttctggctgtgtgatagcggaggagcaaaactcacagacaccacttcgagatgtctgctttcaccttctaaaactctacagtgacagacattatgatctcaaccagctgctggagcctcgaagcataacagcagatcctttggactaccgcctaagctggcacttgtgggaagtgctgagggctcttaactacacccatctctcagcgcagtgtgaaggtgtgctacaggccagttacgctggccagcttgaaagtgaggggctctgggagtgggccatctttgtcctcctgcacattgacaactcaggcatacgtgagaaggctgttcgagagctgcttacccggcactgccagctgttggagacccctgaatcttgggctaaagagactttccttacccagaagctccgtgtacctgccaaatggatccacgaggccaaagctgtgcgagcacacatggaatctgacaagcacttagaggccctttgcttatttaaggctgagcactggaaccgctgccacaagctcatcatccgacacttagcttctgatgccatcattaatgagaactatgactacctgaaggggttcttggaagacctggcacctccagagcgcagcagcctaattcaggattgggaaacatctgggcttgtttacctggactatattagagtcattgaaatgctccgccatatacagcaggtggattgctcaggtaatgacctggagcagttacacatcaaagtgacttcactgtgcagtcggatagagcagattcagtgttacagtgctaaagatcgcctggctcagtcagacatggccaaacgtgtagccaacctgctgcgcgtggtgctgagtctgcatcatcctcctgatagaacctccgactcaacaccagaccctcagcgagtccctttgcgcctcttggctccccacattggccggcttcccatgcctgaggactatgccatggacgaactgcgcagccttacccagtcctatctgcgagaactggctgttgggagcctgtgagccccaggcactttgcatcacagtcacatgcccattcacaccacacagaggttccctgccttgtttggattggcactgtttgccattctctgggttggctgtggcatctaccctccctccctgctgccagaagcagcatcctccacttgttcagggcttttcttaatactgaacgtagcataagggcttctggaacccagaagaggagacagtttaccatcctcaagatcattcagtgtttttcctttaaaaaaatggtcaataaagctcctttggcagaatcccccaaagaaccagggtattctttttccatccctagccattctggatcttgtgaccctccatgccaaccagcttccctactcctaccctggcccttttatactaggactccttaggaggagtgagacaggtgataatggatccttaacagatgaactatccacagaaggaagagggatccgtctcttaagtaattggttagttaacactgaattttggaggcaaaggagggttggcctgagttaggaaacaaaatgggatctttctgacacacttagggcagaagtgaatgcctgtcacggagggattgatcttcagggctgtttttgttcctgcctttagagttccatgaacaccatacctttgctactactatgtgcaggaacccttggtcacatgtgacatgtctgtgggaagctcccagagtttggtttggtccctggttttcagtcttgctgagactctgtctggatttgcctgcagagtttggataaaaaatggcaggttgggtaaccctccctgttcatcccatgttagctccaaagcatttcccaccctccatctaccccttccagaagcaaaaacaaaccatgactgaggcaggcatggagttgggcgttaggggcaggcagagggcctttgctacactgctgacagctatagggagccccaggtaatggcatgagatagctggtgttagggctatctcaggcaatatggccacacctgggtctttatgcatgaagataatgtaaaggtttttattaaaaaatatatatatgtataaataaatgatctagatattttcctctttttctgaagctactttcttaaaaaataaataaaatgtttatagcattcctggta

SEQ ID NO: 405575 - DNA, 6656 bp, Homo sapiens
agcggggcgaggggcgggactccacggcctctcaccgctcctaccctgtgcctccccgaactccttctgcccctcctcttccctctcgccccttcccccttcagttcggtttcaaaagacgcgtgcccaatgaataacagggtcgacccagagtggcggcgcgtcaccaattcgcggacggcgagggcggagcgtccgcaacgagcctctgacgccgggcggcgtgtgacgcagtcgggccctctgcgcgctgcgcccgaagcggcggtcggtggcaggggtggtagcggcggcggcgacggtttcgtgggggccgcgcgctgctctgtgagcggcgggtggcagcaggggactcctgacacttccccttccccaccgaaccgcgctttctgaaacaaagactcattttgaagatgtttaacaaatcatttggaacaccctttgggggtggcacaggtggctttggcacaacttcaacatttggacagaatactggctttggcactactagtggaggggcatttggaacatctgcatttggttctagcaacaatactggaggcctctttggaaattcacagactaaaccaggaggattgtttggaaccagttcatttagccagccagctacctccacaagcactggctttgggtttggtacgtcaacaggaacagcaaataccttgtttggaactgcaagcacagggaccagtctcttctcatcccaaaacaatgcctttgcacaaaataaaccaactggctttggcaattttggaaccagtactagcagtggaggactctttggaaccacaaataccacctctaatccttttggcagcacatctggctccctctttgggccaagtagttttacagctgctcctactgggactactattaaatttaaccctccaactggtacagatactatggtcaaagctggagttagcactaacataagtaccaagcaccagtgtattactgctatgaaagaatatgaaagcaagtcactagaggaacttcgtttagaggattatcaggctaacaggaagggcccacagaaccaggtgggagcaggtaccacaactggcttgtttgggtcttctccagccacttccagcgcaacaggactcttcagctcctccaccactaattcaggctttgcatatggtcagaacaaaactgcctttggaactagtacaactggatttggaacaaatccaggtggtctctttggccaacagaatcagcagactaccagcctcttcagcaaaccatttggccaggctacaaccacccagaacactggcttttcctttggtaataccagcaccataggacagccaagcaccaacaccatgggattatttggagtaacccaagcctcacagcctggaggtctttttgggacagctacaaacaccagcactgggacagcatttggaacaggaacaggtctctttgggcagaccaatactggatttggtgctgttggttcgaccctgtttggcaataacaagcttactacatttggaagcagcacaaccagtgcaccttcatttggtacaaccagtggcgggctctttggttttggcacaaataccagtgggaatagtatttttggaagtaaaccagcacctgggactcttggaactgggcttggtgcaggatttggaacagctcttggtgctggacaggcatctttgtttgggaacaaccaacctaagattggagggcctcttggtacaggagcctttggggcccctggatttaatactacgacagccactttgggctttggagccccccaggccccagtagctttgacagatccaaatgcttctgctgcccagcaggctgttctccagcagcacatcaatagtctaacatactcaccttttggagactctcctctcttccggaatccgatgtcagaccctaagaagaaggaagagagattgaaaccaacaaatccagcagcccagaaggctcttactacacctactcattataaactgacaccccgccctgccactagagtccggccaaaggctttacaaacaacaggcacagccaagtcacatctctttgatgggctggatgacgatgaaccatccctagccaatggagcattcatgcccaagaagagcattaagaagttggttttgaagaaccttaataatagcaatctcttttctcctgttaatcgtgattcagaaaatctagcttcaccatctgaatatccagaaaatggagagagatttagtttcctaagcaaacctgttgatgagaatcaccagcaggatggagatgaagattcccttgtttcacatttttatactaaccctattgccaaacctattcctcaaaccccagaaagtgctggaaataaacacagcaacagcaacagtgtggatgataccattgttgcattaaacatgcgtgctgctttgcgaaatgggctggaaggaagcagtgaagaaacgtcttttcatgatgagtcacttcaggatgaccgagaagaaatagaaaataattcttaccatatgcacccagcaggtattattctcactaaggttggttactatactattccatctatggatgaccttgctaaaattaccaatgaaaaaggagagtgcattgtctctgatttcactattggtcggaaaggttatggttcaatctattttgaaggagatgtgaatttgacaaatctaaatttggatgatattgtgcatatccggaggaaagaagtagttgtctacttagatgataaccaaaaaccacctgtgggtgaagggctaaataggaaggctgaagttacattggatggagtttggccaacagataaaacatctcgttgtttaataaagagcccagatcgccttgctgatatcaactatgaaggaagattggaagcagtttcaaggaaacagggagctcaattcaaagaataccggcctgaaactggttcttgggtgtttaaggtctcccatttttctaagtatggccttcaggattctgatgaagaggaggaggagcatccgtctaaaactagtacaaagaagttgaagactgctcctttgcctcctgcaagccagactacgcccttgcagatggctcttaatggcaaacctgcacctccacctcagagccagagcccagaggtggagcagttagggagggttgtggaactggacagtgacatggtagatatcacccaggagccagttttggataccatgttagaagagagcatgcctgaggatcaggaacctgtgtctgcctcaacacatattgcatcttcactgggaattaatccacatgtcttacagatcatgaaagcatcattgcttactgatgaagaagatgtagatatggcactggatcaacgcttcagtcgcctgccttccaaagcagatacttctcaagaaatctgttctcccagactccccatttcagcatcccactcgtcgaaaactcgttcactagttggtgggttactacaatcaaaatttacaagtggagcttttctttcaccaagtgtctctgtgcaagaatgtcgtactcccagagcagcatctttaatgaatatcccatccacatcctcttgcctaactgagtccccattcaaagttcacttagaaaaactcagtttgagacaaagaaagccagatgaagacatgaaattatatcagacacctctggagctcaaattaaaacacagcactgtccatgtggatgaactgtgtcctctcattgtccccaatctgggagttgctgtcattcatgactatgcagattgggttaaagaagcatcaggagacttaccagaagcacaaattgtgaagcactggagcctgacatggacactatgtgaagccctatggggccacctgaaggagcttgacagccagctaaatgaaccccgtgaatacattcaaattctggagcgaagaagagctttctcccgctggctatcctgtactgccacacctcagattgaagaggaagtctccttaacccaaaaaaacagccctgtggaggctgtattcagctacctcacaggcaaaaggatcagtgaggcctgctctctggcccagcagtcaggggatcatcgtcttgctcttcttttatctcagtttgtgggtagccagtcagtccgggagctgctcaccatgcagttggtggactggcatcagctccaagcagactccttcatccaggatgagagactgcgcatctttgctctgttggctggaaaaccggtgtggcagctctcagaaaagaagcaaataaacgtgtgctcccagttggattggaaacgctccctggctatccatctttggtatttgcttccaccaacagcctccatttctagggcgctcagcatgtatgaagaagcatttcagaatacctctgacagtgacagatatgcctgctccccacttccttcgtatctggagggttctggctgtgtgatagcggaggagcaaaactcacagacaccacttcgagatgtctgctttcaccttctaaaactctacagtgacagacattatgatctcaaccagctgctggagcctcgaagcataacagcagatcctttggactaccgcctaagctggcacttgtgggaagtgctgagggctcttaactacacccatctctcagcgcagtgtgaaggtgtgctacaggccagttacgctggccagcttgaaagtgaggggctctgggagtgggccatctttgtcctcctgcacattgacaactcaggcatacgtgagaaggctgttcgagagctgcttacccggcactgccagctgttggagacccctgaatcttgggctaaagagactttccttacccagaagctccgtgtacctgccaaatggatccacgaggccaaagctgtgcgagcacacatggaatctgacaagcacttagaggccctttgcttatttaaggctgagcactggaaccgctgccacaagctcatcatccgacacttagcttctgatgccatcattaatgagaactatgactacctgaaggggttcttggaagacctggcacctccagagcgcagcagcctaattcaggattgggaaacatctgggcttgtttacctggactatattagagtcattgaaatgctccgccatatacagcaggtggattgctcaggtaatgacctggagcagttacacatcaaagtgacttcactgtgcagtcggatagagcagattcagtgttacagtgctaaagatcgcctggctcagtcagacatggccaaacgtgtagccaacctgctgcgcgtggtgctgagtctgcatcatcctcctgatagaacctccgactcaacaccagaccctcagcgagtccctttgcgcctcttggctccccacattggccggcttcccatgcctgaggactatgccatggacgaactgcgcagccttacccagtcctatctgcgagaactggctgttgggagcctgtgagccccaggcactttgcatcacagtcacatgcccattcacaccacacagaggttccctgccttgtttggattggcactgtttgccattctctgggttggctgtggcatctaccctccctccctgctgccagaagcagcatcctccacttgttcagggcttttcttaatactgaacgtagcataagggcttctggaacccagaagaggagacagtttaccatcctcaagatcattcagtgtttttcctttaaaaaaatggtcaataaagctcctttggcagaatcccccaaagaaccagggtattctttttccatccctagccattctggatcttgtgaccctccatgccaaccagcttccctactcctaccctggcccttttatactaggactccttaggaggagtgagacaggtgataatggatccttaacagatgaactatccacagaaggaagagggatccgtctcttaagtaattggttagttaacactgaattttggaggcaaaggagggttggcctgagttaggaaacaaaatgggatctttctgacacacttagggcagaagtgaatgcctgtcacggagggattgatcttcagggctgtttttgttcctgcctttagagttccatgaacaccatacctttgctactactatgtgcaggaacccttggtcacatgtgacatgtctgtgggaagctcccagagtttggtttggtccctggttttcagtcttgctgagactctgtctggatttgcctgcagagtttggataaaaaatggcaggttgggtaaccctccctgttcatcccatgttagctccaaagcatttcccaccctccatctaccccttccagaagcaaaaacaaaccatgactgaggcaggcatggagttgggcgttaggggcaggcagagggcctttgctacactgctgacagctatagggagccccaggtaatggcatgagatagctggtgttagggctatctcaggcaatatggccacacctgggtctttatgcatgaagataatgtaaaggtttttattaaaaaatatatatatgtataaataaatgatctagatattttcctctttttctgaagctactttcttaaaaaataaataaaatgtttatagcattcctggta

SEQ ID NO: 405576 - DNA, 6928 bp, Homo sapiens
agcggggcgaggggcgggactccacggcctctcaccgctcctaccctgtgcctccccgaactccttctgcccctcctcttccctctcgccccttcccccttcagttcggtttcaaaagacgcgtgcccaatgaataacagggtcgacccagagtggcggcgcgtcaccaattcgcggacggcgagggcggagcgtccgcaacgagcctctgacgccgggcggcgtgtgacgcagtcgggccctctgcgcgctgcgcccgaagcggcggtcggtggcaggggtggtagcggcggcggcgacggtttcgtgggggccgcgcgctgctctgtgagcggcgggtggcagcaggggactcctgacacttccccttccccaccgaaccgcgctttctgaaacaaagactcattttgaagatgtttaacaaatcatttggaacaccctttgggggtggcacaggtggctttggcacaacttcaacatttggacagaatactggctttggcactactagtggaggggcatttggaacatctgcatttggttctagcaacaatactggaggcctctttggaaattcacagactaaaccaggaggattgtttggaaccagttcatttagccagccagctacctccacaagcactggctttgggtttggtacgtcaacaggaacagcaaataccttgtttggaactgcaagcacagggaccagtctcttctcatcccaaaacaatgcctttgcacaaaataaaccaactggctttggcaattttggaaccagtactagcagtggaggactctttggaaccacaaataccacctctaatccttttggcagcacatctggctccctctttgggccaagtagttttacagctgctcctactgggactactattaaatttaaccctccaactggtacagatactatggtcaaagctggagttagcactaacataagtaccaagcaccagtgtattactgctatgaaagaatatgaaagcaagtcactagaggaacttcgtttagaggattatcaggctaacaggaagggcccacagaaccaggtgggagcaggtaccacaactggcttgtttgggtcttctccagccacttccagcgcaacaggactcttcagctcctccaccactaattcaggctttgcatatggtcagaacaaaactgcctttggaactagtacaactggatttggaacaaatccaggtggtctctttggccaacagaatcagcagactaccagcctcttcagcaaaccatttggccaggctacaaccacccagaacactggcttttcctttggtaataccagcaccataggacagccaagcaccaacaccatgggattatttggagtaacccaagcctcacagcctggaggtctttttgggacagctacaaacaccagcactgggacagcatttggaacaggaacaggtctctttgggcagaccaatactggatttggtgctgttggttcgaccctgtttggcaataacaagcttactacatttggaagcagcacaaccagtgcaccttcatttggtacaaccagtggcgggctctttggttttggcacaaataccagtgggaatagtatttttggaagtaaaccagcacctgggactcttggaactgggcttggtgcaggatttggaacagctcttggtgctggacaggcatctttgtttgggaacaaccaacctaagattggagggcctcttggtacaggagcctttggggcccctggatttaatactacgacagccactttgggctttggagccccccaggccccagtagctttgacagatccaaatgcttctgctgcccagcaggctgttctccagcagcacatcaatagtctaacatactcaccttttggagactctcctctcttccggaatccgatgtcagaccctaagaagaaggaagagagattgaaaccaacaaatccagcagcccagaaggctcttactacacctactcattataaactgacaccccgccctgccactagagtccggccaaaggctttacaaacaacaggcacagccaagtcacatctctttgatgggctggatgacgatgaaccatccctagccaatggagcattcatgcccaagaagagcattaagaagttggttttgaagaaccttaataatagcaatctcttttctcctgttaatcgtgattcagaaaatctagcttcaccatctgaatatccagaaaatggagagagatttagtttcctaagcaaacctgttgatgagaatcaccagcaggatggagatgaagattcccttgtttcacatttttatactaaccctattgccaaacctattcctcaaaccccagaaagtgctggaaataaacacagcaacagcaacagtgtggatgataccattgttgcattaaacatgcgtgctgctttgcgaaatgggctggaaggaagcagtgaagaaacgtcttttcatgatgagtcacttcaggatgaccgagaagaaatagaaaataattcttaccatatgcacccagcaggtattattctcactaaggttggttactatactattccatctatggatgaccttgctaaaattaccaatgaaaaaggagagtgcattgtctctgatttcactattggtcggaaaggttatggttcaatctattttgaaggagatgtgaatttgacaaatctaaatttggatgatattgtgcatatccggaggaaagaagtagttgtctacttagatgataaccaaaaaccacctgtgggtgaagggctaaataggaaggctgaagttacattggatggagtttggccaacagataaaacatctcgttgtttaataaagagcccagatcgccttgctgatatcaactatgaaggaagattggaagcagtttcaaggaaacagggagctcaattcaaagaataccggcctgaaactggttcttgggtgtttaaggtctcccatttttctaagtatggccttcaggattctgatgaagaggaggaggagcatccgtctaaaactagtacaaagaagttgaagactgctcctttgcctcctgcaagccagactacgcccttgcagatggctcttaatggcaaacctgcacctccacctcagagccagagcccagaggtggagcagttagggagggttgtggaactggacagtgacatggtagatatcacccaggagccagttttggataccatgttagaagagagcatgcctgaggatcaggaacctgtgtctgcctcaacacatattgcatcttcactgggaattaatccacatgtcttacagatcatgaaagcatcattgcttactgatgaagaagatgtagatatggcactggatcaacgcttcagtcgcctgccttccaaagcagatacttctcaagaaatctgttctcccagactccccatttcagcatcccactcgtcgaaaactcgttcactagttggtgggttactacaatcaaaatttacaagtggagcttttctttcaccaagtgtctctgtgcaagaatgtcgtactcccagagcagcatctttaatgaatatcccatccacatcctcttggtctgtccctccacccctgacttctgtgttcacaatgcccagcccagcccctgaggttccgttgaaaacagtgggtacacgtaggcaactaggcctagtccctcgtgaaaagtctgtcacctatggcaagggaaaactcttgatggacatggccctattcatgggacgctcatttcgtgttggttggggccccaactggactcttgctaatagtggagaacagctgaatggctctcatgaactagaaaatcatcagattgccgattccatggagtttggattcctgcccaatccagtagctgttaaacccctaactgagtccccattcaaagttcacttagaaaaactcagtttgagacaaagaaagccagatgaagacatgaaattatatcagacacctctggagctcaaattaaaacacagcactgtccatgtggatgaactgtgtcctctcattgtccccaatctgggagttgctgtcattcatgactatgcagattgggttaaagaagcatcaggagacttaccagaagcacaaattgtgaagcactggagcctgacatggacactatgtgaagccctatggggccacctgaaggagcttgacagccagctaaatgaaccccgtgaatacattcaaattctggagcgaagaagagctttctcccgctggctatcctgtactgccacacctcagattgaagaggaagtctccttaacccaaaaaaacagccctgtggaggctgtattcagctacctcacaggcaaaaggatcagtgaggcctgctctctggcccagcagtcaggggatcatcgtcttgctcttcttttatctcagtttgtgggtagccagtcagtccgggagctgctcaccatgcagttggtggactggcatcagctccaagcagactccttcatccaggatgagagactgcgcatctttgctctgttggctggaaaaccggtgtggcagctctcagaaaagaagcaaataaacgtgtgctcccagttggattggaaacgctccctggctatccatctttggtatttgcttccaccaacagcctccatttctagggcgctcagcatgtatgaagaagcatttcagaatacctctgacagtgacagatatgcctgctccccacttccttcgtatctggagggttctggctgtgtgatagcggaggagcaaaactcacagacaccacttcgagatgtctgctttcaccttctaaaactctacagtgacagacattatgatctcaaccagctgctggagcctcgaagcataacagcagatcctttggactaccgcctaagctggcacttgtgggaagtgctgagggctcttaactacacccatctctcagcgcagtgtgaaggtgtgctacaggccagttacgctggccagcttgaaagtgaggggctctgggagtgggccatctttgtcctcctgcacattgacaactcaggcatacgtgagaaggctgttcgagagctgcttacccggcactgccagctgttggagacccctgaatcttgggctaaagagactttccttacccagaagctccgtgtacctgccaaatggatccacgaggccaaagctgtgcgagcacacatggaatctgacaagcacttagaggccctttgcttatttaaggctgagcactggaaccgctgccacaagctcatcatccgacacttagcttctgatgccatcattaatgagaactatgactacctgaaggggttcttggaagacctggcacctccagagcgcagcagcctaattcaggattgggaaacatctgggcttgtttacctggactatattagagtcattgaaatgctccgccatatacagcaggtggattgctcaggtaatgacctggagcagttacacatcaaagtgacttcactgtgcagtcggatagagcagattcagtgttacagtgctaaagatcgcctggctcagtcagacatggccaaacgtgtagccaacctgctgcgcgtggtgctgagtctgcatcatcctcctgatagaacctccgactcaacaccagaccctcagcgagtccctttgcgcctcttggctccccacattggccggcttcccatgcctgaggactatgccatggacgaactgcgcagccttacccagtcctatctgcgagaactggctgttgggagcctgtgagccccaggcactttgcatcacagtcacatgcccattcacaccacacagaggttccctgccttgtttggattggcactgtttgccattctctgggttggctgtggcatctaccctccctccctgctgccagaagcagcatcctccacttgttcagggcttttcttaatactgaacgtagcataagggcttctggaacccagaagaggagacagtttaccatcctcaagatcattcagtgtttttcctttaaaaaaatggtcaataaagctcctttggcagaatcccccaaagaaccagggtattctttttccatccctagccattctggatcttgtgaccctccatgccaaccagcttccctactcctaccctggcccttttatactaggactccttaggaggagtgagacaggtgataatggatccgtctcttaagtaattggttagttaacactgaattttggaggcaaaggagggttggcctgagttaggaaacaaaatgggatctttctgacacacttagggcagaagtgaatgcctgtcacggagggattgatcttcagggctgtttttgttcctgcctttagagttccatgaacaccatacctttgctactactatgtgcaggaacccttggtcacatgtgacatgtctgtgggaagctcccagagtttggtttggtccctggttttcagtcttgctgagactctgtctggatttgcctgcagagtttggataaaaaatggcaggttgggtaaccctccctgttcatcccatgttagctccaaagcatttcccaccctccatctaccccttccagaagcaaaaacaaaccatgactgaggcaggcatggagttgggcgttaggggcaggcagagggcctttgctacactgctgacagctatagggagccccaggtaatggcatgagatagctggtgttagggctatctcaggcaatatggccacacctgggtctttatgcatgaagataatgtaaaggtttttattaaaaaatatatatatgtataaataaatgatctagatattttcctctttttctgaagctactttcttaaaaaataaataaaatgtttatagcattcctggta

SEQ ID NO: 405577 - DNA, 3292 bp, Homo sapiens
ctagaggatcccccaaagatgccatcgactggatttattttgaagagttttgccacttttgggattataaggaacaaatcacaggaaaagccagaatcagtaagctatataaagggcttgttgcattccactgtcactacacatttagcctggtagcttcctgttttcttttctttttattttttaaatagagatggggtctgtatgttgaccaggctggtctcaaactcctggcgtcaagcagccctcctgcctcagcctcccaaagtgctgggattagaggcgtgagccaccacatccagcctccgtctggtactatttatggtctttgtgcatttgtacagtgagaatttatctttgggattgatcttgtatgaacttattatgaatcattaaaaaaaggttatgctcaccaggacaccaacatgtagtaggagaggatcttaaggcatgccagagtcagattcttagggctgttgattcataaactccactttcttcctgtttattttgactgtaaggctaaacctctggtaaaggtactgccttttaggttactaaaagcttttgctttactactccccccctttttttttgttttttgttttgtttttgtttttgttttcgagacagtctcgctctgtaccccaggatggagtgcagtggcataatcttggctcactacaacgtttgcctcctgggttcaagcgattctcctgcctcagcctcctgagtagctgggattacaggggatcatcgtcttgctcttcttttatctcagtttgtgggtagccagtcagtccgggagctgctcaccatgcagttggtggactggcatcagctccaagcagactccttcatccaggatgagagactgcgcatctttgctctgttggctggaaaaccggtgtggcagctctcagaaaagaagcaaataaacgtgtgctcccagttggattggaaacgctccctggctatccatctttggtatttgcttccaccaacagcctccatttctagggcgctcagcatgtatgaagaagcatttcagaatacctctgacagtgacagatatgcctgctccccacttccttcgtatctggagggttctggctgtgtgatagcggaggagcaaaactcacagacaccacttcgagatgtctgctttcaccttctaaaactctacagtgacagacattatgatctcaaccagctgctggagcctcgaagcataacagcagatcctttggactaccgcctaagctggcacttgtgggaagtgctgagggctcttaactacacccatctctcagcgcagtgtgaaggtgtgctacaggccagttacgctggccagcttgaaagtgaggggctctgggagtgggccatctttgtcctcctgcacattgacaactcaggcatacgtgagaaggctgttcgagagctgcttacccggcactgccagctgttggagacccctgaatcttgggctaaagagactttccttacccagaagctccgtgtacctgccaaatggatccacgaggccaaagctgtgcgagcacacatggaatctgacaagcacttagaggccctttgcttatttaaggctgagcactggaaccgctgccacaagctcatcatccgacacttagcttctgatgccatcattaatgagaactatgactacctgaaggggttcttggaagacctggcacctccagagcgcagcagcctaattcaggattgggaaacatctgggcttgtttacctggactatattagagtcattgaaatgctccgccatatacagcaggtggattgctcaggtaatgacctggagcagttacacatcaaagtgacttcactgtgcagtcggatagagcagattcagtgttacagtgctaaagatcgcctggctcagtcagacatggccaaacgtgtagccaacctgctgcgcgtggtgctgagtctgcatcatcctcctgatagaacctccgactcaacaccagaccctcagcgagtccctttgcgcctcttggctccccacattggccggcttcccatgcctgaggactatgccatggacgaactgcgcagccttacccagtcctatctgcgagaactggctgttgggagcctgtgagccccaggcactttgcatcacagtcacatgcccattcacaccacacagaggttccctgccttgtttggattggcactgtttgccattctctgggttggctgtggcatctaccctccctccctgctgccagaagcagcatcctccacttgttcagggcttttcttaatactgaacgtagcataagggcttctggaacccagaagaggagacagtttaccatcctcaagatcattcagtgtttttcctttaaaaaaatggtcaataaagctcctttggcagaatcccccaaagaaccagggtattctttttccatccctagccattctggatcttgtgaccctccatgccaaccagcttccctactcctaccctggcccttttatactaggactccttaggaggagtgagacaggtgataatggatccttaacagatgaactatccacagaaggaagagggatccgtctcttaagtaattggttagttaacactgaattttggaggcaaaggagggttggcctgagttaggaaacaaaatgggatctttctgacacacttagggcagaagtgaatgcctgtcacggagggattgatcttcagggctgtttttgttcctgcctttagagttccatgaacaccatacctttgctactactatgtgcaggaacccttggtcacatgtgacatgtctgtgggaagctcccagagtttggtttggtccctggttttcagtcttgctgagactctgtctggatttgcctgcagagtttggataaaaaatggcaggttgggtaaccctccctgttcatcccatgttagctccaaagcatttcccaccctccatctaccccttccagaagcaaaaacaaaccatgactgaggcaggcatggagttgggcgttaggggcaggcagagggcctttgctacactgctgacagctatagggagccccaggtaatggcatgagatagctggtgttagggctatctcaggcaatatggccacacctgggtctttatgcatgaagataatgtaaaggtttttattaaaaaatatatatatgtataaataaatgatctagatattttcctctttttctgaagctactttcttaaaaaataaataaaatgtttatagcattcctggta

SEQ ID NO: 405578 - DNA, 5782 bp, Homo sapiens
agcggggcgaggggcgggactccacggcctctcaccgctcctaccctgtgcctccccgaactccttctgcccctcctcttccctctcgccccttcccccttcagttcggtttcaaaagacgcgtgcccaatgaataacagggtcgacccagagtggcggcgcgtcaccaattcgcggacggcgagggcggagcgtccgcaacgagcctctgacgccgggcggcgtgtgacgcagtcgggccctctgcgcgctgcgcccgaagcggcggtcggtggcaggggtggtagcggcggcggcgacggtttcgtgggggccgcgcgctgctctgtgagcggcgggtggcagcaggggactcctgacacttccccttccccaccgaaccgcgctttctgaaacaaagactcattttgaagatgtttaacaaatcatttggaacaccctttgggggtggcacaggtggctttggcacaacttcaacatttggacagaatactggctttggcactactagtggaggggcatttggaacatctgcatttggttctagcaacaatactggaggcctctttggaaattcacagactaaaccaggaggattgtttggaaccagttcatttagccagccagctacctccacaagcactggctttgggtttggtacgtcaacaggaacagcaaataccttgtttggaactgcaagcacagggaccagtctcttctcatcccaaaacaatgcctttgcacaaaataaaccaactggctttggcaattttggaaccagtactagcagtggaggactctttggaaccacaaataccacctctaatccttttggcagcacatctggctccctctttgggccaagtagttttacagctgctcctactgggactactattaaatttaaccctccaactggtacagatactatggtcaaagctggagttagcactaacataagtaccaagcaccagtgtattactgctatgaaagaatatgaaagcaagtcactagaggaacttcgtttagaggattatcaggctaacaggaagggcccacagaaccaggtgggagcaggtaccacaactggcttgtttgggtcttctccagccacttccagcgcaacaggactcttcagctcctccaccactaattcaggctttgcatatggtcagaacaaaactgcctttggaactagtacaactggatttggaacaaatccaggtggtctctttggccaacagaatcagcagactaccagcctcttcagcaaaccatttggccaggctacaaccacccagaacactggcttttcctttggtaataccagcaccataggacagccaagcaccaacaccatgggattatttggagtaacccaagcctcacagcctggaggtctttttgggacagctacaaacaccagcactgggacagcatttggaacaggaacaggtctctttgggcagaccaatactggatttggtgctgttggttcgaccctgtttggcaataacaagcttactacatttggaagcagcacaaccagtgcaccttcatttggtacaaccagtggcgggctctttggttttggcacaaataccagtgggaatagtatttttggaagtaaaccagcacctgggactcttggaactgggcttggtgcaggatttggaacagctcttggtgctggacaggcatctttgtttgggaacaaccaacctaagattggagggcctcttggtacaggagcctttggggcccctggatttaatactacgacagccactttgggctttggagccccccaggccccagtagctttgacagatccaaatgcttctgctgcccagcaggctgttctccagcagcacatcaatagtctaacatactcaccttttggagactctcctctcttccggaatccgatgtcagaccctaagaagaaggaagagagattgaaaccaacaaatccagcagcccagaaggctcttactacacctactcattataaactgacaccccgccctgccactagagtccggccaaaggctttacaaacaacaggcacagccaagtcacatctctttgatgggctggatgacgatgaaccatccctagccaatggagcattcatgcccaagaagagcattaagaagttggttttgaagaaccttaataatagcaatctcttttctcctgttaatcgtgattcagaaaatctagcttcaccatctgaatatccagaaaatggagagagatttagtttcctaagcaaacctgttgatgagaatcaccagcaggatggagatgaagattcccttgtttcacatttttatactaaccctattgccaaacctattcctcaaaccccagaaagtgctggaaataaacacagcaacagcaacagtgtggatgataccattgttgcattaaacatgcgtgctgctttgcgaaatgggctggaaggaagcagtgaagaaacgtcttttcatgatgagtcacttcaggatgaccgagaagaaatagaaaataattcttaccatatgcacccagcaggtattattctcactaaggttggttactatactattccatctatggatgaccttgctaaaattaccaatgaaaaaggagagtgcattgtctctgatttcactattggtcggaaaggttatggttcaatctattttgaaggagatgtgaatttgacaaatctaaatttggatgatattgtgcatatccggaggaaagaagtagttgtctacttagatgataaccaaaaaccacctgtgggtgaagggctaaataggaaggctgaagttacattggatggagtttggccaacagataaaacatctcgttgtttaataaagagcccagatcgccttgctgatatcaactatgaaggaagattggaagcagtttcaaggaaacagggagctcaattcaaagaataccggcctgaaactggttcttgggtgtttaaggtctcccatttttctaagtatggccttcaggattctgatgaagaggaggaggagcatccgtctaaaactagtacaaagaagttgaagactgctcctttgcctcctgcaagccagactacgcccttgcagatggctcttaatggcaaacctgcacctccacctcagagccagagcccagaggtggagcagttagggagggttgtggaactggacagtgacatggtagatatcacccaggagccagttttggataccatgttagaagagagcatgcctgaggatcaggaacctgtgtctgcctcaacacatattgcatcttcactgggaattaatccacatgtcttacagatcatgaaagcatcattgcttactgatgaagaagatgtagatatggcactggatcaacgcttcagtcgcctgccttccaaagcagatacttctcaagaaatctgttctcccagactccccatttcagcatcccactcgtcgaaaactcgttcactagttggtgggttactacaatcaaaatttacaagtggagcttttctttcaccaagtgtctctgtgcaagaatgtcgtactcccagagcagcatctttaatgaatatcccatccacatcctcttgcctaactgagtccccattcaaagttcacttagaaaaactcagtttgagacaaagaaagccagatgaagacatgaaattatatcagacacctctggagctcaaattaaaacacagcactgtccatgtggatgaactgtgtcctctcattgtccccaatctgggagttgctgtcattcatgactatgcagattgggttaaagaagcatcaggagacttaccagaagcacaaattgtgaagcactggagcctgacatggacactatgtgaagccctatggggccacctgaaggagcttgacagccagctaaatgaaccccgtgaatacattcaaattctggagcgaagaagagctttctcccgctggctatcctgtactgccacacctcagattgaagaggaagtctccttaacccaaaaaaacagccctgtggaggctgtattcagctacctcacaggcaaaaggatcagtgaggcctgctctctggcccagcagtcaggggatcatcgtcttgctcttcttttatctcagtttgtgggtagccagtcagtccgggagctgctcaccatgcagttggtggactggcatcagctccaagcagactccttcatccaggatgagagactgcgcatctttgctctgttggctggaaaaccggtgtggcagctctcagaaaagaagcaaataaacgtgtgctcccagttggattggaaacgctccctggctatccatctttggtatttgcttccaccaacagcctccatttctagggcgctcagcatgtatgaagaagcatttcagaatacctctgacagtgacagatatgcctgctccccacttccttcgtatctggagggttctggctgtgtgatagcggaggagcaaaactcacagacaccacttcgagatgtctgctttcaccttctaaaactctacagtgacagacattatgatctcaaccagctgctggagcctcgaagcataacagcagatcctttggactaccgcctaagctggcacttgtgggaagtgctgagggctcttaactacacccatctctcagcgcagtgtgaaggtgtgctacaggccagttacgctggccagcttgaaagtgaggggctctgggagtgggccatctttgtcctcctgcacattgacaactcaggcatacgtgagaaggctgttcgagagctgcttacccggcactgccagctgttggagacccctgaatcttgggctaaagagactttccttacccagaagctccgtgtacctgccaaatggatccacgaggccaaagctgtgcgagcacacatggaatctgacaagcacttagaggccctttgcttatttaaggctgagcactggaaccgctgccacaagctcatcatccgacacttagcttctgatgccatcattaatgagaactatgactacctgaaggggttcttggaagacctggcacctccagagcgcagcagcctaattcaggattgggaaacatctgggcttgtttacctggactatattagagtcattgaaatgctccgccatatacagcaggtggattgctcaggtaatgacctggagcagttacacatcaaagtgacttcactgtgcagtcggatagagcagattcagtgttacagtgctaaagatcgcctggctcagtcagacatggccaaacgtgtagccaacctgctgcgcgtggtgctgagtctgcatcatcctcctgatagaacctccgactcaacaccagaccctcagcgagtccctttgcgcctcttggctccccacattggccggcttcccatgcctgaggactatgccatggacgaactgcgcagccttacccagtcctatctgcgagaactggctgttgggagcctgtgagccccaggcactttgcatcacagtcacatgcccattcacaccacacagaggttccctgccttgtttggattggcactgtttgccattctctgggttggctgtggcatctaccctccctccctgctgccagaagcagcatcctccacttgttcagggcttttcttaatactgaacgtagcataagggcttctggaacccagaagaggagacagtttaccatcctcaagatcattcagtgtttttcctttaaaaaaatggtcaataaagctcctttg

SEQ ID NO: 405579 - DNA, 6113 bp, Homo sapiens
agcggggcgaggggcgggactccacggcctctcaccgctcctaccctgtgcctccccgaactccttctgcccctcctcttccctctcgccccttcccccttcagttcggtttcaaaagacgcgtgcccaatgaataacagggtcgacccagagtggcggcgcgtcaccaattcgcggacggcgagggcggagcgtccgcaacgagcctctgacgccgggcggcgtgtgacgcagtcgggccctctgcgcgctgcgcccgaagcggcggtcggtggcaggggtggtagcggcggcggcgacggtttcgtgggggccgcgcgctgctctgtgagcggcgggtggcagcaggggactcctgacacttccccttccccaccgaaccgcgctttctgaaacaaagactcattttgaagatgtttaacaaatcatttggaacaccctttgggggtggcacaggtggctttggcacaacttcaacatttggacagaatactggctttggcactactagtggaggggcatttggaacatctgcatttggttctagcaacaatactggaggcctctttggaaattcacagactaaaccaggaggattgtttggaaccagttcatttagccagccagctacctccacaagcactggctttgggtttggtacgtcaacaggaacagcaaataccttgtttggaactgcaagcacagggaccagtctcttctcatcccaaaacaatgcctttgcacaaaataaaccaactggctttggcaattttggaaccagtactagcagtggaggactctttggaaccacaaataccacctctaatccttttggcagcacatctggctccctctttgggccaagtagttttacagctgctcctactgggactactattaaatttaaccctccaactggtacagatactatggtcaaagctggagttagcactaacataagtaccaagcaccagtgtattactgctatgaaagaatatgaaagcaagtcactagaggaacttcgtttagaggattatcaggctaacaggaagggcccacagaaccaggtgggagcaggtaccacaactggcttgtttgggtcttctccagccacttccagcgcaacaggactcttcagctcctccaccactaattcaggctttgcatatggtcagaacaaaactgcctttggaactagtacaactggatttggaacaaatccaggtggtctctttggccaacagaatcagcagactaccagcctcttcagcaaaccatttggccaggctacaaccacccagaacactggcttttcctttggtaataccagcaccataggacagccaagcaccaacaccatgggattatttggagtaacccaagcctcacagcctggaggtctttttgggacagctacaaacaccagcactgggacagcatttggaacaggaacaggtctctttgggcagaccaatactggatttggtgctgttggttcgaccctgtttggcaataacaagcttactacatttggaagcagcacaaccagtgcaccttcatttggtacaaccagtggcgggctctttggttttggcacaaataccagtgggaatagtatttttggaagtaaaccagcacctgggactcttggaactgggcttggtgcaggatttggaacagctcttggtgctggacaggcatctttgtttgggaacaaccaacctaagattggagggcctcttggtacaggagcctttggggcccctggatttaatactacgacagccactttgggctttggagccccccaggccccagtagctttgacagatccaaatgcttctgctgcccagcaggctgttctccagcagcacatcaatagtctaacatactcaccttttggagactctcctctcttccggaatccgatgtcagaccctaagaagaaggaagagagattgaaaccaacaaatccagcagcccagaaggctcttactacacctactcattataaactgacaccccgccctgccactagagtccggccaaaggctttacaaacaacaggcacagccaagtcacatctctttgatgggctggatgacgatgaaccatccctagccaatggagcattcatgcccaagaagagcattaagaagttggttttgaagaaccttaataatagcaatctcttttctcctgttaatcgtgattcagaaaatctagcttcaccatctgaatatccagaaaatggagagagatttagtttcctaagcaaacctgttgatgagaatcaccagcaggatggagatgaagattcccttgtttcacatttttatactaaccctattgccaaacctattcctcaaaccccagaaagtgctggaaataaacacagcaacagcaacagtgtggatgataccattgttgcattaaacatgcgtgctgctttgcgaaatgggctggaaggaagcagtgaagaaacgtcttttcatgatgagtcacttcaggatgaccgagaagaaatagaaaataattcttaccatatgcacccagcaggtattattctcactaaggttggttactatactattccatctatggatgaccttgctaaaattaccaatgaaaaaggagagtgcattgtctctgatttcactattggtcggaaaggttatggttcaatctattttgaaggagatgtgaatttgacaaatctaaatttggatgatattgtgcatatccggaggaaagaagtagttgtctacttagatgataaccaaaaaccacctgtgggtgaagggctaaataggaaggctgaagttacattggatggagtttggccaacagataaaacatctcgttgtttaataaagagcccagatcgccttgctgatatcaactatgaaggaagattggaagcagtttcaaggaaacagggagctcaattcaaagaataccggcctgaaactggttcttgggtgtttaaggtctcccatttttctaagtatggccttcaggattctgatgaagaggaggaggagcatccgtctaaaactagtacaaagaagttgaagactgctcctttgcctcctgcaagccagactacgcccttgcagatggctcttaatggcaaacctgcacctccacctcagagccagagcccagaggtggagcagttagggagggttgtggaactggacagtgacatggtagatatcacccaggagccagttttggataccatgttagaagagagcatgcctgaggatcaggaacctgtgtctgcctcaacacatattgcatcttcactgggaattaatccacatgtcttacagatcatgaaagcatcattgcttactgatgaagaagatgtagatatggcactggatcaacgcttcagtcgcctgccttccaaagcagatacttctcaagaaatctgttctcccagactccccatttcagcatcccactcgtcgaaaactcgttcactagttggtgggttactacaatcaaaatttacaagtggagcttttctttcaccaagtgtctctgtgcaagaatgtcgtactcccagagcagcatctttaatgaatatcccatccacatcctcttggtctgtccctccacccctgacttctgtgttcacaatgcccagcccagcccctgaggttccgttgaaaacagtgggtacacgtaggcaactaggcctagtccctcgtgaaaagtctgtcacctatggcaagggaaaactcttgatggacatggccctattcatgggacgctcatttcgtgttggttggggccccaactggactcttgctaatagtggagaacagctgaatggctctcatgaactagaaaatcatcagattgccgattccatggagtttggattcctgcccaatccagtagctgttaaacccctaactgagtccccattcaaagttcacttagaaaaactcagtttgagacaaagaaagccagatgaagacatgaaattatatcagacacctctggagctcaaattaaaacacagcactgtccatgtggatgaactgtgtcctctcattgtccccaatctgggagttgctgtcattcatgactatgcagattgggttaaagaagcatcaggagacttaccagaagcacaaattgtgaagcactggagcctgacatggacactatgtgaagccctatggggccacctgaaggagcttgacagccagctaaatgaaccccgtgaatacattcaaattctggagcgaagaagagctttctcccgctggctatcctgtactgccacacctcagattgaagaggaagtctccttaacccaaaaaaacagccctgtggaggctgtattcagctacctcacaggcaaaaggatcagtgaggcctgctctctggcccagcagtcaggggatcatcgtcttgctcttcttttatctcagtttgtgggtagccagtcagtccgggagctgctcaccatgcagttggtggactggcatcagctccaagcagactccttcatccaggatgagagactgcgcatctttgctctgttggctggaaaaccggtgtggcagctctcagaaaagaagcaaataaacgtgtgctcccagttggattggaaacgctccctggctatccatctttggtatttgcttccaccaacagcctccatttctagggcgctcagcatgtatgaagaagcatttcagaatacctctgacagtgacagatatgcctgctccccacttccttcgtatctggagggttctggctgtgtgatagcggaggagcaaaactcacagacaccacttcgagatgtctgctttcaccttctaaaactctacagtgacagacattatgatctcaaccagctgctggagcctcgaagcataacagcagatcctttggactaccgcctaagctggcacttgtgggaagtgctgagggctcttaactacacccatctctcagcgcagtgtgaaggtgtgctacaggccagttacgctggccagcttgaaagtgaggggctctgggagtgggccatctttgtcctcctgcacattgacaactcaggcatacgtgagaaggctgttcgagagctgcttacccggcactgccagctgttggagacccctgaatcttgggctaaagagactttccttacccagaagctccgtgtacctgccaaatggatccacgaggccaaagctgtgcgagcacacatggaatctgacaagcacttagaggccctttgcttatttaaggctgagcactggaaccgctgccacaagctcatcatccgacacttagcttctgatgccatcattaatgagaactatgactacctgaaggggttcttggaagacctggcacctccagagcgcagcagcctaattcaggattgggaaacatctgggcttgtttacctggactatattagagtcattgaaatgctccgccatatacagcaggtggattgctcaggtaatgacctggagcagttacacatcaaagtgacttcactgtgcagtcggatagagcagattcagtgttacagtgctaaagatcgcctggctcagtcagacatggccaaacgtgtagccaacctgctgcgcgtggtgctgagtctgcatcatcctcctgatagaacctccgactcaacaccagaccctcagcgagtccctttgcgcctcttggctccccacattggccggcttcccatgcctgaggactatgccatggacgaactgcgcagccttacccagtcctatctgcgagaactggctgttgggagcctgtgagccccaggcactttgcatcacagtcacatgcccattcacaccacacagaggttccctgccttgtttggattggcactgtttgccattctctgggttggctgtggcatctaccctccctccctgctgccagaagcagcatcctccacttgttcagggcttttcttaatactgaacgtagcataagggcttctggaacccagaagaggagacagtttaccatcctcaagatcattcagtgtttttcctttaaaaaaatggtcaataaagctcctttgaaaaaaaaatatataatacaaa

SEQ ID NO: 405580 - DNA, 4494 bp, Homo sapiens
agcggggcgaggggcgggactccacggcctctcaccgctcctaccctgtgcctccccgaactccttctgcccctcctcttccctctcgccccttcccccttcagttcggtttcaaaagacgcgtgcccaatgaataacagggtcgacccagagtggcggcgcgtcaccaattcgcggacggcgagggcggagcgtccgcaacgagcctctgacgccgggcggcgtgtgacgcagtcgggccctctgcgcgctgcgcccgaagcggcggtcggtggcaggggtggtagcggcggcggcgacggtttcgtgggggccgcgcgctgctctgtgagcggcgggtggcagcaggggactcctgacacttccccttccccaccgaaccgcgctttctgaaacaaagactcattttgaagatgtttaacaaatcatttggaacaccctttgggggtggcacaggtggctttggcacaacttcaacatttggacagaatactggctttggcactactagtggaggggcatttggaacatctgcatttggttctagcaacaatactggaggcctctttggaaattcacagactaaaccaggaggattgtttggaaccagttcatttagccagccagctacctccacaagcactggctttgggtttggtacgtcaacaggaacagcaaataccttgtttggaactgcaagcacagggaccagtctcttctcatcccaaaacaatgcctttgcacaaaataaaccaactggctttggcaattttggaaccagtactagcagtggaggactctttggaaccacaaataccacctctaatccttttggcagcacatctggctccctctttgggccaagtagttttacagctgctcctactgggactactattaaatttaaccctccaactggtacagatactatggtcaaagctggagttagcactaacataagtaccaagcaccagtgtattactgctatgaaagaatatgaaagcaagtcactagaggaacttcgtttagaggattatcaggctaacaggaagggcccacagaaccaggtgggagcaggtaccacaactggcttgtttgggtcttctccagccacttccagcgcaacaggactcttcagctcctccaccactaattcaggctttgcatatggtcagaacaaaactgcctttggaactagtacaactggatttggaacaaatccaggtggtctctttggccaacagaatcagcagactaccagcctcttcagcaaaccatttggccaggctacaaccacccagaacactggcttttcctttggtaataccagcaccataggacagccaagcaccaacaccatgggattatttggagtaacccaagcctcacagcctggaggtctttttgggacagctacaaacaccagcactgggacagcatttggaacaggaacaggtctctttgggcagaccaatactggatttggtgctgttggttcgaccctgtttggcaataacaagcttactacatttggaagcagcacaaccagtgcaccttcatttggtacaaccagtggcgggctctttggttttggcacaaataccagtgggaatagtatttttggaagtaaaccagcacctgggactcttggaactgggcttggtgcaggatttggaacagctcttggtgctggacaggcatctttgtttgggaacaaccaacctaagattggagggcctcttggtacaggagcctttggggcccctggatttaatactacgacagccactttgggctttggagccccccaggccccagtagctttgacagatccaaatgcttctgctgcccagcaggctgttctccagcagcacatcaatagtctaacatactcaccttttggagactctcctctcttccggaatccgatgtcagaccctaagaagaaggaagagagattgaaaccaacaaatccagcagcccagaaggctcttactacacctactcattataaactgacaccccgccctgccactagagtccggccaaaggctttacaaacaacaggcacagccaagtcacatctctttgatgggctggatgacgatgaaccatccctagccaatggagcattcatgcccaagaagagcattaagaagttggttttgaagaaccttaataatagcaatctcttttctcctgttaatcgtgattcagaaaatctagcttcaccatctgaatatccagaaaatggagagagatttagtttcctaagcaaacctgttgatgagaatcaccagcaggatggagatgaagattcccttgtttcacatttttatactaaccctattgccaaacctattcctcaaaccccagaaagtgctggaaataaacacagcaacagcaacagtgtggatgataccattgttgcattaaacatgcgtgctgctttgcgaaatgggctggaaggaagcagtgaagaaacgtcttttcatgatgagtcacttcaggatgaccgagaagaaatagaaaataattcttaccatatgcacccagcaggtattattctcactaaggttggttactatactattccatctatggatgaccttgctaaaattaccaatgaaaaaggagagtgcattgtctctgatttcactattggtcggaaaggttatggttcaatctattttgaaggagatgtgaatttgacaaatctaaatttggatgatattgtgcatatccggaggaaagaagtagttgtctacttagatgataaccaaaaaccacctgtgggtgaagggctaaataggaaggctgaagttacattggatggagtttggccaacagataaaacatctcgttgtttaataaagagcccagatcgccttgctgatatcaactatgaaggaagattggaagcagtttcaaggaaacagggagctcaattcaaagaataccggcctgaaactggttcttgggtgtttaaggtctcccatttttctaagtatggccttcaggattctgatgaagaggaggaggagcatccgtctaaaactagtacaaagaagttgaagactgctcctttgcctcctgcaagccagactacgcccttgcagatggctcttaatggcaaacctgcacctccacctcagagccagagcccagaggtggagcagttagggagggttgtggaactggacagtgacatggtagatatcacccaggagccagttttggataccatgttagaagagagcatgcctgaggatcaggaacctgtgtctgcctcaacacatattgcatcttcactgggaattaatccacatgtcttacagatcatgaaagcatcattgcttactgatgaagaagatgtagatatggcactggatcaacgcttcagtcgcctgccttccaaagcagatacttctcaagaaatctgttctcccagactccccatttcagcatcccactcgtcgaaaactcgttcactagttggtgggttactacaatcaaaatttacaagtggagcttttctttcaccaagtgtctctgtgcaagaatgtcgtactcccagagcagcatctttaatgaatatcccatccacatcctcttggtctgtccctccacccctgacttctgtgttcacaatgcccagcccagcccctgaggttccgttgaaaacagtgggtacacgtaggcaactaggcctagtccctcgtgaaaagtctgtcacctatggcaagggaaaactcttgatggacatggccctattcatgggacgctcatttcgtgttggttggggccccaactggactcttgctaatagtggagaacagctgaatggctctcatgaactagaaaatcatcagattgccgattccatggagtttggattcctgcccaatccagtagctgttaaacccctaactgagtccccattcaaagttcacttagaaaaactcagtttgagacaaagaaagccagatgaagacatgaaattatatcagacacctctggagctcaaattaaaacacagcactgtccatgtggatgaactgtgtcctctcattgtccccaatctgggagttgctgtcattcatgactatgcagattgggttaaagaagcatcaggagacttaccagaagcacaaattgtgaagcactggagcctgacatggacactatgtgaagccctatggggccacctgaaggagcttgacagccagctaaatgaaccccgtgaatacattcaaattctggagcgaagaagagctttctcccgctggctatcctgtactgccacacctcagattgaagaggaagtctccttaacccaaaaaaacagccctgtggaggctgtattcagctacctcacaggcaaaaggatcagtgaggcctgctctctggcccagcagtcaggtggggaaggcatatggtccttctctgcgcctctgtcgccttcctactcactgcctcctaccgctccccgct

SEQ ID NO: 405581 - DNA, 2193 bp, Homo sapiens
agcggggcgaggggcgggactccacggcctctcaccgctcctaccctgtgcctccccgaactccttctgcccctcctcttccctctcgccccttcccccttcagttcggtttcaaaagacgcgtgcccaatgaataacagggtcgacccagagtggcggcgcgtcaccaattcgcggacggcgagggcggagcgtccgcaacgagcctctgacgccgggcggcgtgtgacgcagtcgggccctctgcgcgctgcgcccgaagcggcggtcggtggcaggggtggtagcggcggcggcgacggtttcgtgggggccgcgcgctgctctgtgagcggcgggtggcagcaggggactcctgacacttccccttccccaccgaaccgcgctttctgaaacaaagactcattttgaagatgtttaacaaatcatttggaacaccctttgggggtggcacaggtggctttggcacaacttcaacatttggacagaatactggctttggcactactagtggaggggcatttggaacatctgcatttggttctagcaacaatactggaggcctctttggaaattcacagactaaaccaggaggattgtttggaaccagttcatttagccagccagctacctccacaagcactggctttgggtttggtacgtcaacaggaacagcaaataccttgtttggaactgcaagcacagggaccagtctcttctcatcccaaaacaatgcctttgcacaaaataaaccaactggctttggcaattttggaaccagtactagcagtggaggactctttggaaccacaaataccacctctaatccttttggcagcacatctggctccctctttgggccaagtagttttacagctgctcctactgggactactattaaatttaaccctccaactggtacagatactatggtcaaagctggagttagcactaacataagtaccaagcaccagtgtattactgctatgaaagaatatgaaagcaagtcactagaggaacttcgtttagaggattatcaggctaacaggaagggcccacagaaccaggtgggagcaggtaccacaactggcttgtttgggtcttctccagccacttccagcgcaacaggactcttcagctcctccaccactaattcaggctttgcatatggtcagaacaaaactgcctttggaactagtacaactggatttggaacaaatccaggtggtctctttggccaacagaatcagcagactaccagcctcttcagcaaaccatttggccaggctacaaccacccagaacactggcttttcctttggtaataccagcaccataggacagccaagcaccaacaccatgggattatttggagtaacccaagcctcacagcctggaggtctttttgggacagctacaaacaccagcactgggacagcatttggaacaggaacaggtctctttgggcagaccaatactggatttggtgctgttggttcgaccctgtttggcaataacaagcttactacatttggaagcagcacaaccagtgcaccttcatttggtacaaccagtggcgggctctttggttttggcacaaataccagtgggaatagtatttttggaagtaaaccagcacctgggactcttggaactgggcttggtgcaggatttggaacagctcttggtgctggacaggcatctttgtttgggaacaaccaacctaagattggagggcctcttggtacaggagcctttggggcccctggatttaatactacgacagccactttgggctttggagccccccaggccccagtagctttgacagatccaaatgcttctgctgcccagcaggctgttctccagcagcacatcaatagtctaacatactcaccttttggagactctcctctcttccggaatccgatgtcagaccctaagaagaaggaagagagattgaaaccaacaaatccagcagcccagaaggctcttactacacctactcattataaactgacaccccgccctgccactagagtccggccaaaggctttacaaacaacaggcacagccaagtcacatctctttgatgggctggatgacgatgaaccatccctagccaatggagcattcatgcccaacacccctgccactttggaacagaactacatagtctgtgagctgcagcaaa

SEQ ID NO: 405582 - DNA, 2033 bp, Homo sapiens
agcggggcgaggggcgggactccacggcctctcaccgctcctaccctgtgcctccccgaactccttctgcccctcctcttccctctcgccccttcccccttcagttcggtttcaaaagacgcgtgcccaatgaataacagggtcgacccagagtggcggcgcgtcaccaattcgcggacggcgagggcggagcgtccgcaacgagcctctgacgccgggcggcgtgtgacgcagtcgggccctctgcgcgctgcgcccgaagcggcggtcggtggcaggggtggtagcggcggcggcgacggtttcgtgggggccgcgcgctgctctgtgagcggcgggtggcagcaggggactcctgacacttccccttccccaccgaaccgcgctttctgaaacaaagactcattttgaagatgtttaacaaatcatttggaacaccctttgggggtggcacaggtggctttggcacaacttcaacatttggacagaatactggctttggcactactagtggaggggcatttggaacatctgcatttggttctagcaacaatactggaggcctctttggaaattcacagactaaaccaggaggattgtttggaaccagttcatttagccagccagctacctccacaagcactggctttgggtttggtacgtcaacaggaacagcaaataccttgtttggaactgcaagcacagggaccagtctcttctcatcccaaaacaatgcctttgcacaaaataaaccaactggctttggcaattttggaaccagtactagcagtggaggactctttggaaccacaaataccacctctaatccttttggcagcacatctggctccctctttgggccaagtagttttacagctgctcctactgggactactattaaatttaaccctccaactggtacagatactatggtcaaagctggagttagcactaacataagtaccaagcaccagtgtattactgctatgaaagaatatgaaagcaagtcactagaggaacttcgtttagaggattatcaggctaacaggaagggcccacagaaccaggtgggagcaggtaccacaactggcttgtttgggtcttctccagccacttccagcgcaacaggactcttcagctcctccaccactaattcaggctttgcatatggtcagaacaaaactgcctttggaactagtacaactggatttggaacaaatccaggtggtctctttggccaacagaatcagcagactaccagcctcttcagcaaaccatttggccaggctacaaccacccagaacactggcttttcctttggtaataccagcaccataggacagccaagcaccaacaccatgggattatttggagtaacccaagcctcacagcctggaggtctttttgggacagctacaaacaccagcactgggacagcatttggaacaggaacaggtctctttgggcagaccaatactggatttggtgctgttggttcgaccctgtttggcaataacaagcttactacatttggaagcagcacaaccagtgcaccttcatttggtacaaccagtggcgggctctttggttttggcacaaataccagtgggaatagtatttttggaagtaaaccagcacctgggactcttggaactgggcttggtgcaggatttggaacagctcttggtgctggacaggcatctttgtttgggaacaaccaacctaagattggagggcctcttggtacaggagcctttggggcccctggatttaatactacgacagccactttgggctttggagccccccaggccccagtagttgatagagaaaaacaacccagcgaaggcgccttctctgaaaacaatgctgagaatgagagcggcggagacaagccccccatcgatcccaataacccagcagccaactggcttcacgcgcgctccactcggaaaaagcggtgcccctatacaaaacaccagaccctggaactggagaaagagtttctgttcaacatgtacctcaccagggac

SEQ ID NO: 405583 - DNA, 1978 bp, Homo sapiens
agcggggcgaggggcgggactccacggcctctcaccgctcctaccctgtgcctccccgaactccttctgcccctcctcttccctctcgccccttcccccttcagttcggtttcaaaagacgcgtgcccaatgaataacagggtcgacccagagtggcggcgcgtcaccaattcgcggacggcgagggcggagcgtccgcaacgagcctctgacgccgggcggcgtgtgacgcagtcgggccctctgcgcgctgcgcccgaagcggcggtcggtggcaggggtggtagcggcggcggcgacggtttcgtgggggccgcgcgctgctctgtgagcggcgggtggcagcaggggactcctgacacttccccttccccaccgaaccgcgctttctgaaacaaagactcattttgaagatgtttaacaaatcatttggaacaccctttgggggtggcacaggtggctttggcacaacttcaacatttggacagaatactggctttggcactactagtggaggggcatttggaacatctgcatttggttctagcaacaatactggaggcctctttggaaattcacagactaaaccaggaggattgtttggaaccagttcatttagccagccagctacctccacaagcactggctttgggtttggtacgtcaacaggaacagcaaataccttgtttggaactgcaagcacagggaccagtctcttctcatcccaaaacaatgcctttgcacaaaataaaccaactggctttggcaattttggaaccagtactagcagtggaggactctttggaaccacaaataccacctctaatccttttggcagcacatctggctccctctttgggccaagtagttttacagctgctcctactgggactactattaaatttaaccctccaactggtacagatactatggtcaaagctggagttagcactaacataagtaccaagcaccagtgtattactgctatgaaagaatatgaaagcaagtcactagaggaacttcgtttagaggattatcaggctaacaggaagggcccacagaaccaggtgggagcaggtaccacaactggcttgtttgggtcttctccagccacttccagcgcaacaggactcttcagctcctccaccactaattcaggctttgcatatggtcagaacaaaactgcctttggaactagtacaactggatttggaacaaatccaggtggtctctttggccaacagaatcagcagactaccagcctcttcagcaaaccatttggccaggctacaaccacccagaacactggcttttcctttggtaataccagcaccataggacagccaagcaccaacaccatgggattatttggagtaacccaagcctcacagcctggaggtctttttgggacagctacaaacaccagcactgggacagcatttggaacaggaacaggtctctttgggcagaccaatactggatttggtgctgttggttcgaccctgtttggcaataacaagcttactacatttggaagcagcacaaccagtgcaccttcatttggtacaaccagtggcgggctctttggtaacaaaccaaccctgactttaggaaccaatacaaacacttctaattttggtacatataaaaagcaggtttggctctcttaaagttacactgactataccacacgttattctcctgattcgtatgattggaaatatttaaaagttctcaggtaagcggtagcttgatgtgaagtaccagagggaaaggtttaaagtcctggatatggcttgagataattagtaggcatgtaaattgcctttcatttactttggattacttcagcaatagctgagaaaccataaaggaaacacatttggttaagtaacacattgtatgaggccaggtttcaaacctgtggtagcatacagaagataattggttattcttatttttgtcgttgttggtttgt

SEQ ID NO: 405584 - DNA, 442 bp, Homo sapiens
gacttgtttacaaacagacaaaattatggaaaatgaagatatggaaattgattgccttaaaaatatcctagttcatgtgtctcctggaaggactttgggtattcccagagatacccaaatcctaggttgaagaccactggcctagaagagctgtagtcccagttacttgggaggctgaggttggagaatcacctgagcctgggaagtcaaggctttagtgagccatgattgcaccactgtactctagcctgggcaacagaacaagaccctgcctcaaaaaaaaaaaaaaaaaaaaaagaattttgaaaaacgtatgtaccccttcacatattttttaggttgatatataaaaacttttattgtgagaatataattctcagtatcttgaatattcttttaaatatgttttgtttgtttgtttttttgaacagagtctcactct

SEQ ID NO: 405585 - DNA, 242 bp, Homo sapiens
gcaatcctcctgccctggcaacccaaaatgctgggattacagatatgagccacagtgcccaacctatttatttatttatttatttatttatttatttatttatttaataaagaaaaggtctcactatgttgcccacgctggtcaattcctggactcaaatgattcttcaaacttggcctctcaaaatgttgggattacaggtatgagccaccatgcctggcctaaaaatagtattatatttt

SEQ ID NO: 405586 - DNA, 416 bp, Homo sapiens
gggtcacgtttgtaccctagggttgggtccatcaaatatggtttgaaagaatagatgaataaaacaatattaacaatagtaattaaccatttaattgatccttcgcaggcacccccaggccatgtgagagatgcaggattttttttgaatccccacagtcacctgtgagacagagaccgctcttacttccactcagcagagaagaggaagctctgagagctccttgcttacctctgccacccaggaaggaaccacggggctaaagggagaactcatctccgatagtgtcagaaagatgtgatcatcaaggcaaggcctgggtctctgttggtcatagttgaggccccagaagtggcctaggaacacagcactcaggaatgaatagctaccttttttttttttgagatggagtctgg

SEQ ID NO: 405587 - DNA, 787 bp, Homo sapiens
ccccggccatcagcctccggaacttcggccgcgtgcgaggcaccccccgccccccgcatctgctgcgcttccgggcggaggagggcggcgaccccgaggccgcagcccgcatcgaggaggaatcggcggagtccggggacgaggccctggagccctgaggtctcgcctgcccccgcccggtttcccccacccactgccctccttccctcccgtgcccggtcctgccagccagctctattagagcagcttttcctgtgtgccttgaaggccagagcatttagggacagaacttgaaagagaagatggcgaaaagggcctgagccagggctgggaatgtgtccactttggtgggagagaaggtcggttgcttgggggacgtgaagctagaaaaataaatgagcccaggcatagaggactagagcccaggtgcacggttagcttcacagcaacagggagctaggccattggttctcaaacttaaggaaggatcagcatcacggaaggtcttgtcaaaagagtgctgggcaccactcccagcatttctggcacgttagatttgggatggcgcccaataacttgcatttctaacaagttcccaggtgatgctgtgctgcttgtccaggaaacacaatttgagagtcatgtgaaacgtgcttgaaggggtataccttaccctggtaaccttactcaaaagaagggtcagtgtgtgctgggggacttttgccttgtttgtaatgttaaagtttttgtttacattgagaatatattcaagtttttgtttaagtgt

SEQ ID NO: 405588 - DNA, 482 bp, Homo sapiens
tttccttttttaatgcccctgctttgctacagccctcagcatgaacttattcttcctaccagataatccagcactgggtgagccttccaaactggtagtctgagccccatgtggaagagggaggagaagagaaagacagcggtatggtagaacatcccagactgccatgcagtctaagaaaggttctgcaaggccactgaagagtcttcaagccaaagtcggctgtcagaggagttctgtgtctcctagaatttccagactaagtatgtcttagtataacttcatactcagccagtcgctgagagaaaccacggaaggcatgggctcaatgcaaatacagcaatggatttcaaagtgcagctgggcccctaggtcaaccgcattctctgtaatcccccagtattggaggtctctgccacagatctctagtgtgataaaggggctcagtacccctgagaaaaagcttttctgactagtatctt

SEQ ID NO: 405589 - DNA, 496 bp, Homo sapiens
gaagaagtagagatagagagggatgttggtgatgttggatcctaatttcagttcctatctcaccacaggaccttggataatccagcactgggtgagccttccaaactggtagtctgagccccatgtggaagagggaggagaagagaaagacagcggtatggtagaacatcccagactgccatgcagtctaagaaaggttctgcaaggccactgaagagtcttcaagccaaagtcggctgtcagaggagttctgtgtctcctagaatttccagactaagtatgtcttagtataacttcatactcagccagtcgctgagagaaaccacggaaggcatgggctcaatgcaaatacagcaatggatttcaaagtgcagctgggcccctaggtcaaccgcattctctgtaatcccccagtattggaggtctctgccacagatctctagtgtgataaaggggctcagtacccctgagaaaaagcttttctgactagtatctt

SEQ ID NO: 405590 - DNA, 360 bp, Homo sapiens
atcttagtccatgtccatttgagctcttgagaaagcctccagtgctagtgccactcactctggtggcgcacttgcctgacttataatccttagccttgctgacgttccctagttatctcttcgctatctagtctgaagctggagggtagggtttttctgggtctcatttttcgtcagcagcactcaatacagatggtctccaacttctgcttcggtgtacgatttttctactttatgatggtgtgaaagtcatactcatttagggtactcctcaactcatgatgggattatatccagataaacccatcataagttggaactatttttttttttttttttttttgagacggagtctcactc

SEQ ID NO: 405591 - DNA, 4507 bp, Homo sapiens
ccaagaggggcctggtacaagataagacagaattagaggatgaaaatcaagaaggcatgactgtgcacagttctgttcacagcaataacctcaactctatgccagctgctgaaaagggtaaagacacattaaaatcagcttatgatgatacagaaaatgacctaaaaggagcagctattcatatctcaaaaggaatgctccacgaagaaaagcctggagagcagattttggaaggtggctcagagagtgaatctgcacagaaagctgcagggaatcaaatgaatgacagaaagattcaacaggaatccctgggtagtgcaccactcatgggagatgaccaccctaacgcatccagagacagtgtggagggagacgctttggtaaatggggccaaactgcacacgctttcagtggagcatcaacgtgaggaattgaaagaggaattagttcttaaaactcaaaaccaacctagattctcctctccagatgagattgatttgcccagagaactggaagacgaggttcccattctgggaagaaatcttccctggcaacaagaaagagatgtggctgccacagccagtaagcaaatgagtgagaagataaggctctctgagggagaagccaaagaggactccttggatgaagagttttttcatcacaaggcaatgcagggcacagaggtaggacagacagaccaaactgacagcacaggaggaccagctttcctttctaaagtagaagaggatgattatccctctgaagaactactagaggatgaaaacgctataaatgcaaaacggtctaaagaaaaaaaccctgggaatcagggcaggcagtttgatgttaatctgcaagtccctgacagagcagttttagggaccattcatccagatccagaaattgaagaaagcaagcaagaaactagtatgattttggatagtgaaaaaacaagtgagactgctgccaaaggggtcaacacaggaggcagggaaccaaatacaatggtggaaaaagaacgccctctggcagataagaaagcacagagaccatttgaacgaagtgacttttctgacagcataaaaattcagactccagaattaggtgaagtgtttcagaataaagattctgattatctgaagaacgacaaccctgaggaacatctgaagacctcagggcttgcaggggagcctgagggagaactctcaaaagaggaccatgggaacacagagaagtacatgggcacagaaagccaggggtctgctgctgcagaacctgaagatgactcgttccactggactccacatacaagtgtagagccagggcatagtgacaagagggaggacttacttatcataagcagcttctttaaagaacaacagtctttgcagcggttccagaagtactttaatgtccatgagctggaagccttgctacaagaaatgtcatcaaaactgaagtcagcgcagcaggagagcctgccctataatatggaaaaagtcctagataaggtcttccgtgcttctgagtcacaaattctgagcatagcagaaaaaatgcttgatactcgtgtggctgaaaatagagatctgggaatgaacgaaaataacatatttgaagaggctgcagtgcttgatgacattcaagacctcatctattttgtcaggtacaagcactccacagcagaggagacagccacactggtgatggcaccacctctagaggaaggcttgggtggagcaatggaagagatgcaaccactgcatgaagataatttctcacgagagaagacagcagaacttaatgtgcaggttcctgaagaacccacccacttggaccaacgtgtgattggggacactcatgcctcagaagtgtcacagaagccaaatactgagaaagacctggacccagggccagttacaacagaagacactcctatggatgctattgatgcaaacaagcaaccagagacagccgccgaagagccggcaagtgtcacacctttggaaaacgcaatccttctaatatattcattcatgttttatttaactaagtcgctagttgctacattgcctgatgatgttcagcctgggcctgatttttatggactgccatggaaacctgtatttatcactgccttcttgggaattgcttcgtttgccattttcttatggagaactgtccttgttgtgaaggatagagtatatcaagtcacggaacagcaaatttctgagaagttgaagactatcatgaaagaaaatacagaacttgtacaaaaattgtcaaattatgaacagaagatcaaggaatcaaagaaacatgttcaggaaaccaggaaacaaaatatgattctctctgatgaagcaattaaatataaggataaaatcaagacacttgaaaaaaatcaggaaattctggatgacacagctaaaaatcttcgtgttatgctagaatctgagagagaacagaatgtcaagaatcaggacttgatatcagaaaacaagaaatctatagagaagttaaaggatgttatttcaatgaatgcctcagaattttcagaggttcagattgcacttaatgaagctaagcttagtgaagagaaggtgaagtctgaatgccatcgggttcaagaagaaaatgctaggcttaagaagaaaaaagagcagttgcagcaggaaatcgaagactggagtaaattacatgctgagctcagtgagcaaatcaaatcatttgagaagtctcagaaagatttggaagtagctcttactcacaaggatgataatattaatgctttgactaactgcattacacagttgaatctgttagagtgtgaatctgaatctgagggtcaaaataaaggtggaaatgattcagatgaattagcaaatggagaagtgggaggtgaccggaatgagaagatgaaaaatcaaattaagcagatgatggatgtctctcggacacagactgcaatatcggtagttgaagaggatctaaagcttttacagcttaagctaagagcctccgtgtccactaaatgtaacctggaagaccaggtaaagaaattggaagatgaccgcaactcactacaagctgccaaagctggactggaagatgaatgcaaaaccttgaggcagaaagtggagattctgaatgagctctatcagcagaaggagatggctttgcaaaagaaactgagtcaagaagagtatgaacggcaagaaagagagcacaggctgtcagctgcagatgaaaaggcagtttcggctgcagaggaagtaaaaacttacaagcggagaattgaagaaatggaggatgaattacagaagacagagcggtcatttaaaaaccagatcgctacccatgagaagaaagctcatgaaaactggctcaaagctcgtgctgcagaaagagctatagctgaagagaaaagggaagctgccaatttgagacacaaattattagaattaacacaaaagatggcaatgctgcaagaagaacctgtgattgtaaaaccaatgccaggaaaaccaaatacacaaaaccctccacggagaggtcctctgagccagaatggctcttttggcccatcccctgtgagtggtggagaatgctcccctccattgacagtggagccacccgtgagacctctctctgctactctcaatcgaagagatatgcctagaagtgaatttggatcagtggacgggcctctacctcatcctcgatggtcagctgaggcatctgggaaaccctctccttctgatccaggatctggtacagctaccatgatgaacagcagctcaagaggctcttcccctaccagggtactcgatgaaggcaaggttaatatggctccaaaagggccccctcctttcccaggagtccctctcatgagcacccccatgggaggccctgtaccaccacccattcgatatggaccaccacctcagctctgcggaccttttgggcctcggccacttcctccaccctttggccctggtatgcgtccaccactaggcttaagagaatttgcaccaggcgttccaccaggaagacgggacctgcctctccaccctcggggatttttacctggacacgcaccatttagacctttaggttcacttggcccaagagagtactttattcctggtacccgattaccacccccaacccatggtccccaggaatacccaccaccacctgctgtaagagacttactgccgtcaggctctagagatgagcctccacctgcctctcagagcactagccaggactgttcacaggctttaaaacagagcccataaaactatgacctctgaggtttcattggaaagaaagtgtactgtgcattatccattacagtaaaggatttcattggcttcaaaatccaaaagtttattttaaaaggtttgttgttagaactaagctgccttggcagtgtgcatttttgagccaaacaattcaaaaatgtcatttcttccctaaataaaaatcaccttttaagcta

SEQ ID NO: 405592 - DNA, 1432 bp, Homo sapiens
catctggaattgcaccatacttaaagacagtgtagtaatggataagactttaagtatggtgcaattccagatggttagttactacactgtctttaaaacaatgtttctttaaatactctacaacgtttctaagaacgaacttcagacattttaattacagtaataatagcactccttttaaggagtttcagatccacactaaaactaaaatcataaaaggctgatacttttgtttgctgctaggctatattcttccattctttgaagtcctatgatgtaatatttttgaaacctagtgtatgtcttgtcactgttgtgatatttaatcgattaagaataccttgtaaaaaggagcaaaagcttcaatgtgaaacaattttctctctttatactaaacaactgaagatagatagtttagaaagataaggacctttgaaagaagacaactctgtcaaagttcataaggaatataaaaattcttcaggaaaagagaattcaatctatatgtcctcccgtttaatatcaagaatagaagaaattaagaggaaaactccacagaagagcataggccacttttagccatgtaaaaataagattaagtcacaaatacaacttttgaatttacctgtcaatatctctttaggacacaaaacaatgctgaagttaatataatttctaattttaaatgtcatttaagtgtagattatgccatctaggaaggtaagtaggaaaggtaaattaaatctatttttaaaattcaaaatattagagtatttttcccctctaaagccttttttggtgattattctgtatctgacataattgagaaactggtaagctgtaaagattccagtgtagcttctctgagaagttgtgagccagtccataactgcttcctcacatccatctgattgcaccatttctgcagcaaaccccaaagcagggtgccaatatgcagatggcatagggagtatcatccctcagccaaatcacttttccatctctaaagtttcatctattttggaagtcatctccaactaattgtgtctggatttagttgctaaaattgtcttatttatgaagcagcaatattcagcctgaaagcatttctgccatagttgttgtagttatatcgccaatggctgatttttttcattggaaagtaaatttaagtaattcgtgggatgtggtatattctgtgtcaacttcaagataatcactcattttctcgttatattcaggtctgaattaaagttaagttaatcacacagtgttcaatttaagcttctttaatgttgatgaaaggtatttgtagttcatataaactatacttatgtgaaggatagcagatgcttcatataaattatcattttgatatacatatcttatggtttatgagaaaagagaaaaaataatacatcggttttgctac

SEQ ID NO: 405593 - DNA, 1241 bp, Homo sapiens
  misc_feature (1162)..(1162): n is a, c, g, or t
aggttgaggccgccccactgcgccgagggccgccatcgctattgcggcattctccctcggctccggaggtaggggcaactcttctcttcctgtctgggaaaaagaccatagctcaaaaggaaggccgagggagaagttagaaagggatgatgaacgaagcgttttgaggggactgcaacgccgcggcaatacccgcccctgagctgcgcgcactaccgcctcggtagctgtcatggccgccgggtcacgtgactccggcttggcgccgtcctggttttccgtcaccctggttctgtagtctcggttctccgactccctctttttctcgcttgtggactccgatatattgcccttcttcccttagaagaactgctgaaccgactctgagaaatttgaaaacatctggagaaaatgacccattggtttcataggaacccattaaaagccacagctcctgtgtcttttaattactatggtgtagtcactggcccttctgcttcaaaaatatgcaatgacttgaggtcatccagggcacgactccttgaactgttcactgatttgagctgtaatccagaaatgatgaagaatgcagcagattcatatttctcacttttacaaggtttcataaattctttggatgaatctacccaagaaagcaagttacgatatattcaaaatttcaagtggactgatacattgcaaggacaggttccaagtgcccagcaggatgctgtttttgaattaatttccatgggatttaatgtagctttatggtataccaaatatgcttcaagactggctggaaaagaaaatatcacagacgatgaagcaacaagaacgttcatcgaagcctaaagatgcagtgggatttaagagcatctaaagcgaacgtccatctcgcaaaaatcattacacctggggacacaggcgacgattaaagtccggatcatagagcatcgtttttcaagcagggcgaagccaaagtaccatgccgagcatcgagtaaactgcctgataatgcgctgggttgaaagcctcctccaaaggtatcctaccgggcagaattgtcaagcaaattcaggaggttaccatcagtcaggacatgtagatggaaggtcaacatctcctgttgtctccctcctcctcccttgtcgtacatctnaagagagtccaccgtcgagacacaagcagcgacggagagggaaaaccgaacacagacaaaaaaataccaagacaaagga

SEQ ID NO: 405594 - DNA, 764 bp, Homo sapiens
aggttgaggccgccccactgcgccgagggccgccatcgctattgcggcattctccctcggctccggaggtaggggcaactcttctcttcctgtctgggaaaaagaccatagctcaaaaggaaggccgagggagaagttagaaagggatgatgaacgaagcgttttgaggggactgcaacgccgcggcaatacccgcccctgagctgcgcgcactaccgcctcggtagctgtcatggccgccgggtcacgtgactccggcttggcgccgtcctggttttccgtcaccctggttctgtagtctcggttctccgactccctctttttctcgcttgtggactccgatatattgcccttcttcccttagaagaactgctgaaccgactctgagaaatttggtgggtgtgtcgttcttctatcccaccctaggaactcccgaaaactgaagaccgccgggtcgcagaaggggagaagatggggcaggggcagaaaccctcttctttcctgaagtaaagattcgcaaaacttcagacattttcatccaggaagtaggaggccgcattaaaagaagtatttgtggaagatttcgcagcctcaagtgctgagtgtgatattatttgtaggcacatagatgctgtattaggctatcggaatttatatggaagatgtgtagaagatgatattttctgaaataactcgttaaatgttttgagtcctaaataaacctgctcagtttttcgttgggtaaaaataaaatctctattcat

SEQ ID NO: 405595 - DNA, 733 bp, Homo sapiens
aggttgaggccgccccactgcgccgagggccgccatcgctattgcggcattctccctcggctccggaggtaggggcaactcttctcttcctgtctgggaaaaagaccatagctcaaaaggaaggccgagggagaagttagaaagggatgatgaacgaagcgttttgaggggactgcaacgccgcggcaatacccgcccctgagctgcgcgcactaccgcctcggtagctgtcatggccgccgggtcacgtgactccggcttggcgccgtcctggttttccgtcaccctggttctgtagtctcggttctccgactccctctttttctcgcttgtggactccgatatattgcccttcttcccttagaagaactgctgaaccgactctgagaaatttggaactcccgaaaactgaagaccgccgggtcgcagaaggggagaagatggggcaggggcagaaaccctcttctttcctgaagtaaagattcgcaaaacttcagacattttcatccaggaagtaggaggccgcattaaaagaagtatttgtggaagatttcgcagcctcaagtgctgagtgtgatattatttgtaggcacatagatgctgtattaggctatcggaatttatatggaagatgtgtagaagatgatattttctgaaataactcgttaaatgttttgagtcctaaataaacctgctcagtttttcgttgggtaaaaataaaatctctattcat

SEQ ID NO: 405596 - DNA, 367 bp, Homo sapiens
ttctgtgtgtaatggttatggtaccctaggaataatcccaagaactgaataaagaaaaaaaggctgtcttaaaatgctaacaagatgctgtcatctttaggtcctctgagccagaatggctcttttggcccatcccctgtgagtggtggagaatgctcccctccattgacagtggagccacccgtgagacctctctctgctactctcaatcgaagagatatgcctagaagtgaatttggtgagcattcacatgtttccttgcaatactcttttgggtggctttttcccttttatttgagaattctaatgcaaacactttagaattcgggtctgtccagtatagaaaagaaaatttcttaatttgtct

SEQ ID NO: 405597 - DNA, 5086 bp, Homo sapiens
gacgtgttttataggcggcataaagcgaaagtgcaggcagctgtggaaggcgaagttcaatcccagagtccgccccctgaattggggcctttccggaggaggaagctctgaaaaacagggggcccagtgccattccgcagggaattgtcgcttgcgttcagctgttctacacaatggactcagtacctgccactgtgccttctatcgccgctaccccgggggacccggaacttgtgggacccttgtctgtgctctacgcagccttcatagccaagctgctggagctagttgctacattgcctgatgatgttcagcctgggcctgatttttatggactgccatggaaacctgtatttatcactgccttcttgggaattgcttcgtttgccattttcttatggagaactgtccttgttgtgaaggatagagtatatcaagtcacggaacagcaaatttctgagaagttgaagactatcatgaaagaaaatacagaacttgtacaaaaattgtcaaattatgaacagaagatcaaggaatcaaagaaacatgttcaggaaaccaggaaacaaaatatgattctctctgatgaagcaattaaatataaggataaaatcaagacacttgaaaaaaatcaggaaattctggatgacacagctaaaaatcttcgtgttatgctagaatctgagagagaacagaatgtcaagaatcaggacttgatatcagaaaacaagaaatctatagagaagttaaaggatgttatttcaatgaatgcctcagaattttcagaggttcagattgcacttaatgaagctaagcttagtgaagagaaggtgaagtctgaatgccatcgggttcaagaagaaaatgctaggcttaagaagaaaaaagagcagttgcagcaggaaatcgaagactggagtaaattacatgctgagctcagtgagcaaatcaaatcatttgagaagtctcagaaagatttggaagtagctcttactcacaaggatgataatattaatgctttgactaactgcattacacagttgaatctgttagagtgtgaatctgaatctgagggtcaaaataaaggtggaaatgattcagatgaattagcaaatggagaagtgggaggtgaccggaatgagaagatgaaaaatcaaattaagcagatgatggatgtctctcggacacagactgcaatatcggtagttgaagaggatctaaagcttttacagcttaagctaagagcctccgtgtccactaaatgtaacctggaagaccaggtaaagaaattggaagatgaccgcaactcactacaagctgccaaagctggactggaagatgaatgcaaaaccttgaggcagaaagtggagattctgaatgagctctatcagcagaaggagatggctttgcaaaagaaactgagtcaagaagagtatgaacggcaagaaagagagcacaggctgtcagctgcagatgaaaaggcagtttcggctgcagaggaagtaaaaacttacaagcggagaattgaagaaatggaggatgaattacagaagacagagcggtcatttaaaaaccagatcgctacccatgagaagaaagctcatgaaaactggctcaaagctcgtgctgcagaaagagctatagctgaagagaaaagggaagctgccaatttgagacacaaattattagaattaacacaaaagatggcaatgctgcaagaagaacctgtgattgtaaaaccaatgccaggaaaaccaaatacacaaaaccctccacggagaggtcctctgagccagaatggctcttttggcccatcccctgtgagtggtggagaatgctcccctccattgacagtggagccacccgtgagacctctctctgctactctcaatcgaagagatatgcctagaagtgaatttggatcagtggacgggcctctacctcatcctcgatggtcagctgaggcatctgggaaaccctctccttctgatccaggatctggtacagctaccatgatgaacagcagctcaagaggctcttcccctaccagggtactcgatgaaggcaaggttaatatggctccaaaagggccccctcctttcccaggagtccctctcatgagcacccccatgggaggccctgtaccaccacccattcgatatggaccaccacctcagctctgcggaccttttgggcctcggccacttcctccaccctttggccctggtatgcgtccaccactaggcttaagagaatttgcaccaggcgttccaccaggaagacgggacctgcctctccaccctcggggatttttacctggacacgcaccatttagacctttaggttcacttggcccaagagagtactttattcctggtacccgattaccacccccaacccatggtccccaggaatacccaccaccacctgctgtaagagacttactgccgtcaggctctagagatgagcctccacctgcctctcagagcactagccaggactgttcacaggctttaaaacagagcccataaaactatgacctctgaggtttcattggaaagaaagtgtactgtgcattatccattacagtaaaggatttcattggcttcaaaatccaaaagtttattttaaaaggtttgttgttagaactaagctgccttggcagtgtgcatttttgagccaaacaattcaaaaatgtcatttcttccctaaataaaaatcaccttttaagctagagcgtccttacaactttgaaatgtgcaataaagaatacctgtgttttagctaatgtagcatatgtaattgcaaaatgatttagaatgtcatgaaaaatatgaacatttcctgtggaaatgctttaagaacatgtatttccattatcctatttttagtgtacaccagctgaatacggagcaatggtgtttataagcgtttttttaaactatctggtcacaaagactgttacgctaaaaatgtttactaaaagatcactaaactatctcccctcttgctgaagttctttgtagtaatagctcataaaaatttgtttattaatatttcccaagtgtctgttgactcattggactgttatgaggcttgtgccatttggggaacatgtaaactcaggctcccagaactgaagatggtggctggtggcacacttccggctgctcctccgtcacctgtgaactctacaagtgacgtctttttatttcaaagaagtttatttcccacttgtatagcattcacatgctttctttacgatcctcattgtctatttgagaatggttttctgagagtgagtttacattagtagcaagagttgtttgacctgatgttccattgtttttaccattcctgtagaaaaagggtgcacaacagaaaaatgaaaatgatgtgtcatggccgtaaaagtatagaaatctttaaaaattttaaaatgtacagtcccttatctatctttcccattccttgccactgatttttgaggaatataataaaaagattggaagagtataatgccatgagaaagaatgatttaggactgtgagggttataacatgccctaggtcagcaaccaagggttgaaatcagttctgttttagggggaaatggggggggcgacagatattattccaaaattaatattaattaatatttaaacgttggtgtttttatttaaaaatcagtaactaaccatctggaattgcaccatacttaaagtcttatccattactacactgtctttaaaacaatgtttctttaaatactctacaacgtttctaagaacgaacttcagacattttaattacagtaataatagcactccttttaaggagtttcagatccacactaaaactaaaatcataaaaggctgatacttttgtttgctgctaggctatattcttccattctttgaagtcctatgatgtaatatttttgaaacctagtgtatgtcttgtcactgttgtgatatttaatcgattaagaataccttgtaaaaaggagcaaaagcttcaatgtgaaacaattttctctctttatactaaacaactgaagatagatagtttagaaagataaggacctttgaaagaagacaactctgtcaaagttcataaggaatataaaaattcttcaggaaaagagaattcaatctatatgtcctcccgtttaatatcaagaatagaagaaattaagaggaaaactccacagaagagcataggccacttttagccatgtaaaaataagattaagtcacaaatacaacttttgaatttacctgtcaatatctctttaggacacaaaacaatgctgaagttaatataatttctaattttaaatgtcatttaagtgtagattatgccatctaggaaggtaagtaggaaaggtaaattaaatctatttttaaaattcaaaatattagagtatttttcccctctaaagccttttttggtgattattctgtatctgacataattgagaaactggtaagctgtaaagattccagtgtagcttctctgagaagttgtgagccagtccataactgcttcctcacatccatctgattgcaccatttctgcagcaaaccccaaagcagggtgccaatatgcagatggcatagggagtatcatccctcagccaaatcacttttccatctctaaagtttcatctattttggaagtcatctccaactaattgtgtctggatttagttgctaaaattgtcttatttatgaagcagcaatattcagcctgaaagcatttctgccatagttgttgtagttatatcgccaatggctgatttttttcattggaaagtaaatttaagtaattcgtgggatgtggtatattctgtgtcaacttcaagataatcactcattttctcgttatattcaggtctgaattaaagttaagttaatcacacagtgttcaatttaagcttctttaatgttgatgaaaggtatttgtagttcatataaactatacttatgtgaaggatagcagatgcttcatataaattatcattttgatatacatatcttatggtttatgagaaaagagaaaaaataatacatcggttttgctac

SEQ ID NO: 405598 - DNA, 8524 bp, Homo sapiens
ccaagaggggcctggtacaagataagacagaattagaggatgaaaatcaagaaggcatgactgtgcacagttctgttcacagcaataacctcaactctatgccagctgctgaaaagggtaaagacacattaaaatcagcttatgatgatacagaaaatgacctaaaaggagcagctattcatatctcaaaaggaatgctccacgaagaaaagcctggagagcagattttggaaggtggctcagagagtgaatctgcacagaaagctgcagggaatcaaatgaatgacagaaagattcaacaggaatccctgggtagtgcaccactcatgggagatgaccaccctaacgcatccagagacagtgtggagggagacgctttggtaaatggggccaaactgcacacgctttcagtggagcatcaacgtgaggaattgaaagaggaattagttcttaaaactcaaaaccaacctagattctcctctccagatgagattgatttgcccagagaactggaagacgaggttcccattctgggaagaaatcttccctggcaacaagaaagagatgtggctgccacagccagtaagcaaatgagtgagaagataaggctctctgagggagaagccaaagaggactccttggatgaagagttttttcatcacaaggcaatgcagggcacagaggtaggacagacagaccaaactgacagcacaggaggaccagctttcctttctaaagtagaagaggatgattatccctctgaagaactactagaggatgaaaacgctataaatgcaaaacggtctaaagaaaaaaaccctgggaatcagggcaggcagtttgatgttaatctgcaagtccctgacagagcagttttagggaccattcatccagatccagaaattgaagaaagcaagcaagaaactagtatgattttggatagtgaaaaaacaagtgagactgctgccaaaggggtcaacacaggaggcagggaaccaaatacaatggtggaaaaagaacgccctctggcagataagaaagcacagagaccatttgaacgaagtgacttttctgacagcataaaaattcagactccagaattaggtgaagtgtttcagaataaagattctgattatctgaagaacgacaaccctgaggaacatctgaagacctcagggcttgcaggggagcctgagggagaactctcaaaagaggaccatgggaacacagagaagtacatgggcacagaaagccaggggtctgctgctgcagaacctgaagatgactcgttccactggactccacatacaagtgtagagccagggcatagtgacaagagggaggacttacttatcataagcagcttctttaaagaacaacagtctttgcagcggttccagaagtactttaatgtccatgagctggaagccttgctacaagaaatgtcatcaaaactgaagtcagcgcagcaggagagcctgccctataatatggaaaaagtcctagataaggtcttccgtgcttctgagtcacaaattctgagcatagcagaaaaaatgcttgatactcgtgtggctgaaaatagagatctgggaatgaacgaaaataacatatttgaagaggctgcagtgcttgatgacattcaagacctcatctattttgtcaggtacaagcactccacagcagaggagacagccacactggtgatggcaccacctctagaggaaggcttgggtggagcaatggaagagatgcaaccactgcatgaagataatttctcacgagagaagacagcagaacttaatgtgcaggttcctgaagaacccacccacttggaccaacgtgtgattggggacactcatgcctcagaagtgtcacagaagccaaatactgagaaagacctggacccagggccagttacaacagaagacactcctatggatgctattgatgcaaacaagcaaccagagacagccgccgaagagccggcaagtgtcacacctttggaaaacgcaatccttctaatatattcattcatgttttatttaactaagtcgctagttgctacattgcctgatgatgttcagcctgggcctgatttttatggactgccatggaaacctgtatttatcactgccttcttgggaattgcttcgtttgccattttcttatggagaactgtccttgttgtgaaggatagagtatatcaagtcacggaacagcaaatttctgagaagttgaagactatcatgaaagaaaatacagaacttgtacaaaaattgtcaaattatgaacagaagatcaaggaatcaaagaaacatgttcaggaaaccaggaaacaaaatatgattctctctgatgaagcaattaaatataaggataaaatcaagacacttgaaaaaaatcaggaaattctggatgacacagctaaaaatcttcgtgttatgctagaatctgagagagaacagaatgtcaagaatcaggacttgatatcagaaaacaagaaatctatagagaagttaaaggatgttatttcaatgaatgcctcagaattttcagaggttcagattgcacttaatgaagctaagcttagtgaagagaaggtgaagtctgaatgccatcgggttcaagaagaaaatgctaggcttaagaagaaaaaagagcagttgcagcaggaaatcgaagactggagtaaattacatgctgagctcagtgagcaaatcaaatcatttgagaagtctcagaaagatttggaagtagctcttactcacaaggatgataatattaatgctttgactaactgcattacacagttgaatctgttagagtgtgaatctgaatctgagggtcaaaataaaggtggaaatgattcagatgaattagcaaatggagaagtgggaggtgaccggaatgagaagatgaaaaatcaaattaagcagatgatggatgtctctcggacacagactgcaatatcggtagttgaagaggatctaaagcttttacagcttaagctaagagcctccgtgtccactaaatgtaacctggaagaccaggtaaagaaattggaagatgaccgcaactcactacaagctgccaaagctggactggaagatgaatgcaaaaccttgaggcagaaagtggagattctgaatgagctctatcagcagaaggagatggctttgcaaaagaaactgagtcaagaagagtatgaacggcaagaaagagagcacaggctgtcagctgcagatgaaaaggcagtttcggctgcagaggaagtaaaaacttacaagcggagaattgaagaaatggaggatgaattacagaagacagagcggtcatttaaaaaccagatcgctacccatgagaagaaagctcatgaaaactggctcaaagctcgtgctgcagaaagagctatagctgaagagaaaagggaagctgccaatttgagacacaaattattagaattaacacaaaagatggcaatgctgcaagaagaacctgtgattgtaaaaccaatgccaggaaaaccaaatacacaaaaccctccacggagaggtcctctgagccagaatggctcttttggcccatcccctgtgagtggtggagaatgctcccctccattgacagtggagccacccgtgagacctctctctgctactctcaatcgaagagatatgcctagaagtgaatttggatcagtggacgggcctctacctcatcctcgatggtcagctgaggcatctgggaaaccctctccttctgatccaggatctggtacagctaccatgatgaacagcagctcaagaggctcttcccctaccagggtactcgatgaaggcaaggtaaatgcacccattttgaataattagttatttcaggaacatttagctcttcctacaactctctctttgcctcatctcctatttgtgtgttctatctgtactatctcatttattttttaaaaaagcaaactgttctccaagagcctgaagtcccctcagttcccagcattacatctttggctgagcgtccagtagcagtaagtacttagaagtgtggactgaactgggctataagttgcatggcaatattgatcttacttttatccttgacttgggagtgttgctgaaatctgacggattcattggccttttctcctctctcctgtttggttagacatttaacctgtgtagagcatctgctgtaactgtaattaacttaaacaaaagtgaaaagtccccactcttgtgtgtctcagtgtttaatgctcttaggcaaagtaaattcattgtaaattgtgtaattcattattatgtcttcatttggaagtgtgctatttaagaatacctacagttgtatactaggcaaaccctattttgaatgatctgaaattacagattgataacagaagaatgtttgctggaagtgaaatactgaatagtggaagtctataattacccgttgagccagttcccagcagtgtccttaaacagtgtccacataagtgtattctcttgtaacttgtatagctgttatggctggtaagtcctctgatcatacctcactgtgattctcgacattgaaattaaaataattttaatgattgagagtttccaacccactttcccataggaagtgattaatcagtatctcatagtagacagtattactagtgaatgaagatgaatagagctgtgcctgtataatttgtgtacataacattgtttctcttggaaaatacttccaagttccagcacaggactccaggaatacacatttcttgagaaatgtttttatccaagagcagcttggataagacccgagacccctttgaagtaggagacttcgaagagtgtagagactactttgttagaaaggagaagcagaggtggaaagaacgtggccttggagtcaaacctggcatggaattccagccagcctcttacatgctgtgtgaccatcagcaaatctaatactctctgcgcctgtgttcctgcatatttagaacaagatggtcctattacagatttagagatgtcagaatttgtgttaatatatgtagggcctacagaaggtactctgaataatcgctgttacatggtagagaatggatttttcattccctttcattctctgcattcttaatatggaaattactctgataggagggatgtgcagagggagtgactgccttagaaatagatgtatgaatggcgtaacttctatcattagtcaggaatgacctccatttataacctgtgcgttcccttccatttgcagatgtaagcaataatatgatacagcaagtgttcactcctgtggcatacttttaacctttctaagcttgtcagtgggaacaaatgagaggggtagagttttttgcactaattctgctctttggacaagtgcctgacatctgcttcattgggttttagtttttactggtgttggtgcttttgtctgtcataccatagtatttcaaaacttcaattgtttctactctgcaggttaatatggctccaaaagggccccctcctttcccaggagtccctctcatgagcacccccatgggaggccctgtaccaccacccattcgatatggaccaccacctcagctctgcggaccttttgggcctcggccacttcctccaccctttggccctggtatgcgtccaccactaggcttaagagaatttgcaccaggcgttccaccaggaagacgggacctgcctctccaccctcggggatttttacctggacacgcaccatttagacctttaggttcacttggcccaagagagtactttattcctggtacccgattaccacccccaacccatggtccccaggaatacccaccaccacctgctgtaagagacttactgccgtcaggctctagagatgagcctccacctgcctctcagagcactagccaggactgttcacaggctttaaaacagagcccataaaactatgacctctgaggtttcattggaaagaaagtgtactgtgcattatccattacagtaaaggatttcattggcttcaaaatccaaaagtttattttaaaaggtttgttgttagaactaagctgccttggcagtgtgcatttttgagccaaacaattcaaaaatgtcatttcttccctaaataaaaatcaccttttaagctagagcgtccttacaactttgaaatgtgcaataaagaatacctgtgttttagctaatgtagcatatgtaattgcaaaatgatttagaatgtcatgaaaaatatgaacatttcctgtggaaatgctttaagaacatgtatttccattatcctatttttagtgtacaccagctgaatacggagcaatggtgtttataagcgtttttttaaactatctggtcacaaagactgttacgctaaaaatgtttactaaaagatcactaaactatctcccctcttgctgaagttctttgtagtaatagctcataaaaatttgtttattaatatttcccaagtgtctgttgactcattggactgttatgaggcttgtgccatttggggaacatgtaaactcaggctcccagaactgaagatggtggctggtggcacacttccggctgctcctccgtcacctgtgaactctacaagtgacgtctttttatttcaaagaagtttatttcccacttgtatagcattcacatgctttctttacgatcctcattgtctatttgagaatggttttctgagagtgagtttacattagtagcaagagttgtttgacctgatgttccattgtttttaccattcctgtagaaaaagggtgcacaacagaaaaatgaaaatgatgtgtcatggccgtaaaagtatagaaatctttaaaaattttaaaatgtacagtcccttatctatctttcccattccttgccactgatttttgaggaatataataaaaagattggaagagtataatgccatgagaaagaatgatttaggactgtgagggttataacatgccctaggtcagcaaccaagggttgaaatcagttctgttttagggggaaatggggggggcgacagatattattccaaaattaatattaattaatatttaaacgttggtgtttttatttaaaaatcagtaactaaccatctggaattgcaccatacttaaagtcttatccattactacactgtctttaaaacaatgtttctttaaatactctacaacgtttctaagaacgaacttcagacattttaattacagtaataatagcactccttttaaggagtttcagatccacactaaaactaaaatcataaaaggctgatacttttgtttgctgctaggctatattcttccattctttgaagtcctatgatgtaatatttttgaaacctagtgtatgtcttgtcactgttgtgatatttaatcgattaagaataccttgtaaaaaggagcaaaagcttcaatgtgaaacaattttctctctttatactaaacaactgaagatagatagtttagaaagataaggacctttgaaagaagacaactctgtcaaagttcataaggaatataaaaattcttcaggaaaagagaattcaatctatatgtcctcccgtttaatatcaagaatagaagaaattaagaggaaaactccacagaagagcataggccacttttagccatgtaaaaataagattaagtcacaaatacaacttttgaatttacctgtcaatatctctttaggacacaaaacaatgctgaagttaatataatttctaattttaaatgtcatttaagtgtagattatgccatctaggaaggtaagtaggaaaggtaaattaaatctatttttaaaattcaaaatattagagtatttttcccctctaaagccttttttggtgattattctgtatctgacataattgagaaactggtaagctgtaaagattccagtgtagcttctctgagaagttgtgagccagtccataactgcttcctcacatccatctgattgcaccatttctgcagcaaaccccaaagcagggtgccaatatgcagatggcatagggagtatcatccctcagccaaatcacttttccatctctaaagtttcatctattttggaagtcatctccaactaattgtgtctggatttagttgctaaaattgtcttatttatgaagcagcaatattcagcctgaaagcatttctgccatagttgttgtagttatatcgccaatggctgatttttttcattggaaagtaaatttaagtaattcgtgggatgtggtatattctgtgtcaacttcaagataatcactcattttctcgttatattcaggtctgaattaaagttaagttaatcacacagtgttcaatttaagcttctttaatgttgatgaaaggtatttgtagttcatataaactatacttatgtgaaggatagcagatgcttcatataaattatcattttgatatacatatcttatggtttatgagaaaagagaaaaaataatacatcggttttgctac

SEQ ID NO: 405599 - DNA, 6815 bp, Homo sapiens
ccaagaggggcctggtacaagataagacagaattagaggatgaaaatcaagaaggcatgactgtgcacagttctgttcacagcaataacctcaactctatgccagctgctgaaaagggtaaagacacattaaaatcagcttatgatgatacagaaaatgacctaaaaggagcagctattcatatctcaaaaggaatgctccacgaagaaaagcctggagagcagattttggaaggtggctcagagagtgaatctgcacagaaagctgcagggaatcaaatgaatgacagaaagattcaacaggaatccctgggtagtgcaccactcatgggagatgaccaccctaacgcatccagagacagtgtggagggagacgctttggtaaatggggccaaactgcacacgctttcagtggagcatcaacgtgaggaattgaaagaggaattagttcttaaaactcaaaaccaacctagattctcctctccagatgagattgatttgcccagagaactggaagacgaggttcccattctgggaagaaatcttccctggcaacaagaaagagatgtggctgccacagccagtaagcaaatgagtgagaagataaggctctctgagggagaagccaaagaggactccttggatgaagagttttttcatcacaaggcaatgcagggcacagaggtaggacagacagaccaaactgacagcacaggaggaccagctttcctttctaaagtagaagaggatgattatccctctgaagaactactagaggatgaaaacgctataaatgcaaaacggtctaaagaaaaaaaccctgggaatcagggcaggcagtttgatgttaatctgcaagtccctgacagagcagttttagggaccattcatccagatccagaaattgaagaaagcaagcaagaaactagtatgattttggatagtgaaaaaacaagtgagactgctgccaaaggggtcaacacaggaggcagggaaccaaatacaatggtggaaaaagaacgccctctggcagataagaaagcacagagaccatttgaacgaagtgacttttctgacagcataaaaattcagactccagaattaggtgaagtgtttcagaataaagattctgattatctgaagaacgacaaccctgaggaacatctgaagacctcagggcttgcaggggagcctgagggagaactctcaaaagaggaccatgggaacacagagaagtacatgggcacagaaagccaggggtctgctgctgcagaacctgaagatgactcgttccactggactccacatacaagtgtagagccagggcatagtgacaagagggaggacttacttatcataagcagcttctttaaagaacaacagtctttgcagcggttccagaagtactttaatgtccatgagctggaagccttgctacaagaaatgtcatcaaaactgaagtcagcgcagcaggagagcctgccctataatatggaaaaagtcctagataaggtcttccgtgcttctgagtcacaaattctgagcatagcagaaaaaatgcttgatactcgtgtggctgaaaatagagatctgggaatgaacgaaaataacatatttgaagaggctgcagtgcttgatgacattcaagacctcatctattttgtcaggtacaagcactccacagcagaggagacagccacactggtgatggcaccacctctagaggaaggcttgggtggagcaatggaagagatgcaaccactgcatgaagataatttctcacgagagaagacagcagaacttaatgtgcaggttcctgaagaacccacccacttggaccaacgtgtgattggggacactcatgcctcagaagtgtcacagaagccaaatactgagaaagacctggacccagggccagttacaacagaagacactcctatggatgctattgatgcaaacaagcaaccagagacagccgccgaagagccggcaagtgtcacacctttggaaaacgcaatccttctaatatattcattcatgttttatttaactaagtcgctagttgctacattgcctgatgatgttcagcctgggcctgatttttatggactgccatggaaacctgtatttatcactgccttcttgggaattgcttcgtttgccattttcttatggagaactgtccttgttgtgaaggatagagtatatcaagtcacggaacagcaaatttctgagaagttgaagactatcatgaaagaaaatacagaacttgtacaaaaattgtcaaattatgaacagaagatcaaggaatcaaagaaacatgttcaggaaaccaggaaacaaaatatgattctctctgatgaagcaattaaatataaggataaaatcaagacacttgaaaaaaatcaggaaattctggatgacacagctaaaaatcttcgtgttatgctagaatctgagagagaacagaatgtcaagaatcaggacttgatatcagaaaacaagaaatctatagagaagttaaaggatgttatttcaatgaatgcctcagaattttcagaggttcagattgcacttaatgaagctaagcttagtgaagagaaggtgaagtctgaatgccatcgggttcaagaagaaaatgctaggcttaagaagaaaaaagagcagcagtgagcaaatcaaatcatttgagaagtctcagaaagatttggaagtagctcttactcacaaggatgataatattaatgctttgactaactgcattacacagttgaatctgttagagtgtgaatctgaatctgagggtcaaaataaaggtggaaatgattcagatgaattagcaaatggagaagtgggaggtgaccggaatgagaagatgaaaaatcaaattaagcagatgatggatgtctctcggacacagactgcaatatcggtagttgaagaggatctaaagcttttacagcttaagctaagagcctccgtgtccactaaatgtaacctggaagaccaggtaaagaaattggaagatgaccgcaactcactacaagctgccaaagctggactggaagatgaatgcaaaaccttgaggcagaaagtggagattctgaatgagctctatcagcagaaggagatggctttgcaaaagaaactgagtcaagaagagtatgaacggcaagaaagagagcacaggctgtcagctgcagatgaaaaggcagtttcggctgcagaggaagtaaaaacttacaagcggagaattgaagaaatggaggatgaattacagaagacagagcggtcatttaaaaaccagatcgctacccatgagaagaaagctcatgaaaactggctcaaagctcgtgctgcagaaagagctatagctgaagagaaaagggaagctgccaatttgagacacaaattattagaattaacacaaaagatggcaatgctgcaagaagaacctgtgattgtaaaaccaatgccaggaaaaccaaatacacaaaaccctccacggagaggtcctctgagccagaatggctcttttggcccatcccctgtgagtggtggagaatgctcccctccattgacagtggagccacccgtgagacctctctctgctactctcaatcgaagagatatgcctagaagtgaatttggatcagtggacgggcctctacctcatcctcgatggtcagctgaggcatctgggaaaccctctccttctgatccaggatctggtacagctaccatgatgaacagcagctcaagaggctcttcccctaccagggtactcgatgaaggcaaggttaatatggctccaaaagggccccctcctttcccaggagtccctctcatgagcacccccatgggaggccctgtaccaccacccattcgatatggaccaccacctcagctctgcggaccttttgggcctcggccacttcctccaccctttggccctggtatgcgtccaccactaggcttaagagaatttgcaccaggcgttccaccaggaagacgggacctgcctctccaccctcggggatttttacctggacacgcaccatttagacctttaggttcacttggcccaagagagtactttattcctggtacccgattaccacccccaacccatggtccccaggaatacccaccaccacctgctgtaagagacttactgccgtcaggctctagagatgagcctccacctgcctctcagagcactagccaggactgttcacaggctttaaaacagagcccataaaactatgacctctgaggtttcattggaaagaaagtgtactgtgcattatccattacagtaaaggatttcattggcttcaaaatccaaaagtttattttaaaaggtttgttgttagaactaagctgccttggcagtgtgcatttttgagccaaacaattcaaaaatgtcatttcttccctaaataaaaatcaccttttaagctagagcgtccttacaactttgaaatgtgcaataaagaatacctgtgttttagctaatgtagcatatgtaattgcaaaatgatttagaatgtcatgaaaaatatgaacatttcctgtggaaatgctttaagaacatgtatttccattatcctatttttagtgtacaccagctgaatacggagcaatggtgtttataagcgtttttttaaactatctggtcacaaagactgttacgctaaaaatgtttactaaaagatcactaaactatctcccctcttgctgaagttctttgtagtaatagctcataaaaatttgtttattaatatttcccaagtgtctgttgactcattggactgttatgaggcttgtgccatttggggaacatgtaaactcaggctcccagaactgaagatggtggctggtggcacacttccggctgctcctccgtcacctgtgaactctacaagtgacgtctttttatttcaaagaagtttatttcccacttgtatagcattcacatgctttctttacgatcctcattgtctatttgagaatggttttctgagagtgagtttacattagtagcaagagttgtttgacctgatgttccattgtttttaccattcctgtagaaaaagggtgcacaacagaaaaatgaaaatgatgtgtcatggccgtaaaagtatagaaatctttaaaaattttaaaatgtacagtcccttatctatctttcccattccttgccactgatttttgaggaatataataaaaagattggaagagtataatgccatgagaaagaatgatttaggactgtgagggttataacatgccctaggtcagcaaccaagggttgaaatcagttctgttttagggggaaatggggggggcgacagatattattccaaaattaatattaattaatatttaaacgttggtgtttttatttaaaaatcagtaactaaccatctggaattgcaccatacttaaagtcttatccattactacactgtctttaaaacaatgtttctttaaatactctacaacgtttctaagaacgaacttcagacattttaattacagtaataatagcactccttttaaggagtttcagatccacactaaaactaaaatcataaaaggctgatacttttgtttgctgctaggctatattcttccattctttgaagtcctatgatgtaatatttttgaaacctagtgtatgtcttgtcactgttgtgatatttaatcgattaagaataccttgtaaaaaggagcaaaagcttcaatgtgaaacaattttctctctttatactaaacaactgaagatagatagtttagaaagataaggacctttgaaagaagacaactctgtcaaagttcataaggaatataaaaattcttcaggaaaagagaattcaatctatatgtcctcccgtttaatatcaagaatagaagaaattaagaggaaaactccacagaagagcataggccacttttagccatgtaaaaataagattaagtcacaaatacaacttttgaatttacctgtcaatatctctttaggacacaaaacaatgctgaagttaatataatttctaattttaaatgtcatttaagtgtagattatgccatctaggaaggtaagtaggaaaggtaaattaaatctatttttaaaattcaaaatattagagtatttttcccctctaaagccttttttggtgattattctgtatctgacataattgagaaactggtaagctgtaaagattccagtgtagcttctctgagaagttgtgagccagtccataactgcttcctcacatccatctgattgcaccatttctgcagcaaaccccaaagcagggtgccaatatgcagatggcatagggagtatcatccctcagccaaatcacttttccatctctaaagtttcatctattttggaagtcatctccaactaattgtgtctggatttagttgctaaaattgtcttatttatgaagcagcaatattcagcctgaaagcatttctgccatagttgttgtagttatatcgccaatggctgatttttttcattggaaagtaaatttaagtaattcgtgggatgtggtatattctgtgtcaacttcaagataatcactcattttctcgttatattcaggtctgaattaaagttaagttaatcacacagtgttcaatttaagcttctttaatgttgatgaaaggtatttgtagttcatataaactatacttatgtgaaggatagcagatgcttcatataaattatcattttgatatacatatcttatggtttatgagaaaagagaaaaaataatacatcggttttgctac

SEQ ID NO: 405600 - DNA, 5997 bp, Homo sapiens
gcagtgagctcaagtgttgtgagtatccgcttaaaacaccgtgtgatgttaatctgcatgtgggcagttcatctctccagtaaattgtgtatcacagtaaacataatctctcatggttcttgtgtatttttcatgtttagtgcaataacataaaccttgaataacaccatgggacccatataaaatgccactagtgatgctggaagtattctcaagaagcaaagtcatgacactactagaaaaagttgaattgctttgatatataccatagtttggagtgtgcagcagcagtcatttcagtcagacgattcatcttgtaaacagaccatgtacacgtacagtacaaatacaatacagtgttataaatacatttcctcttccttatgatttcaataacattttctttagcttactttattaaagaatacagtatacaatatatatacagaatatgtgttaactgtttatgttattggtaaggcttctggtcaatagtaggctatttactagtaggtaggttttggggagtcaaaagttacacgtggatttttgactgcgcaggggatcagcacacctaacccctgcattgttcgagtcaactgtattataaaagtagccttaataactttatcgtttatgcggcatacatgtttccacttgtcattactatatagtatgaaacgctgttgagtctattttgaatcctaaatatgtctataatactcagtaagatacggaagtcagattacatatacactgaacaaaaatcaccatgtagaatactgtacatgtaagtctgtagcttgaagtatagaaccagagccattaatgtgcagggtttattgttctttcagtgcaaggcagttcttattttaattctttaagtccgtgcataaattgtaagtgatttcccttcataaatattgggagacccatttttaatgttgctttccagataagacttgaaccctgatctgtccacaatttattatttcttccaaaaaatacatataaggactctgttatttctttctcaaggatcagtggacgggcctctacctcatcctcgatggtcagctgaggcatctgggaaaccctctccttctggtaagggagcaagagtgttcaaagagtctaaaaccatgcaggaagtggggagaggattttttttttaatcctcctcacagagtacacaagtcagaataagtctacatcagttctctggtctttaacagatccaggatctggtacagctaccatgatgaacagcagctcaagaggctcttcccctaccagggtactcgatgaaggcaaggtaaatgcacccattttgaataattagttatttcaggaacatttagctcttcctacaactctctctttgcctcatctcctatttgtgtgttctatctgtactatctcatttattttttaaaaaagcaaactgttctccaagagcctgaagtcccctcagttcccagcattacatctttggctgagcgtccagtagcagtaagtacttagaagtgtggactgaactgggctataagttgcatggcaatattgatcttacttttatccttgacttgggagtgttgctgaaatctgacggattcattggccttttctcctctctcctgtttggttagacatttaacctgtgtagagcatctgctgtaactgtaattaacttaaacaaaagtgaaaagtccccactcttgtgtgtctcagtgtttaatgctcttaggcaaagtaaattcattgtaaattgtgtaattcattattatgtcttcatttggaagtgtgctatttaagaatacctacagttgtatactaggcaaaccctattttgaatgatctgaaattacagattgataacagaagaatgtttgctggaagtgaaatactgaatagtggaagtctataattacccgttgagccagttcccagcagtgtccttaaacagtgtccacataagtgtattctcttgtaacttgtatagctgttatggctggtaagtcctctgatcatacctcactgtgattctcgacattgaaattaaaataattttaatgattgagagtttccaacccactttcccataggaagtgattaatcagtatctcatagtagacagtattactagtgaatgaagatgaatagagctgtgcctgtataatttgtgtacataacattgtttctcttggaaaatacttccaagttccagcacaggactccaggaatacacatttcttgagaaatgtttttatccaagagcagcttggataagacccgagacccctttgaagtaggagacttcgaagagtgtagagactactttgttagaaaggagaagcagaggtggaaagaacgtggccttggagtcaaacctggcatggaattccagccagcctcttacatgctgtgtgaccatcagcaaatctaatactctctgcgcctgtgttcctgcatatttagaacaagatggtcctattacagatttagagatgtcagaatttgtgttaatatatgtagggcctacagaaggtactctgaataatcgctgttacatggtagagaatggatttttcattccctttcattctctgcattcttaatatggaaattactctgataggagggatgtgcagagggagtgactgccttagaaatagatgtatgaatggcgtaacttctatcattagtcaggaatgacctccatttataacctgtgcgttcccttccatttgcagatgtaagcaataatatgatacagcaagtgttcactcctgtggcatacttttaacctttctaagcttgtcagtgggaacaaatgagaggggtagagttttttgcactaattctgctctttggacaagtgcctgacatctgcttcattgggttttagtttttactggtgttggtgcttttgtctgtcataccatagtatttcaaaacttcaattgtttctactctgcaggttaatatggctccaaaagggccccctcctttcccaggagtccctctcatgagcacccccatgggaggccctgtaccaccacccattcgatatggaccaccacctcagctctgcggaccttttgggcctcggccacttcctccaccctttggccctggtatgcgtccaccactaggcttaagagaatttgcaccaggcgttccaccaggaagacgggacctgcctctccaccctcggggatttttacctggacacgcaccatttagacctttaggttcacttggcccaagagagtactttattcctggtacccgattaccacccccaacccatggtccccaggaatacccaccaccacctgctgtaagagacttactgccgtcaggctctagagatgagcctccacctgcctctcagagcactagccaggactgttcacaggctttaaaacagagcccataaaactatgacctctgaggtttcattggaaagaaagtgtactgtgcattatccattacagtaaaggatttcattggcttcaaaatccaaaagtttattttaaaaggtttgttgttagaactaagctgccttggcagtgtgcatttttgagccaaacaattcaaaaatgtcatttcttccctaaataaaaatcaccttttaagctagagcgtccttacaactttgaaatgtgcaataaagaatacctgtgttttagctaatgtagcatatgtaattgcaaaatgatttagaatgtcatgaaaaatatgaacatttcctgtggaaatgctttaagaacatgtatttccattatcctatttttagtgtacaccagctgaatacggagcaatggtgtttataagcgtttttttaaactatctggtcacaaagactgttacgctaaaaatgtttactaaaagatcactaaactatctcccctcttgctgaagttctttgtagtaatagctcataaaaatttgtttattaatatttcccaagtgtctgttgactcattggactgttatgaggcttgtgccatttggggaacatgtaaactcaggctcccagaactgaagatggtggctggtggcacacttccggctgctcctccgtcacctgtgaactctacaagtgacgtctttttatttcaaagaagtttatttcccacttgtatagcattcacatgctttctttacgatcctcattgtctatttgagaatggttttctgagagtgagtttacattagtagcaagagttgtttgacctgatgttccattgtttttaccattcctgtagaaaaagggtgcacaacagaaaaatgaaaatgatgtgtcatggccgtaaaagtatagaaatctttaaaaattttaaaatgtacagtcccttatctatctttcccattccttgccactgatttttgaggaatataataaaaagattggaagagtataatgccatgagaaagaatgatttaggactgtgagggttataacatgccctaggtcagcaaccaagggttgaaatcagttctgttttagggggaaatggggggggcgacagatattattccaaaattaatattaattaatatttaaacgttggtgtttttatttaaaaatcagtaactaaccatctggaattgcaccatacttaaagtcttatccattactacactgtctttaaaacaatgtttctttaaatactctacaacgtttctaagaacgaacttcagacattttaattacagtaataatagcactccttttaaggagtttcagatccacactaaaactaaaatcataaaaggctgatacttttgtttgctgctaggctatattcttccattctttgaagtcctatgatgtaatatttttgaaacctagtgtatgtcttgtcactgttgtgatatttaatcgattaagaataccttgtaaaaaggagcaaaagcttcaatgtgaaacaattttctctctttatactaaacaactgaagatagatagtttagaaagataaggacctttgaaagaagacaactctgtcaaagttcataaggaatataaaaattcttcaggaaaagagaattcaatctatatgtcctcccgtttaatatcaagaatagaagaaattaagaggaaaactccacagaagagcataggccacttttagccatgtaaaaataagattaagtcacaaatacaacttttgaatttacctgtcaatatctctttaggacacaaaacaatgctgaagttaatataatttctaattttaaatgtcatttaagtgtagattatgccatctaggaaggtaagtaggaaaggtaaattaaatctatttttaaaattcaaaatattagagtatttttcccctctaaagccttttttggtgattattctgtatctgacataattgagaaactggtaagctgtaaagattccagtgtagcttctctgagaagttgtgagccagtccataactgcttcctcacatccatctgattgcaccatttctgcagcaaaccccaaagcagggtgccaatatgcagatggcatagggagtatcatccctcagccaaatcacttttccatctctaaagtttcatctattttggaagtcatctccaactaattgtgtctggatttagttgctaaaattgtcttatttatgaagcagcaatattcagcctgaaagcatttctgccatagttgttgtagttatatcgccaatggctgatttttttcattggaaagtaaatttaagtaattcgtgggatgtggtatattctgtgtcaacttcaagataatcactcattttctcgttatattcaggtctgaattaaagttaagttaatcacacagtgttcaatttaagcttctttaatgttgatgaaaggtatttgtagttcatataaactatacttatgtgaaggatagcagatgcttcatataaattatcattttgatatacatatcttatggtttatgagaaaagagaaaaaataatacatcggttttgctac

SEQ ID NO: 405601 - DNA, 4829 bp, Homo sapiens
ccaagaggggcctggtacaagataagacagaattagaggatgaaaatcaagaaggcatgactgtgcacagttctgttcacagcaataacctcaactctatgccagctgctgaaaagggtaaagacacattaaaatcagcttatgatgatacagaaaatgacctaaaaggagcagctattcatatctcaaaaggaatgctccacgaagaaaagcctggagagcagattttggaaggtggctcagagagtgaatctgcacagaaagctgcagggaatcaaatgaatgacagaaagattcaacaggaatccctgggtagtgcaccactcatgggagatgaccaccctaacgcatccagagacagtgtggagggagacgctttggtaaatggggccaaactgcacacgctttcagtggagcatcaacgtgaggaattgaaagaggaattagttcttaaaactcaaaaccaacctagattctcctctccagatgagattgatttgcccagagaactggaagacgaggttcccattctgggaagaaatcttccctggcaacaagaaagagatgtggctgccacagccagtaagcaaatgagtgagaagataaggctctctgagggagaagccaaagaggactccttggatgaagagttttttcatcacaaggcaatgcagggcacagaggtaggacagacagaccaaactgacagcacaggaggaccagctttcctttctaaagtagaagaggatgattatccctctgaagaactactagaggatgaaaacgctataaatgcaaaacggtctaaagaaaaaaaccctgggaatcagggcaggcagtttgatgttaatctgcaagtccctgacagagcagttttagggaccattcatccagatccagaaattgaagaaagcaagcaagaaactagtatgattttggatagtgaaaaaacaagtgagactgctgccaaaggggtcaacacaggaggcagggaaccaaatacaatggtggaaaaagaacgccctctggcagataagaaagcacagagaccatttgaacgaagtgacttttctgacagcataaaaattcagactccagaattaggtgaagtgtttcagaataaagattctgattatctgaagaacgacaaccctgaggaacatctgaagacctcagggcttgcaggggagcctgagggagaactctcaaaagaggaccatgggaacacagagaagtacatgggcacagaaagccaggggtctgctgctgcagaacctgaagatgactcgttccactggactccacatacaagtgtagagccagggcatagtgacaagagggaggacttacttatcataagcagcttctttaaagaacaacagtctttgcagcggttccagaagtactttaatgtccatgagctggaagccttgctacaagaaatgtcatcaaaactgaagtcagcgcagcaggagagcctgccctataatatggaaaaagtcctagataaggtcttccgtgcttctgagtcacaaattctgagcatagcagaaaaaatgcttgatactcgtgtggctgaaaatagagatctgggaatgaacgaaaataacatatttgaagaggctgcagtgcttgatgacattcaagacctcatctattttgtcaggtacaagcactccacagcagaggagacagccacactggtgatggcaccacctctagaggaaggcttgggtggagcaatggaagagatgcaaccactgcatgaagataatttctcacgagagaagacagcagaacttaatgtgcaggttcctgaagaacccacccacttggaccaacgtgtgattggggacactcatgcctcagaagtgtcacagaagccaaatactgagaaagacctggacccagggccagttacaacagaagacactcctatggatgctattgatgcaaacaagcaaccagagacagccgccgaagagccggcaagtgtcacacctttggaaaacgcaatccttctaatatattcattcatgttttatttaactaagtcgctagttgctacattgcctgatgatgttcagcctgggcctgatttttatggactgccatggaaacctgtatttatcactgccttcttgggaattgcttcgtttgccattttcttatggagaactgtccttgttgtgaaggatagagtatatcaagtcacggaacagcaaatttctgagaagttgaagactatcatgaaagaaaatacagaacttgtacaaaaattgtcaaattatgaacagaagatcaaggaatcaaagaaacatgttcaggaaaccaggaaacaaaatatgattctctctgatgaagcaattaaatataaggataaaatcaagacacttgaaaaaaatcaggaaattctggatgacacagctaaaaatcttcgtgttatgctagaatctgagagagaacagaatgtcaagaatcaggacttgatatcagaaaacaagaaatctatagagaagttaaaggatgttatttcaatgaatgcctcagaattttcagaggttcagattgcacttaatgaagctaagcttagtgaagagaaggtgaagtctgaatgccatcgggttcaagaagaaaatgctaggcttaagaagaaaaaagagcagttgcagcaggaaatcgaagactggagtaaattacatgctgagctcagtgagcaaatcaaatcatttgagaagtctcagaaagatttggaagtagctcttactcacaaggatgataatattaatgctttgactaactgcattacacagttgaatctgttagagtgtgaatctgaatctgagggtcaaaataaaggtggaaatgattcagatgaattagcaaatggagaagtgggaggtgaccggaatgagaagatgaaaaatcaaattaagcagatgatggatgtctctcggacacagactgcaatatcggtagttgaagaggatctaaagcttttacagcttaagctaagagcctccgtgtccactaaatgtaacctggaagaccaggtaaagaaattggaagatgaccgcaactcactacaagctgccaaagctggactggaagatgaatgcaaaaccttgaggcagaaagtggagattctgaatgagctctatcagcagaaggagatggctttgcaaaagaaactgagtcaagaagagtatgaacggcaagaaagagagcacaggctgtcagctgcagatgaaaaggcagtttcggctgcagaggaagtaaaaacttacaagcggagaattgaagaaatggaggatgaattacagaagacagagcggtcatttaaaaaccagatcgctacccatgagaagaaagctcatgaaaactggctcaaagctcgtgctgcagaaagagctatagctgaagagaaaagggaagctgccaatttgagacacaaattattagaattaacacaaaagatggcaatgctgcaagaagaacctgtgattgtaaaaccaatgccaggaaaaccaaatacacaaaaccctccacggagaggtcctctgagccagaatggctcttttggcccatcccctgtgagtggtggagaatgctcccctccattgacagtggagccacccgtgagacctctctctgctactctcaatcgaagagatatgcctagaagtgaatttggatcagtggacgggcctctacctcatcctcgatggtcagctgaggcatctgggaaaccctctccttctgatccaggatctggtacagctaccatgatgaacagcagctcaagaggctcttcccctaccagggtactcgatgaaggcaaggttaatatggctccaaaagggccccctcctttcccaggagtccctctcatgagcacccccatgggaggccctgtaccaccacccattcgatatggaccaccacctcagctctgcggaccttttgggcctcggccacttcctccaccctttggccctggtatgcgtccaccactaggcttaagagaatttgcaccaggcgttccaccaggaagacgggacctgcctctccaccctcggggatttttacctggacacgcaccatttagacctttaggttcacttggcccaagagagtactttattcctggtacccgattaccacccccaacccatggtccccaggaatacccaccaccacctgctgtaagagacttactgccgtcaggctctagagatgagcctccacctgcctctcagagcactagccaggactgttcacaggctttaaaacagagcccataaaactatgacctctgaggtttcattggaaagaaagtgtactgtgcattatccattacagtaaaggatttcattggcttcaaaatccaaaagtttattttaaaaggtttgttgttagaactaagctgccttggcagtgtgcatttttgagccaaacaattcaaaaatgtcatttcttccctaaataaaaatcaccttttaagctagagcgtccttacaactttgaaatgtgcaataaagaatacctgtgttttagctaatgtagcatatgtaattgcaaaatgatttagaatgtcatgaaaaatatgaacatttcctgtggaaatgctttaagaacatgtatttccattatcctatttttagtgtacaccagctgaatacggagcaatggtgtttataagcgtttttttaaactatctggtcacaaagactgttacgctaaaaatgtttactaaaagatcactaaactatctcccctcttgctgaagttctttgtagtaatagctcataaaaatttgtttattaata

SEQ ID NO: 405602 - DNA, 4879 bp, Homo sapiens
ccaagaggggcctggtacaagataagacagaattagaggatgaaaatcaagaaggcatgactgtgcacagttctgttcacagcaataacctcaactctatgccagctgctgaaaagggtaaagacacattaaaatcagcttatgatgatacagaaaatgacctaaaaggagcagctattcatatctcaaaaggaatgctccacgaagaaaagcctggagagcagattttggaaggtggctcagagagtgaatctgcacagaaagctgcagggaatcaaatgaatgacagaaagattcaacaggaatccctgggtagtgcaccactcatgggagatgaccaccctaacgcatccagagacagtgtggagggagacgctttggtaaatggggccaaactgcacacgctttcagtggagcatcaacgtgaggaattgaaagaggaattagttcttaaaactcaaaaccaacctagattctcctctccagatgagattgatttgcccagagaactggaagacgaggttcccattctgggaagaaatcttccctggcaacaagaaagagatgtggctgccacagccagtaagcaaatgagtgagaagataaggctctctgagggagaagccaaagaggactccttggatgaagagttttttcatcacaaggcaatgcagggcacagaggtaggacagacagaccaaactgacagcacaggaggaccagctttcctttctaaagtagaagaggatgattatccctctgaagaactactagaggatgaaaacgctataaatgcaaaacggtctaaagaaaaaaaccctgggaatcagggcaggcagtttgatgttaatctgcaagtccctgacagagcagttttagggaccattcatccagatccagaaattgaagaaagcaagcaagaaactagtatgattttggatagtgaaaaaacaagtgagactgctgccaaaggggtcaacacaggaggcagggaaccaaatacaatggtggaaaaagaacgccctctggcagataagaaagcacagagaccatttgaacgaagtgacttttctgacagcataaaaattcagactccagaattaggtgaagtgtttcagaataaagattctgattatctgaagaacgacaaccctgaggaacatctgaagacctcagggcttgcaggggagcctgagggagaactctcaaaagaggaccatgggaacacagagaagtacatgggcacagaaagccaggggtctgctgctgcagaacctgaagatgactcgttccactggactccacatacaagtgtagagccagggcatagtgacaagagggaggacttacttatcataagcagcttctttaaagaacaacagtctttgcagcggttccagaagtactttaatgtccatgagctggaagccttgctacaagaaatgtcatcaaaactgaagtcagcgcagcaggagagcctgccctataatatggaaaaagtcctagataaggtcttccgtgcttctgagtcacaaattctgagcatagcagaaaaaatgcttgatactcgtgtggctgaaaatagagatctgggaatgaacgaaaataacatatttgaagaggctgcagtgcttgatgacattcaagacctcatctattttgtcaggtacaagcactccacagcagaggagacagccacactggtgatggcaccacctctagaggaaggcttgggtggagcaatggaagagatgcaaccactgcatgaagataatttctcacgagagaagacagcagaacttaatgtgcaggttcctgaagaacccacccacttggaccaacgtgtgattggggacactcatgcctcagaagtgtcacagaagccaaatactgagaaagacctggacccagggccagttacaacagaagacactcctatggatgctattgatgcaaacaagcaaccagagacagccgccgaagagccggcaagtgtcacacctttggaaaacgcaatccttctaatatattcattcatgttttatttaactaagtcgctagttgctacattgcctgatgatgttcagcctgggcctgatttttatggactgccatggaaacctgtatttatcactgccttcttgggaattgcttcgtttgccattttcttatggagaactgtccttgttgtgaaggatagagtatatcaagtcacggaacagcaaatttctgagaagttgaagactatcatgaaagaaaatacagaacttgtacaaaaattgtcaaattatgaacagaagatcaaggaatcaaagaaacatgttcaggaaaccaggaaacaaaatatgattctctctgatgaagcaattaaatataaggataaaatcaagacacttgaaaaaaatcaggaaattctggatgacacagctaaaaatcttcgtgttatgctagaatctgagagagaacagaatgtcaagaatcaggacttgatatcagaaaacaagaaatctatagagaagttaaaggatgttatttcaatgaatgcctcagaattttcagaggttcagattgcacttaatgaagctaagcttagtgaagagaaggtgaagtctgaatgccatcgggttcaagaagaaaatgctaggcttaagaagaaaaaagagcagttgcagcaggaaatcgaagactggagtaaattacatgctgagctcagtgagcaaatcaaatcatttgagaagtctcagaaagatttggaagtagctcttactcacaaggatgataatattaatgctttgactaactgcattacacagttgaatctgttagagtgtgaatctgaatctgagggtcaaaataaaggtggaaatgattcagatgaattagcaaatggagaagtgggaggtgaccggaatgagaagatgaaaaatcaaattaagcagatgatggatgtctctcggacacagactgcaatatcggtagttgaagaggatctaaagcttttacagcttaagctaagagcctccgtgtccactaaatgtaacctggaagaccaggtaaagaaattggaagatgaccgcaactcactacaagctgccaaagctggactggaagatgaatgcaaaaccttgaggcagaaagtggagattctgaatgagctctatcagcagaaggagatggctttgcaaaagaaactgagtcaagaagagtatgaacggcaagaaagagagcacaggctgtcagctgcagatgaaaaggcagtttcggctgcagaggaagtaaaaacttacaagcggagaattgaagaaatggaggatgaattacagaagacagagcggtcatttaaaaaccagatcgctacccatgagaagaaagctcatgaaaactggctcaaagctcgtgctgcagaaagagctatagctgaagagaaaagggaagctgccaatttgagacacaaattattagaattaacacaaaagatggcaatgctgcaagaagaacctgtgattgtaaaaccaatgccaggaaaaccaaatacacaaaaccctccacggagaggtcctctgagccagaatggctcttttggcccatcccctgtgagtggtggagaatgctcccctccattgacagtggagccacccgtgagacctctctctgctactctcaatcgaagagatatgcctagaagtgaatttggatcagtggacgggcctctacctcatcctcgatggtcagctgaggcatctgggaaaccctctccttctgatccaggatctggtacagctaccatgatgaacagcagctcaagaggctcttcccctaccagggtactcgatgaaggcaaggttaatatggctccaaaagggccccctcctttcccaggagtccctctcatgagcacccccatgggaggccctgtaccaccacccattcgatatggaccaccacctcagctctgcggaccttttgggcctcggccacttcctccaccctttggccctggtatgcgtccaccactaggcttaagagaatttgcaccaggcgttccaccaggaagacgggacctgcctctccaccctcggggatttttacctggacacgcaccatttagacctttaggttcacttggcccaagagagtactttattcctggtacccgattaccacccccaacccatggtccccaggaatacccaccaccacctgctgtaagagacttactgccgtcaggctctagagatgagcctccacctgcctctcagagcactagccaggactgttcacaggctttaaaacagagcccataaaactatgacctctgaggtttcattggaaagaaagtgtactgtgcattatccattacagtaaaggatttcattggcttcaaaatccaaaagtttattttaaaaggtttgttgttagaactaagctgccttggcagtgtgcatttttgagccaaacaattcaaaaatgtcatttcttccctaaataaaaatcaccttttaagctagagcgtccttacaactttgaaatgtgcaataaagaatacctgtgttttagctaatgtagcatatgtaattgcaaaatgatttagaatgtcatgaaaaatatgaacatttcctgtggaaatgctttaagaacatgtatttccattatcctatttttagtgtacaccagctgaatacggagcaatggtgtttataagcgtttttttaaactatctggtcacaaagactgttacgctaaaaatgtttactaaaagatcactaaactatctcccctcttgctgaagttctttgtagtaatagctcataaaaatttgtttattaataaaaaaaaaaaagaacatgccgtccgctgtatagtcatcctaggaggcgcg

SEQ ID NO: 405603 - DNA, 5565 bp, Homo sapiens
ccaagaggggcctggtacaagataagacagaattagaggatgaaaatcaagaaggcatgactgtgcacagttctgttcacagcaataacctcaactctatgccagctgctgaaaagggtaaagacacattaaaatcagcttatgatgatacagaaaatgacctaaaaggagcagctattcatatctcaaaaggaatgctccacgaagaaaagcctggagagcagattttggaaggtggctcagagagtgaatctgcacagaaagctgcagggaatcaaatgaatgacagaaagattcaacaggaatccctgggtagtgcaccactcatgggagatgaccaccctaacgcatccagagacagtgtggagggagacgctttggtaaatggggccaaactgcacacgctttcagtggagcatcaacgtgaggaattgaaagaggaattagttcttaaaactcaaaaccaacctagattctcctctccagatgagattgatttgcccagagaactggaagacgaggttcccattctgggaagaaatcttccctggcaacaagaaagagatgtggctgccacagccagtaagcaaatgagtgagaagataaggctctctgagggagaagccaaagaggactccttggatgaagagttttttcatcacaaggcaatgcagggcacagaggtaggacagacagaccaaactgacagcacaggaggaccagctttcctttctaaagtagaagaggatgattatccctctgaagaactactagaggatgaaaacgctataaatgcaaaacggtctaaagaaaaaaaccctgggaatcagggcaggcagtttgatgttaatctgcaagtccctgacagagcagttttagggaccattcatccagatccagaaattgaagaaagcaagcaagaaactagtatgattttggatagtgaaaaaacaagtgagactgctgccaaaggggtcaacacaggaggcagggaaccaaatacaatggtggaaaaagaacgccctctggcagataagaaagcacagagaccatttgaacgaagtgacttttctgacagcataaaaattcagactccagaattaggtgaagtgtttcagaataaagattctgattatctgaagaacgacaaccctgaggaacatctgaagacctcagggcttgcaggggagcctgagggagaactctcaaaagaggaccatgggaacacagagaagtacatgggcacagaaagccaggggtctgctgctgcagaacctgaagatgactcgttccactggactccacatacaagtgtagagccagggcatagtgacaagagggaggacttacttatcataagcagcttctttaaagaacaacagtctttgcagcggttccagaagtactttaatgtccatgagctggaagccttgctacaagaaatgtcatcaaaactgaagtcagcgcagcaggagagcctgccctataatatggaaaaagtcctagataaggtcttccgtgcttctgagtcacaaattctgagcatagcagaaaaaatgcttgatactcgtgtggctgaaaatagagatctgggaatgaacgaaaataacatatttgaagaggctgcagtgcttgatgacattcaagacctcatctattttgtcaggtacaagcactccacagcagaggagacagccacactggtgatggcaccacctctagaggaaggcttgggtggagcaatggaagagatgcaaccactgcatgaagataatttctcacgagagaagacagcagaacttaatgtgcaggttcctgaagaacccacccacttggaccaacgtgtgattggggacactcatgcctcagaagtgtcacagaagccaaatactgagaaagacctggacccagggccagttacaacagaagacactcctatggatgctattgatgcaaacaagcaaccagagacagccgccgaagagccggcaagtgtcacacctttggaaaacgcaatccttctaatatattcattcatgttttatttaactaagtcgctagttgctacattgcctgatgatgttcagcctgggcctgatttttatggactgccatggaaacctgtatttatcactgccttcttgggaattgcttcgtttgccattttcttatggagaactgtccttgttgtgaaggatagagtatatcaagtcacggaacagcaaatttctgagaagttgaagactatcatgaaagaaaatacagaacttgtacaaaaattgtcaaattatgaacagaagatcaaggaatcaaagaaacatgttcaggaaaccaggaaacaaaatatgattctctctgatgaagcaattaaatataaggataaaatcaagacacttgaaaaaaatcaggaaattctggatgacacagctaaaaatcttcgtgttatgctagaatctgagagagaacagaatgtcaagaatcaggacttgatatcagaaaacaagaaatctatagagaagttaaaggatgttatttcaatgaatgcctcagaattttcagaggttcagattgcacttaatgaagctaagcttagtgaagagaaggtgaagtctgaatgccatcgggttcaagaagaaaatgctaggcttaagaagaaaaaagagcagttgcagcaggaaatcgaagactggagtaaattacatgctgagctcagtgagcaaatcaaatcatttgagaagtctcagaaagatttggaagtagctcttactcacaaggatgataatattaatgctttgactaactgcattacacagttgaatctgttagagtgtgaatctgaatctgagggtcaaaataaaggtggaaatgattcagatgaattagcaaatggagaagtgggaggtgaccggaatgagaagatgaaaaatcaaattaagcagatgatggatgtctctcggacacagactgcaatatcggtagttgaagaggatctaaagcttttacagcttaagctaagagcctccgtgtccactaaatgtaacctggaagaccaggtaaagaaattggaagatgaccgcaactcactacaagctgccaaagctggactggaagatgaatgcaaaaccttgaggcagaaagtggagattctgaatgagctctatcagcagaaggagatggctttgcaaaagaaactgagtcaagaagagtatgaacggcaagaaagagagcacaggctgtcagctgcagatgaaaaggcagtttcggctgcagaggaagtaaaaacttacaagcggagaattgaagaaatggaggatgaattacagaagacagagcggtcatttaaaaaccagatcgctacccatgagaagaaagctcatgaaaactggctcaaagctcgtgctgcagaaagagctatagctgaagagaaaagggaagctgccaatttgagacacaaattattagaattaacacaaaagatggcaatgctgcaagaagaacctgtgattgtaaaaccaatgccaggaaaaccaaatacacaaaaccctccacggagaggtcctctgagccagaatggctcttttggcccatcccctgtgagtggtggagaatgctcccctccattgacagtggagccacccgtgagacctctctctgctactctcaatcgaagagatatgcctagaagtgaatttggatcagtggacgggcctctacctcatcctcgatggtcagctgaggcatctgggaaaccctctccttctgatccaggatctggtacagctaccatgatgaacagcagctcaagaggctcttcccctaccagggtactcgatgaaggcaaggttaatatggctccaaaagggccccctcctttcccaggagtccctctcatgagcacccccatgggaggccctgtaccaccacccattcgatatggaccaccacctcagctctgcggaccttttgggcctcggccacttcctccaccctttgataaagatggcaggccaggcacagtggctcacgcctgtaatcccagcactttatgaatcccagcattcattagacgaggctgaggcaggtggatcccttgagcctaggagtttgagaccagcctgggcaacatggtgaaacccccatctctacaaaaaatccaaaaattagctgggagtggtggcgtgcacctgtagtcccagctactggggagtctgaggtgggaggattgattgagtccgggagattgaggctgcagtgagccatgatcactcattacactccagcccatgtgacaggcaagaccctgtctcagaaaaaaagaatttgctgttaggtcatgctgttttgtaatagtgattctctatgattagctggtaatttgctgatgatttatttaaagaaatggcattggaaccaacaaactcagtgtttttttgttaatgtttgcattttctataagtttgcacgttaaaacgtttaacaaactgtattaaaatcccagagagattatcagactgtcttttgctattataattgaatttaggatgaataaagtgagcttaattatagattcactttattgtgtttggttacagtaacaattgctcgagcaattgaactaaaacatgctcctggactaattgctgcactggcgtatgaaacagccaatttctatcaaaaagctgatcatactttatccagtttggagcctgcatattctgccaaatggagagaatatcttcacttgaagatgtgtttctacacagcttatgcttactgttaccatggtgagactttattggctagtgataaatgcggtgaagcaatcaggtctctccaagaagcagaaaaattgtatgcaaaggcagaagcactgtgtaaagaatatggagaaaccaaaggacctggaccaacagtcaaaccttcaggacatctgttctttaggaaacttggaaaccttgtgaagaacaccctagaaaaatgtcagagagaaaatggatttatttactttcaaaaaattccaacagaagccccacagctggaactcaaagcaaattatggtctcgtagagcctatacctttcgaatttcctcctacaagtgttcagtggacaccagaaacattggctgcatttgatctcaccaaaagacccaaggatgacagtactaaacccaaaccagaagaagaagtgaaacctgtgaaagaaccagacatcaaacctcaaaaggacactgggtgctacatctcctaaaatacaacttgcacttagaatttctctagcagtaaataagataaaccacagaatttcagttcttatttctcaaaatgatttctctgaagcttgtagaataactatatattcagagggttatctgccttcagcttacttgttcttaatttttaatacagcggagatgtttcttgctttgttttcagactctcctttttaatcaggacaacatttgaaagattttattgtgcctctaaagggtatatttgggggttgggtctttttgttaaactctggatagtaataagtttcaggtcagtataggcccgaatcatgtg

SEQ ID NO: 405604 - DNA, 3866 bp, Homo sapiens
  misc_feature (3778)..(3778): n is a, c, g, or t
  misc_feature (3802)..(3802): n is a, c, g, or t
  misc_feature (3858)..(3858): n is a, c, g, or t
ccaagaggggcctggtacaagataagacagaattagaggatgaaaatcaagaaggcatgactgtgcacagttctgttcacagcaataacctcaactctatgccagctgctgaaaagggtaaagacacattaaaatcagcttatgatgatacagaaaatgacctaaaaggagcagctattcatatctcaaaaggaatgctccacgaagaaaagcctggagagcagattttggaaggtggctcagagagtgaatctgcacagaaagctgcagggaatcaaatgaatgacagaaagattcaacaggaatccctgggtagtgcaccactcatgggagatgaccaccctaacgcatccagagacagtgtggagggagacgctttggtaaatggggccaaactgcacacgctttcagtggagcatcaacgtgaggaattgaaagaggaattagttcttaaaactcaaaaccaacctagattctcctctccagatgagattgatttgcccagagaactggaagacgaggttcccattctgggaagaaatcttccctggcaacaagaaagagatgtggctgccacagccagtaagcaaatgagtgagaagataaggctctctgagggagaagccaaagaggactccttggatgaagagttttttcatcacaaggcaatgcagggcacagaggtaggacagacagaccaaactgacagcacaggaggaccagctttcctttctaaagtagaagaggatgattatccctctgaagaactactagaggatgaaaacgctataaatgcaaaacggtctaaagaaaaaaaccctgggaatcagggcaggcagtttgatgttaatctgcaagtccctgacagagcagttttagggaccattcatccagatccagaaattgaagaaagcaagcaagaaactagtatgattttggatagtgaaaaaacaagtgagactgctgccaaaggggtcaacacaggaggcagggaaccaaatacaatggtggaaaaagaacgccctctggcagataagaaagcacagagaccatttgaacgaagtgacttttctgacagcataaaaattcagactccagaattaggtgaagtgtttcagaataaagattctgattatctgaagaacgacaaccctgaggaacatctgaagacctcagggcttgcaggggagcctgagggagaactctcaaaagaggaccatgggaacacagagaagtacatgggcacagaaagccaggggtctgctgctgcagaacctgaagatgactcgttccactggactccacatacaagtgtagagccagggcatagtgacaagagggaggacttacttatcataagcagcttctttaaagaacaacagtctttgcagcggttccagaagtactttaatgtccatgagctggaagccttgctacaagaaatgtcatcaaaactgaagtcagcgcagcaggagagcctgccctataatatggaaaaagtcctagataaggtcttccgtgcttctgagtcacaaattctgagcatagcagaaaaaatgcttgatactcgtgtggctgaaaatagagatctgggaatgaacgaaaataacatatttgaagaggctgcagtgcttgatgacattcaagacctcatctattttgtcaggtacaagcactccacagcagaggagacagccacactggtgatggcaccacctctagaggaaggcttgggtggagcaatggaagagatgcaaccactgcatgaagataatttctcacgagagaagacagcagaacttaatgtgcaggttcctgaagaacccacccacttggaccaacgtgtgattggggacactcatgcctcagaagtgtcacagaagccaaatactgagaaagacctggacccagggccagttacaacagaagacactcctatggatgctattgatgcaaacaagcaaccagagacagccgccgaagagccggcaagtgtcacacctttggaaaacgcaatccttctaatatattcattcatgttttatttaactaagtcgctagttgctacattgcctgatgatgttcagcctgggcctgatttttatggactgccatggaaacctgtatttatcactgccttcttgggaattgcttcgtttgccattttcttatggagaactgtccttgttgtgaaggatagagtatatcaagtcacggaacagcaaatttctgagaagttgaagactatcatgaaagaaaatacagaacttgtacaaaaattgtcaaattatgaacagaagatcaaggaatcaaagaaacatgttcaggaaaccaggaaacaaaatatgattctctctgatgaagcaattaaatataaggataaaatcaagacacttgaaaaaaatcaggaaattctggatgacacagctaaaaatcttcgtgttatgctagaatctgagagagaacagaatgtcaagaatcaggacttgatatcagaaaacaagaaatctatagagaagttaaaggatgttatttcaatgaatgcctcagaattttcagaggttcagattgcacttaatgaagctaagcttagtgaagagaaggtgaagtctgaatgccatcgggttcaagaagaaaatgctaggcttaagaagaaaaaagagcagttgcagcaggaaatcgaagactggagtaaattacatgctgagctcagtgagcaaatcaaatcatttgagaagtctcagaaagatttggaagtagctcttactcacaaggatgataatattaatgctttgactaactgcattacacagttgaatctgttagagtgtgaatctgaatctgagggtcaaaataaaggtggaaatgattcagatgaattagcaaatggagaagtgggaggtgaccggaatgagaagatgaaaaatcaaattaagcagatgatggatgtctctcggacacagactgcaatatcggtagttgaagaggatctaaagcttttacagcttaagctaagagcctccgtgtccactaaatgtaacctggaagaccaggtaaagaaattggaagatgaccgcaactcactacaagctgccaaagctggactggaagatgaatgcaaaaccttgaggcagaaagtggagattctgaatgagctctatcagcagaaggagatggctttgcaaaagaaactgagtcaagaagagtatgaacggcaagaaagagagcacaggctgtcagctgcagatgaaaaggcagtttcggctgcagaggaagtaaaaacttacaagcggagaattgaagaaatggaggatgaattacagaagacagagcggtcatttaaaaaccagatcgctacccatgagaagaaagctcatgaaaactggctcaaagctcgtgctgcagaaagagctatagctgaagagaaaagggaagctgccaatttgagacacaaattattagaattaacacaaaagatggcaatgctgcaagaagaacctgtgattgtaaaaccaatgccaggaaaaccaaatacacaaaaccctccacggagaggtcctctgagccagaatggctcttttggcccatcccctgtgagtggtggagaatgctcccctccattgacagtggagccacccgtgagacctctctctgctactctcaatcgaagagatatgcctagaagtgaatttggatcagtggacgggcctctacctcatcctcgatggtcagctgaggcatctgggaaaccctctccttctgatcccaggatctgggnccagctacccatgatgaaccacanctcaaggaagcttctttccccttaccaagggtaccttcgatggaaaggccaagggnttaattat

SEQ ID NO: 405605 - DNA, 1971 bp, Homo sapiens
aacaggaagtgggcgctcagagctcgggggcggcgctcagttgtccaaccaaaatctagtactttgctattcaaaagtgtctggggaccagcagcatcagcatctcaggtcctgccccaggctattgaattagagcctgcattggacaaaaccacccacccccagaaaacatctggagaaaatgacccattggtttcataggaacccattaaaagccacagctcctgtgtcttttaattactatggtgtagtcactggcccttctgcttcaaaaatatgcaagcacctaccaaattctggatatacagcctctactctcttggtgcttaccatttaaatttagtctttctttaatggtttacacatatttcaagggtctttggtcatacccatgtattgtaatttcggaagcctcactaagctaattgccttctggattcgatttggaactggaatagaaccaagtgaaagctaatgatggagatctaggaattgatatagttgaagctatactaatagtgacttgaggtcatccagggcacgactccttgaactgttcactgatttgagctgtaatccagaaatgatgaagaatgcagcagattcatatttctcacttttacaaggtttcataaattctttggatgaatctacccaagaaagcaagttacgatatattcaaaatttcaagtggactgatacattgcaaggacaggttccaagtgcccagcaggatgctgtttttgaattaatttccatgggatttaatgtagctttatggtataccaaatatgcttcaagactggctggaaaagaaaatataacagaagatgaagcaaaagaagttcatcgaagcctaaagattgcagctgggatttttaaacatttaaaggaaagtcatctcccaaaactcattacacctgcggaaaaaggaagagatttagagtcacgactcatagaagcatacgttattcaatgtcaggctgaagctcaagaagtaacaattgctcgagcaattgaactaaaacatgctcctggactaattgctgcactggcgtatgaaacagccaatttctatcaaaaagctgatcatactttatccagtttggagcctgcatattctgccaaatggagagaatatcttcacttgaagatgtgtttctacacagcttatgcttactgttaccatggtgagactttattggctagtgataaatgcggtgaagcaatcaggtctctccaagaagcagaaaaattgtatgcaaaggcagaagcactgtgtaaagaatatggagaaaccaaaggacctggaccaacagtcaaaccttcaggacatctgttctttaggaaacttggaaaccttgtgaagaacaccctagaaaaatgtcagagagaaaatggatttatttactttcaaaaaattccaacagaagccccacagctggaactcaaagcaaattatggtctcgtagagcctatacctttcgaatttcctcctacaagtgttcagtggacaccagaaacattggctgcatttgatctcaccaaaagacccaaggatgacagtactaaacccaaaccagaagaagaagtgaaacctgtgaaagaaccagacatcaaacctcaaaaggacactgggtgctacatctcctaaaatacaacttgcacttagaatttctctagcagtaaataagataaaccacagaatttcagttcttatttctcaaaatgatttctctgaagcttgtagaataactatatattcagagggttatctgccttcagcttacttgttcttaatttttaatacagcggagatgtttcttgctttgttttcagactctcctttttaatcaggacaacatttgaaagattttattgtgcctctaaagggtatatttgggggttgggtctttttgttaaactctggatagtaataagtttcaggtcagtataggcccgaatcatgtg

SEQ ID NO: 405606 - DNA, 1881 bp, Homo sapiens
aaaaccctcaaccctcaccttggaaatacaaagaagggagatatgaaagagaaggtagaatttaacagctatctaatgaatgctgctgaatttaattagatggagctggaaagccttttccagcagggcaagcaccttaatttttatggcatttattaggtacatcttgagctactgcataaatttttaactgatacacagtagttaatggaatttatcaaaatttttattgcaatgaagccatatttagtctgtcttcttggtatggtatatagtacttccaagtacaaatctatctctctttttcagataaagatggcaggccaggcacagtggctcacgcctgtaatcccagcactttatgaatcccagcattcattagacgaggctgaggcaggtggatcccttgagcctaggagtttgagaccagcctgggcaacatggtgaaacccccatctctacaaaaaatccaaaaattagctgggagtggtggcgtgcacctgtagtcccagctactggggagtctgaggtgggaggattgattgagtccgggagattgaggctgcagtgagccatgatcactcattacactccagcccatgtgacaggcaagaccctgtctcagaaaaaaagaatttgctgttaggtcatgctgttttgtaatagtgattctctatgattagctggtaatttgctgatgatttatttaaagaaatggcattggaaccaacaaactcagtgtttttttgttaatgtttgcattttctataagtttgcacgttaaaacgtttaacaaactgtattaaaatcccagagagattatcagactgtcttttgctattataattgaatttaggatgaataaagtgagcttaattatagattcactttattgtgtttggttacagtaacaattgctcgagcaattgaactaaaacatgctcctggactaattgctgcactggcgtatgaaacagccaatttctatcaaaaagctgatcatactttatccagtttggagcctgcatattctgccaaatggagagaatatcttcacttgaagatgtgtttctacacagcttatgcttactgttaccatggtgagactttattggctagtgataaatgcggtgaagcaatcaggtctctccaagaagcagaaaaattgtatgcaaaggcagaagcactgtgtaaagaatatggagaaaccaaaggacctggaccaacagtcaaaccttcaggacatctgttctttaggaaacttggaaaccttgtgaagaacaccctagaaaaatgtcagagagaaaatggatttatttactttcaaaaaattccaacagaagccccacagctggaactcaaagcaaattatggtctcgtagagcctatacctttcgaatttcctcctacaagtgttcagtggacaccagaaacattggctgcatttgatctcaccaaaagacccaaggatgacagtactaaacccaaaccagaagaagaagtgaaacctgtgaaagaaccagacatcaaacctcaaaaggacactgggtgctacatctcctaaaatacaacttgcacttagaatttctctagcagtaaataagataaaccacagaatttcagttcttatttctcaaaatgatttctctgaagcttgtagaataactatatattcagagggttatctgccttcagcttacttgttcttaatttttaatacagcggagatgtttcttgctttgttttcagactctcctttttaatcaggacaacatttgaaagattttattgtgcctctaaagggtatatttgggggttgggtctttttgttaaactctggatagtaataagtttcaggtcagtataggcccgaatcatgtg

SEQ ID NO: 405607 - DNA, 1021 bp, Homo sapiens
  misc_feature (979)..(979): n is a, c, g, or t
  misc_feature (985)..(986): n is a, c, g, or t
  misc_feature (990)..(990): n is a, c, g, or t
  misc_feature (1003)..(1003): n is a, c, g, or t
gacgtgttttataggcggcataaagcgaaagtgcaggcagctgtggaaggcgaagttcaatcccagagtccgccccctgaattggggcctttccggaggaggaagctctgaaaaacagggggcccagtgccattccgcagggaattgtcgcttgcgttcagctgttctacacaatggactcagtacctgccactgtgccttctatcgccgctaccccgggggacccggaacttgtgggacccttgtctgtgctctacgcagccttcatagccaagctgctggagctagttgctacattgcctgatgatgttcagcctgggcctgatttttatggactgccatggaaacctgtatttatcactgccttcttgggaattgcttcgtttgccattttcttatggagaactgtccttgttgtgaaggatagagtatatcaagtcacggaacagcaaatttctgagaagttgaagactatcatgaaagaaaatacagaacttgtacaaaaattgtcaaattatgaacagaagatcaaggaatcaaagaaacatgttcaggaaaccaggaaacaaaatatgattctctctgatgaagcaattaaatataaggataaaatcaagacacttgaaaaaaatcaggaaattctggatgacacagctaaaaatcttcgtgttatgctagaatctgagagagaacagaatgtcaagaatcaggacttgatatcagaaaacaagaaatctatagagaagttaaaggatgttatttcaatgaatgcctcagaattttcagaggttcagattgcacttaatgaagctaagcttagtgaagagaaggtgaagtctgaatgccatcgggttcaagaagaaaatgctaggcttaagaagaaaaaagagcagttgcagcaggaaatcgaagactggagtaaattacatgctgagctcagtgagcaaatcaaatcatttgagaagtctcagaaaaaagnggaaanntttnttttttttttttngggggggggggggggaaa

SEQ ID NO: 405608 - DNA, 1496 bp, Homo sapiens
ggttcttccacttaaaaggtataatggggtgtccttttatttttggaaattaaaggaattttactttccccaaaaaaaaaaaaaaaagaaattagccaggtgccatggcatgcatgtgtagtctcagccactcaggagactgaggcagcaggatcacttgagcctgagagtttgaggctgcagtaagccatgatcaagccactgcactccatcctgggtgacagcaagaccctgtctcagaaaaaaagaatttgctgttaggtcatgctgttttgtaatagtgattctctatgattagctggtaatttgctgatgatttatttaaagaaatggcattggaaccaacaaactcagtgtttttttgttaatgtttgcattttctataagtttgcacgttaaaacgtttaacaaactgtattaaaatcccagagagattatcagactgtcttttgctattataattgaatttaggatgaataaagtgagcttaattatagattcactttattgtgtttggttacagtaacaattgctcgagcaattgaactaaaacatgctcctggactaattgctgcactggcgtatgaaacagccaatttctatcaaaaagctgatcatactttatccagtttggagcctgcatattctgccaaatggagagaatatcttcacttgaagatgtgtttctacacagcttatgcttactgttaccatggtgagactttattggctagtgataaatgcggtgaagcaatcaggtctctccaagaagcagaaaaattgtatgcaaaggcagaagcactgtgtaaagaatatggagaaaccaaaggacctggaccaacagtcaaaccttcaggacatctgttctttaggaaacttggaaaccttgtgaagaacaccctagaaaaatgtcagagagaaaatggatttatttactttcaaaaaattccaacagaagccccacagctggaactcaaagcaaattatggtctcgtagagcctatacctttcgaatttcctcctacaagtgttcagtggacaccagaaacattggctgcatttgatctcaccaaaagacccaaggatgacagtactaaacccaaaccagaagaagaagtgaaacctgtgaaagaaccagacatcaaacctcaaaaggacactgggtgctacatctcctaaaatacaacttgcacttagaatttctctagcagtaaataagataaaccacagaatttcagttcttatttctcaaaatgatttctctgaagcttgtagaataactatatattcagagggttatctgccttcagcttacttgttcttaatttttaatacagcggagatgtttcttgctttgttttcagactctcctttttaatcaggacaacatttgaaagattttattgtgcctctaaagggtatatttgggggttgggtctttttgttaaactctggatagtaataagtttcaggtcagtataggcccgaatcatgtg

SEQ ID NO: 405609 - DNA, 2436 bp, Homo sapiens
ccaagaggggcctggtacaagataagacagaattagaggatgaaaatcaagaaggcatgactgtgcacagttctgttcacagcaataacctcaactctatgccagctgctgaaaagggtaaagacacattaaaatcagcttatgatgatacagaaaatgacctaaaaggagcagctattcatatctcaaaaggaatgctccacgaagaaaagcctggagagcagattttggaaggtggctcagagagtgaatctgcacagaaagctgcagggaatcaaatgaatgacagaaagattcaacaggaatccctgggtagtgcaccactcatgggagatgaccaccctaacgcatccagagacagtgtggagggagacgctttggtaaatggggccaaactgcacacgctttcagtggagcatcaacgtgaggaattgaaagaggaattagttcttaaaactcaaaaccaacctagattctcctctccagatgagattgatttgcccagagaactggaagacgaggttcccattctgggaagaaatcttccctggcaacaagaaagagatgtggctgccacagccagtaagcaaatgagtgagaagataaggctctctgagggagaagccaaagaggactccttggatgaagagttttttcatcacaaggcaatgcagggcacagaggtaggacagacagaccaaactgacagcacaggaggaccagctttcctttctaaagtagaagaggatgattatccctctgaagaactactagaggatgaaaacgctataaatgcaaaacggtctaaagaaaaaaaccctgggaatcagggcaggcagtttgatgttaatctgcaagtccctgacagagcagttttagggaccattcatccagatccagaaattgaagaaagcaagcaagaaactagtatgattttggatagtgaaaaaacaagtgagactgctgccaaaggggtcaacacaggaggcagggaaccaaatacaatggtggaaaaagaacgccctctggcagataagaaagcacagagaccatttgaacgaagtgacttttctgacagcataaaaattcagactccagaattaggtgaagtgtttcagaataaagattctgattatctgaagaacgacaaccctgaggaacatctgaagacctcagggcttgcaggggagcctgagggagaactctcaaaagaggaccatgggaacacagagaagtacatgggcacagaaagccaggggtctgctgctgcagaacctgaagatgactcgttccactggactccacatacaagtgtagagccagggcatagtgacaagagggaggacttacttatcataagcagcttctttaaagaacaacagtctttgcagcggttccagaagtactttaatgtccatgagctggaagccttgctacaagaaatgtcatcaaaactgaagtcagcgcagcaggagagcctgccctataatatggaaaaagtcctagataaggtcttccgtgcttctgagtcacaaattctgagcatagcagaaaaaatgcttgatactcgtgtggctgaaaatagagatctgggaatgaacgaaaataacatatttgaagaggctgcagtgcttgatgacattcaagacctcatctattttgtcaggtacaagcactccacagcagaggagacagccacactggtgatggcaccacctctagaggaaggcttgggtggagcaatggaagagatgcaaccactgcatgaagataatttctcacgagagaagacagcagaacttaatgtgcaggttcctgaagaacccacccacttggaccaacgtgtgattggggacactcatgcctcagaagtgtcacagaagccaaatactgagaaagacctggacccagggccagttacaacagaagacactcctatggatgctattgatgcaaacaagcaaccagagacagccgccgaagagccggcaagtgtcacacctttggaaaacgcaatccttctaatatattcattcatgttttatttaactaagtcggtaagtttaacatagtttttttttaactaaaatgttgattattacagtttttaagttgattttgagcatgaggtgaagaacttaaaatgtctttatgaacctgactcctgatcctttgaagagagaccctgaaatgagccacaggtgtgtggctttaatgggctcttagttcagcacatgaggaggctttgctgcatgctggagctgggcacaagcacacctgtcaaacgtggttcttcctttcagggacctttcagtttagccaggagagaaagacagtcacttgaaatgtaacatgataatgggcaggaagagaagtatttacctgatggtagaacaatctgtggcataaattggttcatcgtggagggagagtgat

SEQ ID NO: 405610 - DNA, 546 bp, Homo sapiens
ggacatgttctaaaaagctctttcattggctgtctttatcatggtaccagccttggattgagaaacagcccataagaaaattaattagtggtctttccatggttagaaataagagaattatctcctgcatcatcctaataagcttaactgtgttaggttgatcagtcctggctttctacattgaagaaaagtgagcatcatttcaacccaacagtctttgacacatagtgttttttcacatttgtttcatttactagtgaggagagaattatgagacgttagaaaatgcaggtgatgtatcaacaggccacagttggatttttatcctaaaggacagttttatttccttcctgtgactttgtataatctatgcatttttaagaataggataggaagtgagattttattggagtattcagacagaatgccaggaggaaaagagaaacactttcattgacaaccagttttatcttaggaaactgagtcaagaagagtatgaacggcaagaaagagagcacaggctgtcagctgcagatgaaaaggcag

SEQ ID NO: 405611 - DNA, 653 bp, Homo sapiens
atggaggatgaattacagaagacagagcggtcatttaaaaaccaggtaataattctagtgccctactatatagtgcccggaattctttgataactaatagaggctattataatgaatctgtatgcatattttgtgatgtattatctttttcagatcgctacccatgagaagaaagctcatgaaaactgggtaagatttctttttttctttcccttattttgtgcatagtctcccacaactgaatttggatatttttcttcaatagctcaaagctcgtgctgcagaaagagctatagctgaagagaaaagggaagctgccaatttgagacacaagtatgtggattttgatggctatattttcagcgcgtgttctcttaaggaattggtttctatttcatatttaactctttcttaaatattctttctctatattcaagattattagaattaacacaaaagatggcaatgctgcaagaagaacctgtgattgtaaaaccaatgccaggaaaaccaaatacacaaaaccctccacggagaggtaagggagctaccttgtaaagggcaacaatctgttttttgatgtaaaatgtatataagtgactttttgtttctgtgtgtaatggttatggtaccctaggaataatcccaagaac

SEQ ID NO: 405612 - DNA, 426 bp, Homo sapiens
gaaaaacagggggcccagtgccattccgcagggaattgtcgcttgcgttcagctgttctacacaatggactcagtacctgccactgtgccttctatcgccgctaccccgggggacccggaacttgtgggacccttgtctgtgctctacgcagccttcatagccaagctgctggaggtgacagtcccgattcccggggagggacccaagctgtcacaggcgggtggatgagttctaagcagagtgggtgcactgattgtctgtgcaaaggagaaatggagtgtgtcagatccgaggaaagcaagacgtttctatgctgtttagggaggcaggtgggagtgtgtttgagaaggtttcgtcactcttttttttttttttattgagtacttacgaagtgacagcactttatgttctggtgtgaagtcatg

SEQ ID NO: 405613 - DNA, 6859 bp, Homo sapiens
ccaagaggggcctggtacaagataagacagaattagaggatgaaaatcaagaaggcatgactgtgcacagttctgttcacagcaataacctcaactctatgccagctgctgaaaagggtaaagacacattaaaatcagcttatgatgatacagaaaatgacctaaaaggagcagctattcatatctcaaaaggaatgctccacgaagaaaagcctggagagcagattttggaaggtggctcagagagtgaatctgcacagaaagctgcagggaatcaaatgaatgacagaaagattcaacaggaatccctgggtagtgcaccactcatgggagatgaccaccctaacgcatccagagacagtgtggagggagacgctttggtaaatggggccaaactgcacacgctttcagtggagcatcaacgtgaggaattgaaagaggaattagttcttaaaactcaaaaccaacctagattctcctctccagatgagattgatttgcccagagaactggaagacgaggttcccattctgggaagaaatcttccctggcaacaagaaagagatgtggctgccacagccagtaagcaaatgagtgagaagataaggctctctgagggagaagccaaagaggactccttggatgaagagttttttcatcacaaggcaatgcagggcacagaggtaggacagacagaccaaactgacagcacaggaggaccagctttcctttctaaagtagaagaggatgattatccctctgaagaactactagaggatgaaaacgctataaatgcaaaacggtctaaagaaaaaaaccctgggaatcagggcaggcagtttgatgttaatctgcaagtccctgacagagcagttttagggaccattcatccagatccagaaattgaagaaagcaagcaagaaactagtatgattttggatagtgaaaaaacaagtgagactgctgccaaaggggtcaacacaggaggcagggaaccaaatacaatggtggaaaaagaacgccctctggcagataagaaagcacagagaccatttgaacgaagtgacttttctgacagcataaaaattcagactccagaattaggtgaagtgtttcagaataaagattctgattatctgaagaacgacaaccctgaggaacatctgaagacctcagggcttgcaggggagcctgagggagaactctcaaaagaggaccatgggaacacagagaagtacatgggcacagaaagccaggggtctgctgctgcagaacctgaagatgactcgttccactggactccacatacaagtgtagagccagggcatagtgacaagagggaggacttacttatcataagcagcttctttaaagaacaacagtctttgcagcggttccagaagtactttaatgtccatgagctggaagccttgctacaagaaatgtcatcaaaactgaagtcagcgcagcaggagagcctgccctataatatggaaaaagtcctagataaggtcttccgtgcttctgagtcacaaattctgagcatagcagaaaaaatgcttgatactcgtgtggctgaaaatagagatctgggaatgaacgaaaataacatatttgaagaggctgcagtgcttgatgacattcaagacctcatctattttgtcaggtacaagcactccacagcagaggagacagccacactggtgatggcaccacctctagaggaaggcttgggtggagcaatggaagagatgcaaccactgcatgaagataatttctcacgagagaagacagcagaacttaatgtgcaggttcctgaagaacccacccacttggaccaacgtgtgattggggacactcatgcctcagaagtgtcacagaagccaaatactgagaaagacctggacccagggccagttacaacagaagacactcctatggatgctattgatgcaaacaagcaaccagagacagccgccgaagagccggcaagtgtcacacctttggaaaacgcaatccttctaatatattcattcatgttttatttaactaagtcgctagttgctacattgcctgatgatgttcagcctgggcctgatttttatggactgccatggaaacctgtatttatcactgccttcttgggaattgcttcgtttgccattttcttatggagaactgtccttgttgtgaaggatagagtatatcaagtcacggaacagcaaatttctgagaagttgaagactatcatgaaagaaaatacagaacttgtacaaaaattgtcaaattatgaacagaagatcaaggaatcaaagaaacatgttcaggaaaccaggaaacaaaatatgattctctctgatgaagcaattaaatataaggataaaatcaagacacttgaaaaaaatcaggaaattctggatgacacagctaaaaatcttcgtgttatgctagaatctgagagagaacagaatgtcaagaatcaggacttgatatcagaaaacaagaaatctatagagaagttaaaggatgttatttcaatgaatgcctcagaattttcagaggttcagattgcacttaatgaagctaagcttagtgaagagaaggtgaagtctgaatgccatcgggttcaagaagaaaatgctaggcttaagaagaaaaaagagcagttgcagcaggaaatcgaagactggagtaaattacatgctgagctcagtgagcaaatcaaatcatttgagaagtctcagaaagatttggaagtagctcttactcacaaggatgataatattaatgctttgactaactgcattacacagttgaatctgttagagtgtgaatctgaatctgagggtcaaaataaaggtggaaatgattcagatgaattagcaaatggagaagtgggaggtgaccggaatgagaagatgaaaaatcaaattaagcagatgatggatgtctctcggacacagactgcaatatcggtagttgaagaggatctaaagcttttacagcttaagctaagagcctccgtgtccactaaatgtaacctggaagaccaggtaaagaaattggaagatgaccgcaactcactacaagctgccaaagctggactggaagatgaatgcaaaaccttgaggcagaaagtggagattctgaatgagctctatcagcagaaggagatggctttgcaaaagaaactgagtcaagaagagtatgaacggcaagaaagagagcacaggctgtcagctgcagatgaaaaggcagtttcggctgcagaggaagtaaaaacttacaagcggagaattgaagaaatggaggatgaattacagaagacagagcggtcatttaaaaaccagatcgctacccatgagaagaaagctcatgaaaactggctcaaagctcgtgctgcagaaagagctatagctgaagagaaaagggaagctgccaatttgagacacaaattattagaattaacacaaaagatggcaatgctgcaagaagaacctgtgattgtaaaaccaatgccaggaaaaccaaatacacaaaaccctccacggagaggtcctctgagccagaatggctcttttggcccatcccctgtgagtggtggagaatgctcccctccattgacagtggagccacccgtgagacctctctctgctactctcaatcgaagagatatgcctagaagtgaatttggatcagtggacgggcctctacctcatcctcgatggtcagctgaggcatctgggaaaccctctccttctgatccaggatctggtacagctaccatgatgaacagcagctcaagaggctcttcccctaccagggtactcgatgaaggcaaggttaatatggctccaaaagggccccctcctttcccaggagtccctctcatgagcacccccatgggaggccctgtaccaccacccattcgatatggaccaccacctcagctctgcggaccttttgggcctcggccacttcctccaccctttggccctggtatgcgtccaccactaggcttaagagaatttgcaccaggcgttccaccaggaagacgggacctgcctctccaccctcggggatttttacctggacacgcaccatttagacctttaggttcacttggcccaagagagtactttattcctggtacccgattaccacccccaacccatggtccccaggaatacccaccaccacctgctgtaagagacttactgccgtcaggctctagagatgagcctccacctgcctctcagagcactagccaggactgttcacaggctttaaaacagagcccataaaactatgacctctgaggtttcattggaaagaaagtgtactgtgcattatccattacagtaaaggatttcattggcttcaaaatccaaaagtttattttaaaaggtttgttgttagaactaagctgccttggcagtgtgcatttttgagccaaacaattcaaaaatgtcatttcttccctaaataaaaatcaccttttaagctagagcgtccttacaactttgaaatgtgcaataaagaatacctgtgttttagctaatgtagcatatgtaattgcaaaatgatttagaatgtcatgaaaaatatgaacatttcctgtggaaatgctttaagaacatgtatttccattatcctatttttagtgtacaccagctgaatacggagcaatggtgtttataagcgtttttttaaactatctggtcacaaagactgttacgctaaaaatgtttactaaaagatcactaaactatctcccctcttgctgaagttctttgtagtaatagctcataaaaatttgtttattaatatttcccaagtgtctgttgactcattggactgttatgaggcttgtgccatttggggaacatgtaaactcaggctcccagaactgaagatggtggctggtggcacacttccggctgctcctccgtcacctgtgaactctacaagtgacgtctttttatttcaaagaagtttatttcccacttgtatagcattcacatgctttctttacgatcctcattgtctatttgagaatggttttctgagagtgagtttacattagtagcaagagttgtttgacctgatgttccattgtttttaccattcctgtagaaaaagggtgcacaacagaaaaatgaaaatgatgtgtcatggccgtaaaagtatagaaatctttaaaaattttaaaatgtacagtcccttatctatctttcccattccttgccactgatttttgaggaatataataaaaagattggaagagtataatgccatgagaaagaatgatttaggactgtgagggttataacatgccctaggtcagcaaccaagggttgaaatcagttctgttttagggggaaatggggggggcgacagatattattccaaaattaatattaattaatatttaaacgttggtgtttttatttaaaaatcagtaactaaccatctggaattgcaccatacttaaagtcttatccattactacactgtctttaaaacaatgtttctttaaatactctacaacgtttctaagaacgaacttcagacattttaattacagtaataatagcactccttttaaggagtttcagatccacactaaaactaaaatcataaaaggctgatacttttgtttgctgctaggctatattcttccattctttgaagtcctatgatgtaatatttttgaaacctagtgtatgtcttgtcactgttgtgatatttaatcgattaagaataccttgtaaaaaggagcaaaagcttcaatgtgaaacaattttctctctttatactaaacaactgaagatagatagtttagaaagataaggacctttgaaagaagacaactctgtcaaagttcataaggaatataaaaattcttcaggaaaagagaattcaatctatatgtcctcccgtttaatatcaagaatagaagaaattaagaggaaaactccacagaagagcataggccacttttagccatgtaaaaataagattaagtcacaaatacaacttttgaatttacctgtcaatatctctttaggacacaaaacaatgctgaagttaatataatttctaattttaaatgtcatttaagtgtagattatgccatctaggaaggtaagtaggaaaggtaaattaaatctatttttaaaattcaaaatattagagtatttttcccctctaaagccttttttggtgattattctgtatctgacataattgagaaactggtaagctgtaaagattccagtgtagcttctctgagaagttgtgagccagtccataactgcttcctcacatccatctgattgcaccatttctgcagcaaaccccaaagcagggtgccaatatgcagatggcatagggagtatcatccctcagccaaatcacttttccatctctaaagtttcatctattttggaagtcatctccaactaattgtgtctggatttagttgctaaaattgtcttatttatgaagcagcaatattcagcctgaaagcatttctgccatagttgttgtagttatatcgccaatggctgatttttttcattggaaagtaaatttaagtaattcgtgggatgtggtatattctgtgtcaacttcaagataatcactcattttctcgttatattcaggtctgaattaaagttaagttaatcacacagtgttcaatttaagcttctttaatgttgatgaaaggtatttgtagttcatataaactatacttatgtgaaggatagcagatgcttcatataaattatcattttgatatacatatcttatggtttatgagaaaagagaaaaaataatacatcggttttgctac

SEQ ID NO: 405614 - DNA, 3884 bp, Homo sapiens
ccaagaggggcctggtacaagataagacagaattagaggatgaaaatcaagaaggcatgactgtgcacagttctgttcacagcaataacctcaactctatgccagctgctgaaaagggtaaagacacattaaaatcagcttatgatgatacagaaaatgacctaaaaggagcagctattcatatctcaaaaggaatgctccacgaagaaaagcctggagagcagattttggaaggtggctcagagagtgaatctgcacagaaagctgcagggaatcaaatgaatgacagaaagattcaacaggaatccctgggtagtgcaccactcatgggagatgaccaccctaacgcatccagagacagtgtggagggagacgctttggtaaatggggccaaactgcacacgctttcagtggagcatcaacgtgaggaattgaaagaggaattagttcttaaaactcaaaaccaacctagattctcctctccagatgagattgatttgcccagagaactggaagacgaggttcccattctgggaagaaatcttccctggcaacaagaaagagatgtggctgccacagccagtaagcaaatgagtgagaagataaggctctctgagggagaagccaaagaggactccttggatgaagagttttttcatcacaaggcaatgcagggcacagaggtaggacagacagaccaaactgacagcacaggaggaccagctttcctttctaaagtagaagaggatgattatccctctgaagaactactagaggatgaaaacgctataaatgcaaaacggtctaaagaaaaaaaccctgggaatcagggcaggcagtttgatgttaatctgcaagtccctgacagagcagttttagggaccattcatccagatccagaaattgaagaaagcaagcaagaaactagtatgattttggatagtgaaaaaacaagtgagactgctgccaaaggggtcaacacaggaggcagggaaccaaatacaatggtggaaaaagaacgccctctggcagataagaaagcacagagaccatttgaacgaagtgacttttctgacagcataaaaattcagactccagaattaggtgaagtgtttcagaataaagattctgattatctgaagaacgacaaccctgaggaacatctgaagacctcagggcttgcaggggagcctgagggagaactctcaaaagaggaccatgggaacacagagaagtacatgggcacagaaagccaggggtctgctgctgcagaacctgaagatgactcgttccactggactccacatacaagtgtagagccagggcatagtgacaagagggaggacttacttatcataagcagcttctttaaagaacaacagtctttgcagcggttccagaagtactttaatgtccatgagctggaagccttgctacaagaaatgtcatcaaaactgaagtcagcgcagcaggagagcctgccctataatatggaaaaagtcctagataaggtcttccgtgcttctgagtcacaaattctgagcatagcagaaaaaatgcttgatactcgtgtggctgaaaatagagatctgggaatgaacgaaaataacatatttgaagaggctgcagtgcttgatgacattcaagacctcatctattttgtcaggtacaagcactccacagcagaggagacagccacactggtgatggcaccacctctagaggaaggcttgggtggagcaatggaagagatgcaaccactgcatgaagataatttctcacgagagaagacagcagaacttaatgtgcaggttcctgaagaacccacccacttggaccaacgtgtgattggggacactcatgcctcagaagtgtcacagaagccaaatactgagaaagacctggacccagggccagttacaacagaagacactcctatggatgctattgatgcaaacaagcaaccagagacagccgccgaagagccggcaagtgtcacacctttggaaaacgcaatccttctaatatattcattcatgttttatttaactaagtcgctagttgctacattgcctgatgatgttcagcctgggcctgatttttatggactgccatggaaacctgtatttatcactgccttcttgggaattgcttcgtttgccattttcttatggagaactgtccttgttgtgaaggatagagtatatcaagtcacggaacagcaaatttctgagaagttgaagactatcatgaaagaaaatacagaacttgtacaaaaattgtcaaattatgaacagaagatcaaggaatcaaagaaacatgttcaggaaaccaggaaacaaaatatgattctctctgatgaagcaattaaatataaggataaaatcaagacacttgaaaaaaatcaggaaattctggatgacacagctaaaaatcttcgtgttatgctagaatctgagagagaacagaatgtcaagaatcaggacttgatatcagaaaacaagaaatctatagagaagttaaaggatgttatttcaatgaatgcctcagaattttcagaggttcagattgcacttaatgaagctaagcttagtgaagagaaggtgaagtctgaatgccatcgggttcaagaagaaaatgctaggcttaagaagaaaaaagagcagttgcagcaggaaatcgaagactggagtaaattacatgctgagctcagtgagcaaatcaaatcatttgagaagtctcagaaagatttggaagtagctcttactcacaaggatgataatattaatgctttgactaactgcattacacagttgaatctgttagagtgtgaatctgaatctgagggtcaaaataaaggtggaaatgattcagatgaattagcaaatggagaagtgggaggtgaccggaatgagaagatgaaaaatcaaattaagcagatgatggatgtctctcggacacagactgcaatatcggtagttgaagaggatctaaagcttttacagcttaagctaagagcctccgtgtccactaaatgtaacctggaaggccctggtatgcgtccaccactaggcttaagagaatttgcaccaggcgttccaccaggaagacgggacctgcctctccaccctcggggatttttacctggacacgcaccatttagacctttaggttcacttggcccaagagagtactttattcctggtacccgattaccacccccaacccatggtccccaggaatacccaccaccacctgctgtaagagacttactgccgtcaggctctagagatgagcctccacctgcctctcagagcactagccaggactgttcacaggctttaaaacagagcccataaaactatgacctctgaggtttcattggaaagaaagtgtactgtgcattatccattacagtaaaggatttcattggcttcaaaatccaaaagtttattttaaaaggtttgttgttagaactaagctgccttggcagtgtgcatttttgagccaaacaattcaaaaatgtcatttcttccctaaataaaaatcaccttttaagctagagcgtccttacaactttgaaatgtgcaataaagaatacctgtgttttagctaatgtagcatatgtaattgcaaaatgatttagaatgtcatgaaaaatatgaacatttcctgtggaaatgctttaagaacatgtatttccattatcctatttttagtgtacaccagctgaatacggagcaatggtgtttataagcgtttttttaaactatctggtcacaaagactgttacgctaaaaatgtttactaaaagatcactaaactatctcccctcttgctgaagttctttgtagtaatagctcataaaaatttgtttattaata

SEQ ID NO: 405615 - DNA, 540 bp, Homo sapiens
aggttgaggccgccccactgcgccgagggccgccatcgctattgcggcattctccctcggctccggaggtaggggcaactcttctcttcctgtctgggaaaaagaccatagctcaaaaggaaggccgagggagaagttagaaagggatgatgaacgaagcgttttgaggggactgcaacgccgcggcaatacccgcccctgagctgcgcgcactaccgcctcggtagctgtcatggccgccgggtcacgtgactccggcttggcgccgtcctggttttccgtcaccctggttctgtagtctcggttctccgactccctctttttctcgcttgtggactccgatatattgcccttcttcccttagaagaactgctgaaccgactctgagaaatttggtaagtatgtcagaggatgggtgtttctcagtaatatcccccgctacttccccggagtctcaagcaataggatcacccccttttacattagtctccatagacccctggacagtggaccaaaagtctccttctagtgccttgaaac

SEQ ID NO: 405616 - DNA, 8652 bp, Homo sapiens
ccaagaggggcctggtacaagataagacagaattagaggatgaaaatcaagaaggcatgactgtgcacagttctgttcacagcaataacctcaactctatgccagctgctgaaaagggtaaagacacattaaaatcagcttatgatgatacagaaaatgacctaaaaggagcagctattcatatctcaaaaggaatgctccacgaagaaaagcctggagagcagattttggaaggtggctcagagagtgaatctgcacagaaagctgcagggaatcaaatgaatgacagaaagattcaacaggaatccctgggtagtgcaccactcatgggagatgaccaccctaacgcatccagagacagtgtggagggagacgctttggtaaatggggccaaactgcacacgctttcagtggagcatcaacgtgaggaattgaaagaggaattagttcttaaaactcaaaaccaacctagattctcctctccagatgagattgatttgcccagagaactggaagacgaggttcccattctgggaagaaatcttccctggcaacaagaaagagatgtggctgccacagccagtaagcaaatgagtgagaagataaggctctctgagggagaagccaaagaggactccttggatgaagagttttttcatcacaaggcaatgcagggcacagaggtaggacagacagaccaaactgacagcacaggaggaccagctttcctttctaaagtagaagaggatgattatccctctgaagaactactagaggatgaaaacgctataaatgcaaaacggtctaaagaaaaaaaccctgggaatcagggcaggcagtttgatgttaatctgcaagtccctgacagagcagttttagggaccattcatccagatccagaaattgaagaaagcaagcaagaaactagtatgattttggatagtgaaaaaacaagtgagactgctgccaaaggggtcaacacaggaggcagggaaccaaatacaatggtggaaaaagaacgccctctggcagataagaaagcacagagaccatttgaacgaagtgacttttctgacagcataaaaattcagactccagaattaggtgaagtgtttcagaataaagattctgattatctgaagaacgacaaccctgaggaacatctgaagacctcagggcttgcaggggagcctgagggagaactctcaaaagaggaccatgggaacacagagaagtacatgggcacagaaagccaggggtctgctgctgcagaacctgaagatgactcgttccactggactccacatacaagtgtagagccagggcatagtgacaagagggaggacttacttatcataagcagcttctttaaagaacaacagtctttgcagcggttccagaagtactttaatgtccatgagctggaagccttgctacaagaaatgtcatcaaaactgaagtcagcgcagcaggagagcctgccctataatatggaaaaagtcctagataaggtcttccgtgcttctgagtcacaaattctgagcatagcagaaaaaatgcttgatactcgtgtggctgaaaatagagatctgggaatgaacgaaaataacatatttgaagaggctgcagtgcttgatgacattcaagacctcatctattttgtcaggtacaagcactccacagcagaggagacagccacactggtgatggcaccacctctagaggaaggcttgggtggagcaatggaagagatgcaaccactgcatgaagataatttctcacgagagaagacagcagaacttaatgtgcaggttcctgaagaacccacccacttggaccaacgtgtgattggggacactcatgcctcagaagtgtcacagaagccaaatactgagaaagacctggacccagggccagttacaacagaagacactcctatggatgctattgatgcaaacaagcaaccagagacagccgccgaagagccggcaagtgtcacacctttggaaaacgcaatccttctaatatattcattcatgttttatttaactaagtcgctagttgctacattgcctgatgatgttcagcctgggcctgatttttatggactgccatggaaacctgtatttatcactgccttcttgggaattgcttcgtttgccattttcttatggagaactgtccttgttgtgaaggatagagtatatcaagtcacggaacagcaaatttctgagaagttgaagactatcatgaaagaaaatacagaacttgtacaaaaattgtcaaattatgaacagaagatcaaggaatcaaagaaacatgttcaggaaaccaggaaacaaaatatgattctctctgatgaagcaattaaatataaggataaaatcaagacacttgaaaaaaatcaggaaattctggatgacacagctaaaaatcttcgtgttatgctagaatctgagagagaacagaatgtcaagaatcaggacttgatatcagaaaacaagaaatctatagagaagttaaaggatgttatttcaatgaatgcctcagaattttcagaggttcagattgcacttaatgaagctaagcttagtgaagagaaggtgaagtctgaatgccatcgggttcaagaagaaaatgctaggcttaagaagaaaaaagagcagttgcagcaggaaatcgaagactggagtaaattacatgctgagctcagtgagcaaatcaaatcatttgagaagtctcagaaagatttggaagtagctcttactcacaaggatgataatattaatgctttgactaactgcattacacagttgaatctgttagagtgtgaatctgaatctgagggtcaaaataaaggtggaaatgattcagatgaattagcaaatggagaagtgggaggtgaccggaatgagaagatgaaaaatcaaattaagcagatgatggatgtctctcggacacagactgcaatatcggtagttgaagaggatctaaagcttttacagcttaagctaagagcctccgtgtccactaaatgtaacctggaagaccaggtaaagaaattggaagatgaccgcaactcactacaagctgccaaagctggactggaagatgaatgcaaaaccttgaggcagaaagtggagattctgaatgagctctatcagcagaaggagatggctttgcaaaagaaactgagtcaagaagagtatgaacggcaagaaagagagcacaggctgtcagctgcagatgaaaaggcagtttcggctgcagaggaagtaaaaacttacaagcggagaattgaagaaatggaggatgaattacagaagacagagcggtcatttaaaaaccagatcgctacccatgagaagaaagctcatgaaaactggctcaaagctcgtgctgcagaaagagctatagctgaagagaaaagggaagctgccaatttgagacacaaattattagaattaacacaaaagatggcaatgctgcaagaagaacctgtgattgtaaaaccaatgccaggaaaaccaaatacacaaaaccctccacggagaggtcctctgagccagaatggctcttttggcccatcccctgtgagtggtggagaatgctcccctccattgacagtggagccacccgtgagacctctctctgctactctcaatcgaagagatatgcctagaagtgaatttggatcagtggacgggcctctacctcatcctcgatggtcagctgaggcatctgggaaaccctctccttctggtaagggagcaagagtgttcaaagagtctaaaaccatgcaggaagtggggagaggattttttttttaatcctcctcacagagtacacaagtcagaataagtctacatcagttctctggtctttaacagatccaggatctggtacagctaccatgatgaacagcagctcaagaggctcttcccctaccagggtactcgatgaaggcaaggtaaatgcacccattttgaataattagttatttcaggaacatttagctcttcctacaactctctctttgcctcatctcctatttgtgtgttctatctgtactatctcatttattttttaaaaaagcaaactgttctccaagagcctgaagtcccctcagttcccagcattacatctttggctgagcgtccagtagcagtaagtacttagaagtgtggactgaactgggctataagttgcatggcaatattgatcttacttttatccttgacttgggagtgttgctgaaatctgacggattcattggccttttctcctctctcctgtttggttagacatttaacctgtgtagagcatctgctgtaactgtaattaacttaaacaaaagtgaaaagtccccactcttgtgtgtctcagtgtttaatgctcttaggcaaagtaaattcattgtaaattgtgtaattcattattatgtcttcatttggaagtgtgctatttaagaatacctacagttgtatactaggcaaaccctattttgaatgatctgaaattacagattgataacagaagaatgtttgctggaagtgaaatactgaatagtggaagtctataattacccgttgagccagttcccagcagtgtccttaaacagtgtccacataagtgtattctcttgtaacttgtatagctgttatggctggtaagtcctctgatcatacctcactgtgattctcgacattgaaattaaaataattttaatgattgagagtttccaacccactttcccataggaagtgattaatcagtatctcatagtagacagtattactagtgaatgaagatgaatagagctgtgcctgtataatttgtgtacataacattgtttctcttggaaaatacttccaagttccagcacaggactccaggaatacacatttcttgagaaatgtttttatccaagagcagcttggataagacccgagacccctttgaagtaggagacttcgaagagtgtagagactactttgttagaaaggagaagcagaggtggaaagaacgtggccttggagtcaaacctggcatggaattccagccagcctcttacatgctgtgtgaccatcagcaaatctaatactctctgcgcctgtgttcctgcatatttagaacaagatggtcctattacagatttagagatgtcagaatttgtgttaatatatgtagggcctacagaaggtactctgaataatcgctgttacatggtagagaatggatttttcattccctttcattctctgcattcttaatatggaaattactctgataggagggatgtgcagagggagtgactgccttagaaatagatgtatgaatggcgtaacttctatcattagtcaggaatgacctccatttataacctgtgcgttcccttccatttgcagatgtaagcaataatatgatacagcaagtgttcactcctgtggcatacttttaacctttctaagcttgtcagtgggaacaaatgagaggggtagagttttttgcactaattctgctctttggacaagtgcctgacatctgcttcattgggttttagtttttactggtgttggtgcttttgtctgtcataccatagtatttcaaaacttcaattgtttctactctgcaggttaatatggctccaaaagggccccctcctttcccaggagtccctctcatgagcacccccatgggaggccctgtaccaccacccattcgatatggaccaccacctcagctctgcggaccttttgggcctcggccacttcctccaccctttggccctggtatgcgtccaccactaggcttaagagaatttgcaccaggcgttccaccaggaagacgggacctgcctctccaccctcggggatttttacctggacacgcaccatttagacctttaggttcacttggcccaagagagtactttattcctggtacccgattaccacccccaacccatggtccccaggaatacccaccaccacctgctgtaagagacttactgccgtcaggctctagagatgagcctccacctgcctctcagagcactagccaggactgttcacaggctttaaaacagagcccataaaactatgacctctgaggtttcattggaaagaaagtgtactgtgcattatccattacagtaaaggatttcattggcttcaaaatccaaaagtttattttaaaaggtttgttgttagaactaagctgccttggcagtgtgcatttttgagccaaacaattcaaaaatgtcatttcttccctaaataaaaatcaccttttaagctagagcgtccttacaactttgaaatgtgcaataaagaatacctgtgttttagctaatgtagcatatgtaattgcaaaatgatttagaatgtcatgaaaaatatgaacatttcctgtggaaatgctttaagaacatgtatttccattatcctatttttagtgtacaccagctgaatacggagcaatggtgtttataagcgtttttttaaactatctggtcacaaagactgttacgctaaaaatgtttactaaaagatcactaaactatctcccctcttgctgaagttctttgtagtaatagctcataaaaatttgtttattaatatttcccaagtgtctgttgactcattggactgttatgaggcttgtgccatttggggaacatgtaaactcaggctcccagaactgaagatggtggctggtggcacacttccggctgctcctccgtcacctgtgaactctacaagtgacgtctttttatttcaaagaagtttatttcccacttgtatagcattcacatgctttctttacgatcctcattgtctatttgagaatggttttctgagagtgagtttacattagtagcaagagttgtttgacctgatgttccattgtttttaccattcctgtagaaaaagggtgcacaacagaaaaatgaaaatgatgtgtcatggccgtaaaagtatagaaatctttaaaaattttaaaatgtacagtcccttatctatctttcccattccttgccactgatttttgaggaatataataaaaagattggaagagtataatgccatgagaaagaatgatttaggactgtgagggttataacatgccctaggtcagcaaccaagggttgaaatcagttctgttttagggggaaatggggggggcgacagatattattccaaaattaatattaattaatatttaaacgttggtgtttttatttaaaaatcagtaactaaccatctggaattgcaccatacttaaagtcttatccattactacactgtctttaaaacaatgtttctttaaatactctacaacgtttctaagaacgaacttcagacattttaattacagtaataatagcactccttttaaggagtttcagatccacactaaaactaaaatcataaaaggctgatacttttgtttgctgctaggctatattcttccattctttgaagtcctatgatgtaatatttttgaaacctagtgtatgtcttgtcactgttgtgatatttaatcgattaagaataccttgtaaaaaggagcaaaagcttcaatgtgaaacaattttctctctttatactaaacaactgaagatagatagtttagaaagataaggacctttgaaagaagacaactctgtcaaagttcataaggaatataaaaattcttcaggaaaagagaattcaatctatatgtcctcccgtttaatatcaagaatagaagaaattaagaggaaaactccacagaagagcataggccacttttagccatgtaaaaataagattaagtcacaaatacaacttttgaatttacctgtcaatatctctttaggacacaaaacaatgctgaagttaatataatttctaattttaaatgtcatttaagtgtagattatgccatctaggaaggtaagtaggaaaggtaaattaaatctatttttaaaattcaaaatattagagtatttttcccctctaaagccttttttggtgattattctgtatctgacataattgagaaactggtaagctgtaaagattccagtgtagcttctctgagaagttgtgagccagtccataactgcttcctcacatccatctgattgcaccatttctgcagcaaaccccaaagcagggtgccaatatgcagatggcatagggagtatcatccctcagccaaatcacttttccatctctaaagtttcatctattttggaagtcatctccaactaattgtgtctggatttagttgctaaaattgtcttatttatgaagcagcaatattcagcctgaaagcatttctgccatagttgttgtagttatatcgccaatggctgatttttttcattggaaagtaaatttaagtaattcgtgggatgtggtatattctgtgtcaacttcaagataatcactcattttctcgttatattcaggtctgaattaaagttaagttaatcacacagtgttcaatttaagcttctttaatgttgatgaaaggtatttgtagttcatataaactatacttatgtgaaggatagcagatgcttcatataaattatcattttgatatacatatcttatggtttatgagaaaagagaaaaaataatacatcggttttgctac

SEQ ID NO: 405617 - DNA, 5065 bp, Homo sapiens
gacgtgttttataggcggcataaagcgaaagtgcaggcagctgtggaaggcgaagttcaatcccagagtccgccccctgaattggggcctttccggaggaggaagctctgaaaaacagggggcccagtgccattccgcagggaattgtcgcttgcgttcagctgttctacacaatggactcagtacctgccactgtgccttctatcgccgctaccccgggggacccggaacttgtgggacccttgtctgtgctctacgcagccttcatagccaagctgctggagctagttgctacattgcctgatgatgttcagcctgggcctgatttttatggactgccatggaaacctgtatttatcactgccttcttgggaattgcttcgtttgccattttcttatggagaactgtccttgttgtcacggaacagcaaatttctgagaagttgaagactatcatgaaagaaaatacagaacttgtacaaaaattgtcaaattatgaacagaagatcaaggaatcaaagaaacatgttcaggaaaccaggaaacaaaatatgattctctctgatgaagcaattaaatataaggataaaatcaagacacttgaaaaaaatcaggaaattctggatgacacagctaaaaatcttcgtgttatgctagaatctgagagagaacagaatgtcaagaatcaggacttgatatcagaaaacaagaaatctatagagaagttaaaggatgttatttcaatgaatgcctcagaattttcagaggttcagattgcacttaatgaagctaagcttagtgaagagaaggtgaagtctgaatgccatcgggttcaagaagaaaatgctaggcttaagaagaaaaaagagcagttgcagcaggaaatcgaagactggagtaaattacatgctgagctcagtgagcaaatcaaatcatttgagaagtctcagaaagatttggaagtagctcttactcacaaggatgataatattaatgctttgactaactgcattacacagttgaatctgttagagtgtgaatctgaatctgagggtcaaaataaaggtggaaatgattcagatgaattagcaaatggagaagtgggaggtgaccggaatgagaagatgaaaaatcaaattaagcagatgatggatgtctctcggacacagactgcaatatcggtagttgaagaggatctaaagcttttacagcttaagctaagagcctccgtgtccactaaatgtaacctggaagaccaggtaaagaaattggaagatgaccgcaactcactacaagctgccaaagctggactggaagatgaatgcaaaaccttgaggcagaaagtggagattctgaatgagctctatcagcagaaggagatggctttgcaaaagaaactgagtcaagaagagtatgaacggcaagaaagagagcacaggctgtcagctgcagatgaaaaggcagtttcggctgcagaggaagtaaaaacttacaagcggagaattgaagaaatggaggatgaattacagaagacagagcggtcatttaaaaaccagatcgctacccatgagaagaaagctcatgaaaactggctcaaagctcgtgctgcagaaagagctatagctgaagagaaaagggaagctgccaatttgagacacaaattattagaattaacacaaaagatggcaatgctgcaagaagaacctgtgattgtaaaaccaatgccaggaaaaccaaatacacaaaaccctccacggagaggtcctctgagccagaatggctcttttggcccatcccctgtgagtggtggagaatgctcccctccattgacagtggagccacccgtgagacctctctctgctactctcaatcgaagagatatgcctagaagtgaatttggatcagtggacgggcctctacctcatcctcgatggtcagctgaggcatctgggaaaccctctccttctgatccaggatctggtacagctaccatgatgaacagcagctcaagaggctcttcccctaccagggtactcgatgaaggcaaggttaatatggctccaaaagggccccctcctttcccaggagtccctctcatgagcacccccatgggaggccctgtaccaccacccattcgatatggaccaccacctcagctctgcggaccttttgggcctcggccacttcctccaccctttggccctggtatgcgtccaccactaggcttaagagaatttgcaccaggcgttccaccaggaagacgggacctgcctctccaccctcggggatttttacctggacacgcaccatttagacctttaggttcacttggcccaagagagtactttattcctggtacccgattaccacccccaacccatggtccccaggaatacccaccaccacctgctgtaagagacttactgccgtcaggctctagagatgagcctccacctgcctctcagagcactagccaggactgttcacaggctttaaaacagagcccataaaactatgacctctgaggtttcattggaaagaaagtgtactgtgcattatccattacagtaaaggatttcattggcttcaaaatccaaaagtttattttaaaaggtttgttgttagaactaagctgccttggcagtgtgcatttttgagccaaacaattcaaaaatgtcatttcttccctaaataaaaatcaccttttaagctagagcgtccttacaactttgaaatgtgcaataaagaatacctgtgttttagctaatgtagcatatgtaattgcaaaatgatttagaatgtcatgaaaaatatgaacatttcctgtggaaatgctttaagaacatgtatttccattatcctatttttagtgtacaccagctgaatacggagcaatggtgtttataagcgtttttttaaactatctggtcacaaagactgttacgctaaaaatgtttactaaaagatcactaaactatctcccctcttgctgaagttctttgtagtaatagctcataaaaatttgtttattaatatttcccaagtgtctgttgactcattggactgttatgaggcttgtgccatttggggaacatgtaaactcaggctcccagaactgaagatggtggctggtggcacacttccggctgctcctccgtcacctgtgaactctacaagtgacgtctttttatttcaaagaagtttatttcccacttgtatagcattcacatgctttctttacgatcctcattgtctatttgagaatggttttctgagagtgagtttacattagtagcaagagttgtttgacctgatgttccattgtttttaccattcctgtagaaaaagggtgcacaacagaaaaatgaaaatgatgtgtcatggccgtaaaagtatagaaatctttaaaaattttaaaatgtacagtcccttatctatctttcccattccttgccactgatttttgaggaatataataaaaagattggaagagtataatgccatgagaaagaatgatttaggactgtgagggttataacatgccctaggtcagcaaccaagggttgaaatcagttctgttttagggggaaatggggggggcgacagatattattccaaaattaatattaattaatatttaaacgttggtgtttttatttaaaaatcagtaactaaccatctggaattgcaccatacttaaagtcttatccattactacactgtctttaaaacaatgtttctttaaatactctacaacgtttctaagaacgaacttcagacattttaattacagtaataatagcactccttttaaggagtttcagatccacactaaaactaaaatcataaaaggctgatacttttgtttgctgctaggctatattcttccattctttgaagtcctatgatgtaatatttttgaaacctagtgtatgtcttgtcactgttgtgatatttaatcgattaagaataccttgtaaaaaggagcaaaagcttcaatgtgaaacaattttctctctttatactaaacaactgaagatagatagtttagaaagataaggacctttgaaagaagacaactctgtcaaagttcataaggaatataaaaattcttcaggaaaagagaattcaatctatatgtcctcccgtttaatatcaagaatagaagaaattaagaggaaaactccacagaagagcataggccacttttagccatgtaaaaataagattaagtcacaaatacaacttttgaatttacctgtcaatatctctttaggacacaaaacaatgctgaagttaatataatttctaattttaaatgtcatttaagtgtagattatgccatctaggaaggtaagtaggaaaggtaaattaaatctatttttaaaattcaaaatattagagtatttttcccctctaaagccttttttggtgattattctgtatctgacataattgagaaactggtaagctgtaaagattccagtgtagcttctctgagaagttgtgagccagtccataactgcttcctcacatccatctgattgcaccatttctgcagcaaaccccaaagcagggtgccaatatgcagatggcatagggagtatcatccctcagccaaatcacttttccatctctaaagtttcatctattttggaagtcatctccaactaattgtgtctggatttagttgctaaaattgtcttatttatgaagcagcaatattcagcctgaaagcatttctgccatagttgttgtagttatatcgccaatggctgatttttttcattggaaagtaaatttaagtaattcgtgggatgtggtatattctgtgtcaacttcaagataatcactcattttctcgttatattcaggtctgaattaaagttaagttaatcacacagtgttcaatttaagcttctttaatgttgatgaaaggtatttgtagttcatataaactatacttatgtgaaggatagcagatgcttcatataaattatcattttgatatacatatcttatggtttatgagaaaagagaaaaaataatacatcggttttgctac

SEQ ID NO: 405618 - DNA, 4875 bp, Homo sapiens
gcggccgcctactactactactaaatccgcggccgcgtcgattttttttttaatcctcctcacagagtacacaagtcagaataagtctacatcagttctctggtctttaacagatccaggatctggtacagctaccatgatgaacagcagctcaagaggctcttcccctaccagggtactcgatgaaggcaaggtaaatgcacccattttgaataattagttatttcaggaacatttagctcttcctacaactctctctttgcctcatctcctatttgtgtgttctatctgtactatctcatttattttttaaaaaagcaaactgttctccaagagcctgaagtcccctcagttcccagcattacatctttggctgagcgtccagtagcagtaagtacttagaagtgtggactgaactgggctataagttgcatggcaatattgatcttacttttatccttgacttgggagtgttgctgaaatctgacggattcattggccttttctcctctctcctgtttggttagacatttaacctgtgtagagcatctgctgtaactgtaattaacttaaacaaaagtgaaaagtccccactcttgtgtgtctcagtgtttaatgctcttaggcaaagtaaattcattgtaaattgtgtaattcattattatgtcttcatttggaagtgtgctatttaagaatacctacagttgtatactaggcaaaccctattttgaatgatctgaaattacagattgataacagaagaatgtttgctggaagtgaaatactgaatagtggaagtctataattacccgttgagccagttcccagcagtgtccttaaacagtgtccacataagtgtattctcttgtaacttgtatagctgttatggctggtaagtcctctgatcatacctcactgtgattctcgacattgaaattaaaataattttaatgattgagagtttccaacccactttcccataggaagtgattaatcagtatctcatagtagacagtattactagtgaatgaagatgaatagagctgtgcctgtataatttgtgtacataacattgtttctcttggaaaatacttccaagttccagcacaggactccaggaatacacatttcttgagaaatgtttttatccaagagcagcttggataagacccgagacccctttgaagtaggagacttcgaagagtgtagagactactttgttagaaaggagaagcagaggtggaaagaacgtggccttggagtcaaacctggcatggaattccagccagcctcttacatgctgtgtgaccatcagcaaatctaatactctctgcgcctgtgttcctgcatatttagaacaagatggtcctattacagatttagagatgtcagaatttgtgttaatatatgtagggcctacagaaggtactctgaataatcgctgttacatggtagagaatggatttttcattccctttcattctctgcattcttaatatggaaattactctgataggagggatgtgcagagggagtgactgccttagaaatagatgtatgaatggcgtaacttctatcattagtcaggaatgacctccatttataacctgtgcgttcccttccatttgcagatgtaagcaataatatgatacagcaagtgttcactcctgtggcatacttttaacctttctaagcttgtcagtgggaacaaatgagaggggtagagttttttgcactaattctgctctttggacaagtgcctgacatctgcttcattgggttttagtttttactggtgttggtgcttttgtctgtcataccatagtatttcaaaacttcaattgtttctactctgcaggttaatatggctccaaaagggccccctcctttcccaggagtccctctcatgagcacccccatgggaggccctgtaccaccacccattcgatatggaccaccacctcagctctgcggaccttttgggcctcggccacttcctccaccctttggccctggtatgcgtccaccactaggcttaagagaatttgcaccaggcgttccaccaggaagacgggacctgcctctccaccctcggggatttttacctggacacgcaccatttagacctttaggttcacttggcccaagagagtactttattcctggtacccgattaccacccccaacccatggtccccaggaatacccaccaccacctgctgtaagagacttactgccgtcaggctctagagatgagcctccacctgcctctcagagcactagccaggactgttcacaggctttaaaacagagcccataaaactatgacctctgaggtttcattggaaagaaagtgtactgtgcattatccattacagtaaaggatttcattggcttcaaaatccaaaagtttattttaaaaggtttgttgttagaactaagctgccttggcagtgtgcatttttgagccaaacaattcaaaaatgtcatttcttccctaaataaaaatcaccttttaagctagagcgtccttacaactttgaaatgtgcaataaagaatacctgtgttttagctaatgtagcatatgtaattgcaaaatgatttagaatgtcatgaaaaatatgaacatttcctgtggaaatgctttaagaacatgtatttccattatcctatttttagtgtacaccagctgaatacggagcaatggtgtttataagcgtttttttaaactatctggtcacaaagactgttacgctaaaaatgtttactaaaagatcactaaactatctcccctcttgctgaagttctttgtagtaatagctcataaaaatttgtttattaatatttcccaagtgtctgttgactcattggactgttatgaggcttgtgccatttggggaacatgtaaactcaggctcccagaactgaagatggtggctggtggcacacttccggctgctcctccgtcacctgtgaactctacaagtgacgtctttttatttcaaagaagtttatttcccacttgtatagcattcacatgctttctttacgatcctcattgtctatttgagaatggttttctgagagtgagtttacattagtagcaagagttgtttgacctgatgttccattgtttttaccattcctgtagaaaaagggtgcacaacagaaaaatgaaaatgatgtgtcatggccgtaaaagtatagaaatctttaaaaattttaaaatgtacagtcccttatctatctttcccattccttgccactgatttttgaggaatataataaaaagattggaagagtataatgccatgagaaagaatgatttaggactgtgagggttataacatgccctaggtcagcaaccaagggttgaaatcagttctgttttagggggaaatggggggggcgacagatattattccaaaattaatattaattaatatttaaacgttggtgtttttatttaaaaatcagtaactaaccatctggaattgcaccatacttaaagtcttatccattactacactgtctttaaaacaatgtttctttaaatactctacaacgtttctaagaacgaacttcagacattttaattacagtaataatagcactccttttaaggagtttcagatccacactaaaactaaaatcataaaaggctgatacttttgtttgctgctaggctatattcttccattctttgaagtcctatgatgtaatatttttgaaacctagtgtatgtcttgtcactgttgtgatatttaatcgattaagaataccttgtaaaaaggagcaaaagcttcaatgtgaaacaattttctctctttatactaaacaactgaagatagatagtttagaaagataaggacctttgaaagaagacaactctgtcaaagttcataaggaatataaaaattcttcaggaaaagagaattcaatctatatgtcctcccgtttaatatcaagaatagaagaaattaagaggaaaactccacagaagagcataggccacttttagccatgtaaaaataagattaagtcacaaatacaacttttgaatttacctgtcaatatctctttaggacacaaaacaatgctgaagttaatataatttctaattttaaatgtcatttaagtgtagattatgccatctaggaaggtaagtaggaaaggtaaattaaatctatttttaaaattcaaaatattagagtatttttcccctctaaagccttttttggtgattattctgtatctgacataattgagaaactggtaagctgtaaagattccagtgtagcttctctgagaagttgtgagccagtccataactgcttcctcacatccatctgattgcaccatttctgcagcaaaccccaaagcagggtgccaatatgcagatggcatagggagtatcatccctcagccaaatcacttttccatctctaaagtttcatctattttggaagtcatctccaactaattgtgtctggatttagttgctaaaattgtcttatttatgaagcagcaatattcagcctgaaagcatttctgccatagttgttgtagttatatcgccaatggctgatttttttcattggaaagtaaatttaagtaattcgtgggatgtggtatattctgtgtcaacttcaagataatcactcattttctcgttatattcaggtctgaattaaagttaagttaatcacacagtgttcaatttaagcttctttaatgttgatgaaaggtatttgtagttcatataaactatacttatgtgaaggatagcagatgcttcatataaattatcattttgatatacatatcttatggtttatgagaaaagagaaaaaataatacatcggttttgctac

SEQ ID NO: 405619 - DNA, 5079 bp, Homo sapiens
ccaagaggggcctggtacaagataagacagaattagaggatgaaaatcaagaaggcatgactgtgcacagttctgttcacagcaataacctcaactctatgccagctgctgaaaagggtaaagacacattaaaatcagcttatgatgatacagaaaatgacctaaaaggagcagctattcatatctcaaaaggaatgctccacgaagaaaagcctggagagcagattttggaaggtggctcagagagtgaatctgcacagaaagctgcagggaatcaaatgaatgacagaaagattcaacaggaatccctgggtagtgcaccactcatgggagatgaccaccctaacgcatccagagacagtgtggagggagacgctttggtaaatggggccaaactgcacacgctttcagtggagcatcaacgtgaggaattgaaagaggaattagttcttaaaactcaaaaccaacctagattctcctctccagatgagattgatttgcccagagaactggaagacgaggttcccattctgggaagaaatcttccctggcaacaagaaagagatgtggctgccacagccagtaagcaaatgagtgagaagataaggctctctgagggagaagccaaagaggactccttggatgaagagttttttcatcacaaggcaatgcagggcacagaggtaggacagacagaccaaactgacagcacaggaggaccagctttcctttctaaagtagaagaggatgattatccctctgaagaactactagaggatgaaaacgctataaatgcaaaacggtctaaagaaaaaaaccctgggaatcagggcaggcagtttgatgttaatctgcaagtccctgacagagcagttttagggaccattcatccagatccagaaattgaagaaagcaagcaagaaactagtatgattttggatagtgaaaaaacaagtgagactgctgccaaaggggtcaacacaggaggcagggaaccaaatacaatggtggaaaaagaacgccctctggcagataagaaagcacagagaccatttgaacgaagtgacttttctgacagcataaaaattcagactccagaattaggtgaagtgtttcagaataaagattctgattatctgaagaacgacaaccctgaggaacatctgaagacctcagggcttgcaggggagcctgagggagaactctcaaaagaggaccatgggaacacagagaagtacatgggcacagaaagccaggggtctgctgctgcagaacctgaagatgactcgttccactggactccacatacaagtgtagagccagggcatagtgacaagagggaggacttacttatcataagcagcttctttaaagaacaacagtctttgcagcggttccagaagtactttaatgtccatgagctggaagccttgctacaagaaatgtcatcaaaactgaagtcagcgcagcaggagagcctgccctataatatggaaaaagtcctagataaggtcttccgtgcttctgagtcacaaattctgagcatagcagaaaaaatgcttgatactcgtgtggctgaaaatagagatctgggaatgaacgaaaataacatatttgaagaggctgcagtgcttgatgacattcaagacctcatctattttgtcaggtacaagcactccacagcagaggagacagccacactggtgatggcaccacctctagaggaaggcttgggtggagcaatggaagagatgcaaccactgcatgaagataatttctcacgagagaagacagcagaacttaatgtgcaggttcctgaagaacccacccacttggaccaacgtgtgattggggacactcatgcctcagaagtgtcacagaagccaaatactgagaaagacctggacccagggccagttacaacagaagacactcctatggatgctattgatgcaaacaagcaaccagagacagccgccgaagagccggcaagtgtcacacctttggaaaacgcaatccttctaatatattcattcatgttttatttaactaagtcgctagttgctacattgcctgatgatgttcagcctgggcctgatttttatggactgccatggaaacctgtatttatcactgccttcttgggaattgcttcgtttgccattttcttatggagaactgtccttgttgtgaaggatagagtatatcaagtcacggaacagcaaatttctgagaagttgaagactatcatgaaagaaaatacagaacttgtacaaaaattgtcaaattatgaacagaagatcaaggaatcaaagaaacatgttcaggaaaccaggaaacaaaatatgattctctctgatgaagcaattaaatataaggataaaatcaagacacttgaaaaaaatcaggaaattctggatgacacagctaaaaatcttcgtgttatgctagaatctgagagagaacagaatgtcaagaatcaggacttgatatcagaaaacaagaaatctatagagaagttaaaggatgttatttcaatgaatgcctcagaattttcagaggttcagattgcacttaatgaagctaagcttagtgaagagaaggtgaagtctgaatgccatcgggttcaagaagaaaatgctaggcttaagaagaaaaaagagcagttgcagcaggaaatcgaagactggagtaaattacatgctgagctcagtgagcaaatcaaatcatttgagaagtctcagaaagatttggaagtagctcttactcacaaggatgataatattaatgctttgactaactgcattacacagttgaatctgttagagtgtgaatctgaatctgagggtcaaaataaaggtggaaatgattcagatgaattagcaaatggagaagtgggaggtgaccggaatgagaagatgaaaaatcaaattaagcagatgatggatgtctctcggacacagactgcaatatcggtagttgaagaggatctaaagcttttacagcttaagctaagagcctccgtgtccactaaatgtaacctggaagaccaggtaaagaaattggaagatgaccgcaactcactacaagctgccaaagctggactggaagatgaatgcaaaaccttgaggcagaaagtggagattctgaatgagctctatcagcagaaggagatggctttgcaaaagaaactgagtcaagaagagtatgaacggcaagaaagagagcacaggctgtcagctgcagatgaaaaggcagtttcggctgcagaggaagtaaaaacttacaagcggagaattgaagaaatggaggatgaattacagaagacagagcggtcatttaaaaaccagatcgctacccatgagaagaaagctcatgaaaactggctcaaagctcgtgctgcagaaagagctatagctgaagagaaaagggaagctgccaatttgagacacaaattattagaattaacacaaaagatggcaatgctgcaagaagaacctgtgattgtaaaaccaatgccaggaaaaccaaatacacaaaaccctccacggagaggtcctctgagccagaatggctcttttggcccatcccctgtgagtggtggagaatgctcccctccattgacagtggagccacccgtgagacctctctctgctactctcaatcgaagagatatgcctagaagtgaatttggatcagtggacgggcctctacctcatcctcgatggtcagctgaggcatctgggaaaccctctccttctgatccaggatctggtacagctaccatgatgaacagcagctcaagaggctcttcccctaccagggtactcgatgaaggcaaggttaatatggctccaaaagggccccctcctttcccaggagtccctctcatgagcacccccatgggaggccctgtaccaccacccattcgatatggaccaccacctcagctctgcggaccttttgggcctcggccacttcctccaccctttggccctggtatgcgtccaccactaggcttaagagaatttgcaccaggcgttccaccaggaagacgggacctgcctctccaccctcggggatttttacctggacacgcaccatttagacctttaggttcacttggcccaagagagtactttattcctggtacccgattaccacccccaacccatggtccccaggaatacccaccaccacctgctgtaagagacttactgccgtcaggctctagagatgagcctccacctgcctctcagagcactagccaggactgttcacaggctttaaaacagagcccataaaactatgacctctgaggtttcattggaaagaaagtgtactgtgcattatccattacagtaaaggatttcattggcttcaaaatccaaaagtttattttaaaaggtttgttgttagaactaagctgccttggcagtgtgcatttttgagccaaacaattcaaaaatgtcatttcttccctaaataaaaatcaccttttaagctagagcgtccttacaactttgaaatgtgcaataaagaatacctgtgttttagctaatgtagcatatgtaattgcaaaatgatttagaatgtcatgaaaaatatgaacatttcctgtggaaatgctttaagaacatgtatttccattatcctatttttagtgtacaccagctgaatacggagcaatggtgtttataagcgtttttttaaactatctggtcacaaagactgttacgctaaaaatgtttactaaaagatcactaaactaaaaaaaaaaaaaaaaaaagaaaaaaaaaaaaaaaaaaaaaaaaaaaaactcaagggggggcccaggacccaattcgccctatagagagtcgccttacgggggactgggggccctattacaccttatggagtgggaaatccatggcgttgcccaactttttccactgtgggaacttgaaaatctcggcggttggccaattaacgaggagtgccgcaaataccgtttttcccaacgggggaaacacccaaaagcccaatggcaaatcggttccgaaataattgggacacaattggggtaaagccaatttt

SEQ ID NO: 405620 - DNA, 5184 bp, Homo sapiens
ccaagaggggcctggtacaagataagacagaattagaggatgaaaatcaagaaggcatgactgtgcacagttctgttcacagcaataacctcaactctatgccagctgctgaaaagggtaaagacacattaaaatcagcttatgatgatacagaaaatgacctaaaaggagcagctattcatatctcaaaaggaatgctccacgaagaaaagcctggagagcagattttggaaggtggctcagagagtgaatctgcacagaaagctgcagggaatcaaatgaatgacagaaagattcaacaggaatccctgggtagtgcaccactcatgggagatgaccaccctaacgcatccagagacagtgtggagggagacgctttggtaaatggggccaaactgcacacgctttcagtggagcatcaacgtgaggaattgaaagaggaattagttcttaaaactcaaaaccaacctagattctcctctccagatgagattgatttgcccagagaactggaagacgaggttcccattctgggaagaaatcttccctggcaacaagaaagagatgtggctgccacagccagtaagcaaatgagtgagaagataaggctctctgagggagaagccaaagaggactccttggatgaagagttttttcatcacaaggcaatgcagggcacagaggtaggacagacagaccaaactgacagcacaggaggaccagctttcctttctaaagtagaagaggatgattatccctctgaagaactactagaggatgaaaacgctataaatgcaaaacggtctaaagaaaaaaaccctgggaatcagggcaggcagtttgatgttaatctgcaagtccctgacagagcagttttagggaccattcatccagatccagaaattgaagaaagcaagcaagaaactagtatgattttggatagtgaaaaaacaagtgagactgctgccaaaggggtcaacacaggaggcagggaaccaaatacaatggtggaaaaagaacgccctctggcagataagaaagcacagagaccatttgaacgaagtgacttttctgacagcataaaaattcagactccagaattaggtgaagtgtttcagaataaagattctgattatctgaagaacgacaaccctgaggaacatctgaagacctcagggcttgcaggggagcctgagggagaactctcaaaagaggaccatgggaacacagagaagtacatgggcacagaaagccaggggtctgctgctgcagaacctgaagatgactcgttccactggactccacatacaagtgtagagccagggcatagtgacaagagggaggacttacttatcataagcagcttctttaaagaacaacagtctttgcagcggttccagaagtactttaatgtccatgagctggaagccttgctacaagaaatgtcatcaaaactgaagtcagcgcagcaggagagcctgccctataatatggaaaaagtcctagataaggtcttccgtgcttctgagtcacaaattctgagcatagcagaaaaaatgcttgatactcgtgtggctgaaaatagagatctgggaatgaacgaaaataacatatttgaagaggctgcagtgcttgatgacattcaagacctcatctattttgtcaggtacaagcactccacagcagaggagacagccacactggtgatggcaccacctctagaggaaggcttgggtggagcaatggaagagatgcaaccactgcatgaagataatttctcacgagagaagacagcagaacttaatgtgcaggttcctgaagaacccacccacttggaccaacgtgtgattggggacactcatgcctcagaagtgtcacagaagccaaatactgagaaagacctggacccagggccagttacaacagaagacactcctatggatgctattgatgcaaacaagcaaccagagacagccgccgaagagccggcaagtgtcacacctttggaaaacgcaatccttctaatatattcattcatgttttatttaactaagtcgctagttgctacattgcctgatgatgttcagcctgggcctgatttttatggactgccatggaaacctgtatttatcactgccttcttgggaattgcttcgtttgccattttcttatggagaactgtccttgttgtgaaggatagagtatatcaagtcacggaacagcaaatttctgagaagttgaagactatcatgaaagaaaatacagaacttgtacaaaaattgtcaaattatgaacagaagatcaaggaatcaaagaaacatgttcaggaaaccaggaaacaaaatatgattctctctgatgaagcaattaaatataaggataaaatcaagacacttgaaaaaaatcaggaaattctggatgacacagctaaaaatcttcgtgttatgctagaatctgagagagaacagaatgtcaagaatcaggacttgatatcagaaaacaagaaatctatagagaagttaaaggatgttatttcaatgaatgcctcagaattttcagaggttcagattgcacttaatgaagctaagcttagtgaagagaaggtgaagtctgaatgccatcgggttcaagaagaaaatgctaggcttaagaagaaaaaagagcagttgcagcaggaaatcgaagactggagtaaattacatgctgagctcagtgagcaaatcaaatcatttgagaagtctcagaaagatttggaagtagctcttactcacaaggatgataatattaatgctttgactaactgcattacacagttgaatctgttagagtgtgaatctgaatctgagggtcaaaataaaggtggaaatgattcagatgaattagcaaatggagaagtgggaggtgaccggaatgagaagatgaaaaatcaaattaagcagatgatggatgtctctcggacacagactgcaatatcggtagttgaagaggatctaaagcttttacagcttaagctaagagcctccgtgtccactaaatgtaacctggaagaccaggtaaagaaattggaagatgaccgcaactcactacaagctgccaaagctggactggaagatgaatgcaaaaccttgaggcagaaagtggagattctgaatgagctctatcagcagaaggagatggctttgcaaaagaaactgagtcaagaagagtatgaacggcaagaaagagagcacaggctgtcagctgcagatgaaaaggcagtttcggctgcagaggaagtaaaaacttacaagcggagaattgaagaaatggaggatgaattacagaagacagagcggtcatttaaaaaccagatcgctacccatgagaagaaagctcatgaaaactggctcaaagctcgtgctgcagaaagagctatagctgaagagaaaagggaagctgccaatttgagacacaaattattagaattaacacaaaagatggcaatgctgcaagaagaacctgtgattgtaaaaccaatgccaggaaaaccaaatacacaaaaccctccacggagaggtcctctgagccagaatggctcttttggcccatcccctgtgagtggtggagaatgctcccctccattgacagtggagccacccgtgagacctctctctgctactctcaatcgaagagatatgcctagaagtgaatttggatcagtggacgggcctctacctcatcctcgatggtcagctgaggcatctgggaaaccctctccttctggtaagggagcaagagtgttcaaagagtctaaaaccatgcaggaagtggggagaggattttttttttaatcctcctcacagagtacacaagtcagaataagtctacatcagttctctggtctttaacagatccaggatctggtacagctaccatgatgaacagcagctcaagaggctcttcccctaccagggtactcgatgaaggcaaggtaaatgcacccattttgaataattagttatttcaggaacatttagctcttcctacaactctctctttgcctcatctcctatttgtgtgttctatctgtactatctcatttattttttaaaaaagcaaactgttctccaagagcctgaagtcccctcagttcccagcattacatctttggctgagcgtccagtagcagtaagtacttagaagtgtggactgaactgggctataagttgcatggcaatattgatcttacttttatccttgacttgggagtgttgctgaaatctgacggattcattggccttttctcctctctcctgtttggttagacatttaacctgtgtagagcatctgctgtaactgtaattaacttaaacaaaagtgaaaagtccccactcttgtgtgtctcagtgtttaatgctcttaggcaaagtaaattcattgtaaattgtgtaattcattattatgtcttcatttggaagtgtgctatttaagaatacctacagttgtatactaggcaaaccctattttgaatgatctgaaattacagattgataacagaagaatgtttgctggaagtgaaatactgaatagtggaagtctataattacccgttgagccagttcccagcagtgtccttaaacagtgtccacataagtgtattctcttgtaacttgtatagctgttatggctggtaagtcctctgatcatacctcactgtgattctcgacattgaaattaaaataattttaatgattgagagtttccaacccactttcccataggaagtgattaatcagtatctcatagtagacagtattactagtgaatgaagatgaatagagctgtgcctgtataatttgtgtacataacattgtttctcttggaaaatacttccaagttccagcacaggactccaggaatacacatttcttgagaaatgtttttatccaagagcagcttggataagacccgagacccctttgaagtaggagacttcgaagagtgtagagactactttgttagaaaggagaagcagaggtggaaagaacgtggccttggagtcaaacctggcatggaattccagccagcctcttacatgctgtgtgaccatcagcaaatctaatactctctaaatctgtaataggaccatcttgttctaaatatgccaggaacacaggcgcagagagtattagatttagagatgtc

SEQ ID NO: 405621 - DNA, 1964 bp, Homo sapiens
aggttgaggccgccccactgcgccgagggccgccatcgctattgcggcattctccctcggctccggaggtaggggcaactcttctcttcctgtctgggaaaaagaccatagctcaaaaggaaggccgagggagaagttagaaagggatgatgaacgaagcgttttgaggggactgcaacgccgcggcaatacccgcccctgagctgcgcgcactaccgcctcggtagctgtcatggccgccgggtcacgtgactccggcttggcgccgtcctggttttccgtcaccctggttctgtagtctcggttctccgactccctctttttctcgcttgtggactccgatatattgcccttcttcccttagaagaactgctgaaccgactctgagaaatttgaaaacatctggagaaaatgacccattggtttcataggaacccattaaaagccacagctcctgtgtcttttaattactatggtgtagtcactggcccttctgcttcaaaaatatgcaatgacttgaggtcatccagggcacgactccttgaactgttcactgatttgagctgtaatccagaaatgatgaagaatgcagcagattcatatttctcacttttacaaggtttcataaattctttggatgaatctacccaagaaagcaagttacgatatattcaaaatttcaagtggactgatacattgcaaggacaggttccaagtgcccagcaggatgctgtttttgaattaatttccatgggatttaatgtagctttatggtataccaaatatgcttcaagactggctggaaaagaaaatataacagaagatgaagcaaaagaagttcatcgaagcctaaagattgcagctgggatttttaaacatttaaaggaaagtcatctcccaaaactcattacacctgcggaaaaaggaagagatttagagtcacgactcatagaagcatacgttattcaatgtcaggctgaagctcaagaagtaacaattgctcgagcaattgaactaaaacatgctcctggactaattgctgcactggcgtatgaaacagccaatttctatcaaaaagctgatcatactttatccagtttggagcctgcatattctgccaaatggagagaatatcttcacttgaagatgtgtttctacacagcttatgcttactgttaccatggtgagactttattggctagtgataaatgcggtgaagcaatcaggtctctccaagaagcagaaaaattgtatgcaaaggcagaagcactgtgtaaagaatatggagaaaccaaaggacctggaccaacagtcaaaccttcaggacatctgttctttaggaaacttggaaaccttgtgaagaacaccctagaaaaatgtcagagagaaaatggatttatttactttcaaaaaattccaacagaagccccacagctggaactcaaagcaaattatggtctcgtagagcctatacctttcgaatttcctcctacaagtgttcagtggacaccagaaacattggctgcatttgatctcaccaaaagacccaaggatgacagtactaaacccaaaccagaagaagaagtgaaacctgtgaaagaaccagacatcaaacctcaaaaggacactgggtgctacatctcctaaaatacaacttgcacttagaatttctctagcagtaaataagataaaccacagaatttcagttcttatttctcaaaatgatttctctgaagcttgtagaataactatatattcagagggttatctgccttcagcttacttgttcttaatttttaatacagcggagatgtttcttgctttgttttcagactctcctttttaatcaggacaacatttgaaagattttattgtgcctctaaagggtatatttgggggttgggtctttttgttaaactctggatagtaataagtttcaggtcagtataggcccgaatcatgtg

SEQ ID NO: 405622 - DNA, 1292 bp, Homo sapiens
caaaaacagcatcctgctgggcacttggaacctgtccttgcaatgtatcagtccacttgaaattttgaattaatttccatgggatttaatgtagctttatggtataccaaatatgcttcaagactggctggaaaagaaaatataacagaagatgaagcaaaagaagttcatcgaagcctaaagattgcagctgggatttttaaacatttaaaggaaagtcatctcccaaaactcattacacctgcggaaaaaggaagagatttagagtcacgactcatagaagcatacgttattcaatgtcaggctgaagctcaagaagtaacaattgctcgagcaattgaactaaaacatgctcctggactaattgctgcactggcgtatgaaacagccaatttctatcaaaaagctgatcatactttatccagtttggagcctgcatattctgccaaatggagagaatatcttcacttgaagatgtgtttctacacagcttatgcttactgttaccatggtgagactttattggctagtgataaatgcggtgaagcaatcaggtctctccaagaagcagaaaaattgtatgcaaaggcagaagcactgtgtaaagaatatggagaaaccaaaggacctggaccaacagtcaaaccttcaggacatctgttctttaggaaacttggaaaccttgtgaagaacaccctagaaaaatgtcagagagaaaatggatttatttactttcaaaaaattccaacagaagccccacagctggaactcaaagcaaattatggtctcgtagagcctatacctttcgaatttcctcctacaagtgttcagtggacaccagaaacattggctgcatttgatctcaccaaaagacccaaggatgacagtactaaacccaaaccagaagaagaagtgaaacctgtgaaagaaccagacatcaaacctcaaaaggacactgggtgctacatctcctaaaatacaacttgcacttagaatttctctagcagtaaataagataaaccacagaatttcagttcttatttctcaaaatgatttctctgaagcttgtagaataactatatattcagagggttatctgccttcagcttacttgttcttaatttttaatacagcggagatgtttcttgctttgttttcagactctcctttttaatcaggacaacatttgaaagattttattgtgcctctaaagggtatatttgggggttgggtctttttgttaaactctggatagtaataagtttcaggtcagtataggcccgaatcatgtg

SEQ ID NO: 405623 - DNA, 2424 bp, Homo sapiens
ccaagaggggcctggtacaagataagacagaattagaggatgaaaatcaagaaggcatgactgtgcacagttctgttcacagcaataacctcaactctatgccagctgctgaaaagggtaaagacacattaaaatcagcttatgatgatacagaaaatgacctaaaaggagcagctattcatatctcaaaaggaatgctccacgaagaaaagcctggagagcagattttggaaggtggctcagagagtgaatctgcacagaaagctgcagggaatcaaatgaatgacagaaagattcaacaggaatccctgggtagtgcaccactcatgggagatgaccaccctaacgcatccagagacagtgtggagggagacgctttggtaaatggggccaaactgcacacgctttcagtggagcatcaacgtgaggaattgaaagaggaattagttcttaaaactcaaaaccaacctagattctcctctccagatgagattgatttgcccagagaactggaagacgaggttcccattctgggaagaaatcttccctggcaacaagaaagagatgtggctgccacagccagtaagcaaatgagtgagaagataaggctctctgagggagaagccaaagaggactccttggatgaagagttttttcatcacaaggcaatgcagggcacagaggtaggacagacagaccaaactgacagcacaggaggaccagctttcctttctaaagtagaagaggatgattatccctctgaagaactactagaggatgaaaacgctataaatgcaaaacggtctaaagaaaaaaaccctgggaatcagggcaggcagtttgatgttaatctgcaagtccctgacagagcagttttagggaccattcatccagatccagaaattgaagaaagcaagcaagaaactagtatgattttggatagtgaaaaaacaagtgagactgctgccaaaggggtcaacacaggaggcagggaaccaaatacaatggtggaaaaagaacgccctctggcagataagaaagcacagagaccatttgaacgaagtgacttttctgacagcataaaaattcagactccagaattaggtgaagtgtttcagaataaagattctgattatctgaagaacgacaaccctgaggaacatctgaagacctcagggcttgcaggggagcctgagggagaactctcaaaagaggaccatgggaacacagagaagtacatgggcacagaaagccaggggtctgctgctgcagaacctgaagatgactcgttccactggactccacatacaagtgtagagccagggcatagtgacaagagggaggacttacttatcataagcagcttctttaaagaacaacagtctttgcagcggttccagaagtactttaatgtccatgagctggaagccttgctacaagaaatgtcatcaaaactgaagtcagcgcagcaggagagcctgccctataatatggaaaaagtcctagataaggtcttccgtgcttctgagtcacaaattctgagcatagcagaaaaaatgcttgatactcgtgtggctgaaaatagagatctgggaatgaacgaaaataacatatttgaagaggctgcagtgcttgatgacattcaagacctcatctattttgtcaggtacaagcactccacagcagaggagacagccacactggtgatggcaccacctctagaggaaggcttgggtggagcaatggaagagatgcaaccactgcatgaagataatttctcacgagagaagacagcagaacttaatgtgcaggttcctgaagaacccacccacttggaccaacgtgtgattggggacactcatgcctcagaagtgtcacagaagccaaatactgagaaagacctggacccagggccagttacaacagaagacactcctatggatgctattgatgcaaacaagcaaccagagacagccgccgaagagccggcaagtgtcacacctttggaaaacgcaatccttctaatatattcattcatgttttatttaactaagtcgctagttgctacattgcctgatgatgttcagcctgggcctgatttttatggactgccatggaaacctgtatttatcactgccttcttgggaattgcttcgtttgccattttcttatggagaactgtccttgttgtgaaggatagagtatatcaagtcacggaacagcaaatttctgagaagttgaagactatcatgaaagaaaatacagaacttgtacaaaaattgtcaaattatgaacagaagatcaaggaatcaaagaaacatgttcaggaaaccaggaaacaaaatatgattctctctgatgaagcaattaaatataaggataaaatcaagacactttcatccagaggacactttgcatccagag

SEQ ID NO: 405624 - DNA, 314 bp, Homo sapiens
aataagtctcaagcactgcttcggatggttttagaaagggcagttcccctgaacactctattgcctgccatcatgtcagacatgactttgagcctattcacctccaccatgattgtgagacctccccaggcatgtggaattgtgagtccattaaacctttcctttataagttacccagtctcaggtatgtctttattagcagtgtgagaacggattaatacagtaataaggctggcatttcctttatatgtgtgtgtgagcatatatataaaaagaggtattctccagtctttctcctttctcccattttacct

SEQ ID NO: 405625 - DNA, 217 bp, Homo sapiens
cttcccaatcgtgccccaaggcaggcccagctctgggttcagcatgtccatgtagctctgtatgtctgcagctctagtgctggaaagccctggggaggcagaaggaagggccagatttggaagcatgcagacagcctttcccccaagaatgagactctccaccacctggaaacaacttgccgagggccaaggtgggctccgggcaccacttggtaca

SEQ ID NO: 405626 - DNA, 409 bp, Homo sapiens
ggcccacagtctgcgccgggagctcaacgattccagggcccctgcagccctacccgcccggccccctctgcctcccagagatgaaaggggaaagccactgtgggagcttggtctaaggtggcgtgaagagggcagctactggagctggcctgcagctctagtgctggaaagccctggggaggcagaaggaagggccagatttggaagcatgcagacagcctttcccccaagaatgagactctccaccacctggaaacaacttgccgagggccaagacggagttttgttcttgttgcccaggctggagtacagtggcgcggtcttggctcagtgcaacctccacctcctgagttcaagcaattctcctgcctcagcctcccaagtagttggaattaaaggcacccgccac

SEQ ID NO: 405627 - DNA, 213 bp, Homo sapiens
gcggccgcctactactactatacggctgtttagaagcctacagaagggcagtgactcgacaaaggccacaggcagtccaggcctctctctgctccatccccctgcctcccattctgcaccacacctggcatggtgcagggagacatctgcacccctgagttgggcagccaggagtgcccccgggaatggataataaagatactagagaactga

SEQ ID NO: 405628 - DNA, 414 bp, Homo sapiens
ctccagggacccggtccaaatttcccgggtcacaacatactaataaattcgcggccgcgtcgcccaaggtcagggaggggcaaccaactgccccagggggatatgggtcctctggggccttcgggaccctggggcaggggtgcttcctcctcaggcccagctgctcccctggaggacagagggagacagggctgctccccaacacctgcctctgaccccagcatttccagagcagagcctacagaagggcagtgactcgacaaaggccacaggcagtccaggcctctctctgctccatccccctgcctcccattctgcaccacacctggcatggtgcagggagacatctgcacccctgagttgggcagccaggagtgcccccgggaatggataataaagatactagagaactga

SEQ ID NO: 405629 - DNA, 465 bp, Homo sapiens
gtctgacttcctcccagcacattcctgcactctgccgtgtccacactgccccacagacccagtcctccaagcctgctgccagctccctgcaagcccctcaggttgggccttgccacggtgccagcaggcagccctgggctgggggtaggggactccctacaggcacgcagccctgagacctcagagggccaccccttgagggtggccaggcccccagtggccaacctgagtgctgcctctgccaccagccctgctggcccctggttccgctggccccccagatgcctggctgagacacgccagtggctcgacaaaggccacaggcagtccaggcctctctctgctccatccccctgcctcccattctgcaccacacctggcatggtgcagggagacatctgcacccctgagttgggcagccaggagtgcccccgggaatggataataaagatactagagaactga

SEQ ID NO: 405630 - DNA, 1660 bp, Homo sapiens
  misc_feature (41)..(41): n is a, c, g, or t
ctactactactactaaattcgcggccctcgacttttttttntcagttctctagtatctttattatccattccctcagctgcccacacctcttcccggcccctgaagttggcactgcagcagacagctccctgggcaccaggcagctaacagacacagccgccagcccaaacagcagcggcatgggcagcgccagcccgggtctgagcagcgtatcccccagccacctcctgctgccccccgacacggtgtcgcggacaggcttggagaaggcggcagcgggggcagtgggtctcgagagacgggactggagtcccagtccacccgccacgcccgagcagggcctgtccgccttctacctctcctactttgacatgctgtaccctgaggacagcagctgggcagccaaggcccctggggccagcagtcgggaggagccacctgaggagcctgagcagtgcccggtcattgacagccaagccccagcgggcagcctggacttggtgcccggcgggctgaccttggaggagcactcgctggagcaggtgcagtccatggtggtgggcgaagtgctcaaggacatcgagacggcctgcaagctgctcaacatcaccgcagatcccatggactggagccccagcaatgtgcagaagtggctcctgtggacagagcaccaataccggctgccccccatgggcaaggccttccaggagctggcgggcaaggagctgtgcgccatgtcggaggagcagttccgccagcgctcgcccctgggtggggatgtgctgcacgcccacctggacatctggaagtcagcggcctggatgaaagagcggacttcacctggggcgattcactactgtgcctcgaccagtgaggagagctggaccgacagcgaggtggactcatcatgctccgggcagcccatccacctgtggcagttcctcaaggagttgctactcaagccccacagctatggccgcttcattaggtggctcaacaaggagaagggcatcttcaaaattgaggactcagcccaggtggcccggctgtggggcatccgcaagaaccgtcccgccatgaactacgacaagctgagccgctccatccgccagtattacaagaagggcatcatccggaagccagacatctcccagcgcctcgtctaccagttcgtgcaccccatctgagtgcctggcccagggcctgaaacccgccctcaggggcctctctcctgcctgccctgcctcagccaggccctgagatgggggaaaacgggcagtctgctctgctgctctgaccttccagagcccaaggtcagggaggggcaaccaactgccccagggggatatgggtcctctggggccttcgggaccctggggcaggggtgcttcctcctcaggcccagctgctcccctggaggacagagggagacagggctgctccccaacacctgcctctgaccccagcatttccagagcagagcctacagaagggcagtgactcgacaaaggccacaggcagtccaggcctctctctgctccatccccctgcctcccattctgcaccacacctggcatggtgcagggagacatctgcacccctgagttgggcagccaggagtgcccccgggaatggataataaagatactagagaactga

SEQ ID NO: 405631 - DNA, 511 bp, Homo sapiens
  misc_feature (41)..(41): n is a, c, g, or t
ctactactactactaaattcgcggccctcgacttttttttntcagttctctagtatctttattatccattccgggcctctctcctgcctgccctgcctcagccaggccctgagatgggggaaaacgggcagtctgctctgctgctctgaccttccagagcccaaggtcagggaggggcaaccaactgccccagggggatatgggtcctctggggccttcgggaccctggggcaggggtgcttcctcctcaggcccagctgctcccctggaggacagagggagacagggctgctccccaacacctgcctctgaccccagcatttccagagcagagcctacagaagggcagtgactcgacaaaggccacaggcagtccaggcctctctctgctccatccccctgcctcccattctgcaccacacctggcatggtgcagggagacatctgcacccctgagttgggcagccaggagtgcccccgggaatggataataaagatactagagaactga

SEQ ID NO: 405632 - DNA, 2059 bp, Homo sapiens
  misc_feature (1908)..(1908): n is a, c, g, or t
  misc_feature (1911)..(1911): n is a, c, g, or t
gtctgacttcctcccagcacattcctgcactctgccgtgtccacactgccccacagacccagtcctccaagcctgctgccagctccctgcaagcccctcaggttgggccttgccacggtgccagcaggcagccctgggctgggggtaggggactccctacaggcacgcagccctgagacctcagagggccaccccttgagggtggccaggcccccagtggccaacctgagtgctgcctctgccaccagccctgctggcccctggttccgctggccccccagatgcctggctgagacacgccagtggcctcagctgcccacacctcttcccggcccctgaagttggcactgcagcagacagctccctgggcaccaggcagctaacagacacagccgccagcccaaacagcagcggcatgggcagcgccagcccgggtctgagcagcgtatcccccagccacctcctgctgccccccgacacggtgtcgcggacaggcttggagaaggcggcagcgggggcagtgggtctcgagagacgggactggagtcccagtccacccgccacgcccgagcagggcctgtccgccttctacctctcctactttgacatgctgtaccctgaggacagcagctgggcagccaaggcccctggggccagcagtcgggaggagccacctgaggagcctgagcagtgcccggtcattgacagccaagccccagcgggcagcctggacttggtgcccggcgggctgaccttggaggagcactcgctggagcaggtgcagtccatggtggtgggcgaagtgctcaaggacatcgagacggcctgcaagctgctcaacatcaccgcagatcccatggactggagccccagcaatgtgcagaagtggctcctgtggacagagcaccaataccggctgccccccatgggcaaggccttccaggagctggcgggcaaggagctgtgcgccatgtcggaggagcagttccgccagcgctcgcccctgggtggggatgtgctgcacgcccacctggacatctggaagtcagcggcctggatgaaagagcggacttcacctggggcgattcactactgtgcctcgaccagtgaggagagctggaccgacagcgaggtggactcatcatgctccgggcagcccatccacctgtggcagttcctcaaggagttgctactcaagccccacagctatggccgcttcattaggtggctcaacaaggagaagggcatcttcaaaattgaggactcagcccaggtggcccggctgtggggcatccgcaagaaccgtcccgccatgaactacgacaagctgagccgctccatccgccagtattacaagaagggcatcatccggaagccagacatctcccagcgcctcgtctaccagttcgtgcaccccatctgagtgcctggcccagggcctgaaacccgccctcaggggcctctctcctgcctgccctgcctcagccaggccctgagatgggggaaaacgggcagtctgctctgctgctctgaccttccagagcccaaggtcagggaggggcaaccaactgccccagggggatatgggtcctctggggccttcgggaccctggggcaggggtgcttcctcctcaggcccagctgctcccctggaggacagagggagacagggctgctccccaacacctgcctctgaccccagcatttccagagcagagcctacagaagggcagtgactcgacaaaggccacaggcagtccaggcctctctctgctccatccccctgcctcccattctgcaccacacctggcatggtgcagggagacatctgcacccctgagttgggcagccaggagtgcccccgggaatggataataaagatactagagaactgaaaaaaaaaaaaanaanaaaacaaatacacaacaagggggggcgcaaaaaaactcccgagggggcccagattaacggacacagctttttcacaagggcccaagagggggatatacagagaagcgccgcggtaaaacggcgggggaaacgggcgggcttgtgaaga

SEQ ID NO: 405633 - DNA, 1895 bp, Homo sapiens
gtctgacttcctcccagcacattcctgcactctgccgtgtccacactgccccacagacccagtcctccaagcctgctgccagctccctgcaagcccctcaggttgggccttgccacggtgccagcaggcagccctgggctgggggtaggggactccctacaggcacgcagccctgagacctcagagggccaccccttgagggtggccaggcccccagtggccaacctgagtgctgcctctgccaccagccctgctggcccctggttccgctggccccccagatgcctggctgagacacgccagtggcctcagctgcccacacctcttcccggcccctgaagttggcactgcagcagacagctccctgggcaccaggcagctaacagacacagccgccagcccaaacagcagcggcatgggcagcgccagcccgggtctgagcagcgtatcccccagccacctcctgctgccccccgacacggtgtcgcggacaggcttggagaaggcggcagcgggggcagtgggtctcgagagacgggactggagtcccagtccacccgccacgcccgagcagggcctgtccgccttctacctctcctactttgacatgctgtaccctgaggacagcagctgggcagccaaggcccctggggccagcagtcgggaggagccacctgaggagcctgagcagtgcccggtcattgacagccaagccccagcgggcagcctggacttggtgcccggcgggctgaccttggaggagcactcgctggagcaggtgcagtccatggtggtgggcgaagtgctcaaggacatcgagacggcctgcaagctgctcaacatcaccgcagatcccatggactggagccccagcaatgtgcagaagtggctcctgtggacagagcaccaataccggctgccccccatgggcaaggccttccaggagctggcgggcaaggagctgtgcgccatgtcggaggagcagttccgccagcgctcgcccctgggtggggatgtgctgcacgcccacctggacatctggaagtcagcggcctggatgaaagagcggacttcacctggggcgattcactactgtgcctcgaccagtgaggagagctggaccgacagcgaggtggactcatcatgctccgggcagcccatccacctgtggcagttcctcaaggagttgctactcaagccccacagctatggccgcttcattaggtggctcaacaaggagaagggcatcttcaaaattgaggactcagcccaggtggcccggctgtggggcatccgcaagaaccgtcccgccatgaactacgacaagctgagccgctccatccgccagtattacaagaagggcatcatccggaagccagacatctcccagcgcctcgtctaccagttcgtgcaccccatctgagtgcctggcccagggcctgaaacccgccctcaggggcctctctcctgcctgccctgcctcagccaggccctgagatgggggaaaacgggcagtctgctctgctgctctgaccttccagagcccaaggtcagggaggggcaaccaactgccccagggggatatgggtcctctggggccttcgggaccctggggcaggggtgcttcctcctcaggcccagctgctcccctggaggacagagggagacagggctgctccccaacacctgcctctgaccccagcatttccagagcagagcctacagaagggcagtgactcgacaaaggccacaggcagtccaggcctctctctgctccatccccctgcctcccattctgcaccacacctggcatggtgcagggagacatctgcacccctgagttgggcagccaggagtgcccccgggaatggataataaagatactagagaactga

SEQ ID NO: 405634 - DNA, 1402 bp, Homo sapiens
gtctgacttcctcccagcacattcctgcactctgccgtgtccacactgccccacagacccagtcctccaagcctgctgccagctccctgcaagcccctcaggttgggccttgccacggtgccagcaggcagccctgggctgggggtaggggactccctacaggcacgcagccctgagacctcagagggccaccccttgagggtggccaggcccccagtggccaacctgagtgctgcctctgccaccagccctgctggcccctggttccgctggccccccagatgcctggctgagacacgccagtggcctcagctgcccacacctcttcccggcccctgaagttggcactgcagcagacagctccctgggcaccaggcagctaacagacacagccgccagcccaaacagcagcggcatgggcagcgccagcccgggtctgagcagcgtatcccccagccacctcctgctgccccccgacacggtgtcgcggacaggcttggagaaggcggcagcgggggcagtgggtctcgagagacgggactggagtcccagtccacccgccacgcccgagcagggcctgtccgccttctacctctcctactttgacatgctgtaccctgaggacagcagctgggcagccaaggcccctggggccagcagtcgggaggagccacctgaggagcctgagcagtgcccggtcattgacagccaagccccagcgggcagcctggacttggtgcccggcgggctgaccttggaggagcactcgctggagcaggtgcagtccatggtggtgggcgaagtgctcaaggacatcgagacggcctgcaagctgctcaacatcaccgcaggtgagccctctccatgtgcctgcttccgtaagatgggtcacaggcaaggctgaggtcgctggggtgggtcggggcactgctggatggactctggccacctctggcccagcctcgggcagctttggggatgctggcacttctacacacagtcagctgtgagcctgggccaggaaggtttctgtccacctctagtgtcccaaccatgccagcctagggtccccactggtaggtgctggatgatatgaattcaagctctgtgtcccccacctcctcttggacttcgctctcccctcattcactctgctcccgccacactggcctgtttgctgttcccacaacatttgctacgctgctgcttcttcagcctagagcgctcttcccccaaatatctgtgtgactcacttccttcaggtcttggctcagatggcaccatccgcatgaggccttccctgacccctccattaaaattgctgcccatgagcacaggacatggtaaagaaaacaaacaaaaaaatgaaaaataaaagaaagaagaaaaatttctgctcaca

SEQ ID NO: 405635 - DNA, 492 bp, Homo sapiens
tgtaatcccagcagtttgggaggctgaggcgggcggatcacctgaggtcaggtgttcgagaccagcctgaccaacatggtgaaaccccatctctactaaaaatacaaaagttagccagacatggtggcaggtgcctgtaatcccagctacttgggaggctgaagcaggagaatcgctggaacttgggaggtggaggttgtagtgagcagagatcacgccattgcactccagcctgggcgacaagagcaaaacttcatctcaaaacaaacaaacaaaaaggtagaggaagggagaattatctctctgcctgactgcttgagaggtggcaccttctcctgtcctccagctgggacttgaacccacagccccactcatgtgcaggccttcaactcaaactggaaccacaacaccggctctcctgggtctctggcttgcagatggcagatcgtgaggcttttcagcttccaaaatcatgtgagccaactcctcaga

SEQ ID NO: 405636 - DNA, 663 bp, Homo sapiens
gagcagcctaccgaggctgaagggcaggcaacaaatggaaaaggaaggaaaaatacaaacccgccctttcctccctcttgtgaacctgttcaaagcacttgcctcgcccgcccgtgaggaaacaggtgctgagtgctcctggggaagccaaactttctcccggtttcccctgggccactttcccactccccagggacagtagcagagcttccagctgaaggcagctgccaccttcccccatggccccccacctttaggactcaacagccccacccattcaccagctagggaacatggagtcatagcagtcctgtttattgagtacctaatctgccagacatcgggctgaatgccttccttccagccattcaagaaacatatatagagcacctaccgtgtgcaaggcagcggggacacagcaccgaacaaaatagataaaaattccttgtcctaatggagtttacatgctggcatgggcaaaaccccttaaacaagataaataagtaaaatgcatagtgtatcggggcgatgcatgctgaggggcagtggaagcatggaagggagactgggtgctggggaaagggaaatgctgacacttcaataaaaatttgaggttcggccgggcgcgcagtagctcacgcctgtaatcccagcactttgaga

SEQ ID NO: 405637 - DNA, 697 bp, Homo sapiens
gacttttcaaatgttgactcaaccttccgtttctggaataaaactactttgctcatgatattggtcatatggatagatatttctggtcttggtttgctattttttaaagacaattttgcatctgtagttgtaatttttctagattttgcatctcattttccttgtaattttttcagtgacctgtaattttattttcttgtaatgccctgcaacttattgttattgataaccaccacccctttactaataaagaagctataattcaggaagaagataggtcccatgcaacccgttagtttccatctatccaccagagaacgttagtttgtcgagggaaacactggctgatggatccagtagtaggaaaacataatagacattcaggttttggtaaccaaagttgtgctaatcttgtagagtgagtaggagaatgttcctgcctattcttttcttggaagggtgtgtataagattgttaatagccatcaccgccactcatctctagagcttttcatttttctcaactgaaactatgcatctattaaacaccaattttccctagcacctggcaactaccattctactttctgtgtctgaatttgactactccaggtacttcatatacatggaaccatacagtatttatccttttgggattggcttatttcacttagcatgtcttcaaggttcatccatgt

SEQ ID NO: 405638 - DNA, 254 bp, Homo sapiens
tacattcctaggccgttttacattcaaaataccaaaccctaactaattccttaaagctagatcccaaatccaattcctgaccctcatttgccaacacaaattaaaaaaaaaaaaatcaagacagatggacagatgacaaacaagtatatgaaaagatgatccacatcacacgtcatcagggaaatgcaaactgaaatgatgatactaatacacacctgttggaatggccaaaatctagaacactgacaacacca

SEQ ID NO: 405639 - DNA, 271 bp, Homo sapiens
cgccactgcactccagcctgggcaacaagagtgaaactatgtctcaaagaaaaagcaattttataggtctcatcccagaatcaaaaatgctggagtaattaacaagacctctagatgattctgatgaacccctactccacgttatgaattaagtacttgagcctagggcctttatttaagggttgtccttctcttgcgtagctcttttaaagtgtccagtattctgaagttaggagccaagtgtggtaaagatgtttcttttgggaagaaa

SEQ ID NO: 405640 - DNA, 361 bp, Homo sapiens
gcgtcgtcatccatgagaagaaggtgtccagcttcgaagtcttcctgaaggaggtgaccggcggcgttcaggcaccctttggggccgtcaggaacatctacaccccgcggactggccaccgaatccggaagctagaccagatccagagcgggggcaattacgtggctggaggccaggaagccttcaagaaactcaattacttggacataggagaaatcaagaaaagaccaatggaagttgttaatacagaggtaaaaccagtaatccatagcaggatcaacgtgtcagctcgctttagaaaaccgcttcaggagccgtgcactatcttcttgattgcaaatggagacctcataaacccagc

SEQ ID NO: 405641 - DNA, 329 bp, Homo sapiens
tctcaggcagttccctagaaactgtagattttcctcataggaaaaaaaaagctaatataagcttagtggtttatattttttttcctttgcttttaaaggtaaaaccagtaatccatagcaggatcaacgtgtcagctcgctttagaaaaccgcttcaggagccgtgcactatcttgtaagttgaaaccctttatacttcaagttaaaattggcttggtggtttccttttggtttggaatttgtgttgtagttttcaaggcataactgtttcagaaggtttgcctcctgttttccagcttgattgcaaatggagacctcataaacccagc

SEQ ID NO: 405642 - DNA, 340 bp, Homo sapiens
gcgtcgtcatccatgagaagaaggtgtccagcttcgaagtcttcctgaaggaggtgaccggcggcgttcaggcaccctttggggccgtcaggaacatctacaccccgcggactggccaccgaatccggaagctagaccagatccagagcgggggcaattacgtggctggaggccaggaagccttcaagaaactcaattacttggacataggagaaatcaagaaaagaccaatggaagttgttaatacagagctacatgttctctgattgaaatccatgggaaggttccctgtcaagtgagaagattctgagcgttgttaaataaatctttaccaaagcta

SEQ ID NO: 405643 - DNA, 800 bp, Homo sapiens
cgctcctccgggcagagcgcgtgtggcggccgagcacatgggcccgcgggccgggcgggctcggggcggcgggacgaggaggggcgacgacgagctgcgagcaaagatgtgccccgggacccccggcaccttccagtggatttccttgcggaaaggatgtggcggtccctgtgacctgtggagacacggcagatctgccctccacagatggagaaaagaagattacccttcccaatgtgggtggaagtaacctagtcaactgaaggccagaccagaacttacatcattggctctcctgagtctccagcttgccggctgctaatcttgggatttctccatgtcatgccctatctccaaatacagtcacattctgggaccgcagattatgaacacaggaatgttttgacactggagactgtggagggaactcagcccagggtctgattggtgtcaggctctgtacatggacactgtggtggaggtaattacctgcagctctaggagcacccagagaacaaagtcattaactcattaggccagaaggagactaggaagactccacagagaaggctataaggaaacattgcacaggagcggcagggcaggaagcgtgctttatgaagatttacccggcagcaggtgtgaaattggcagaagagacaggaggatgacgctgagaagtgaagggcttgaggcataaaacagttaacaaactgttgaagctgtcttggggagaggtaattaattctgctcagctgttagttggtgttctgactgtacacatttagaatgatgggctt

SEQ ID NO: 405644 - DNA, 591 bp, Homo sapiens
gcggccgctccgccctcacctgagcctgaggttggccatgaactcgggcatggagacggtgtccatcagcacgaagtctgccttgccgaattccaggctctcctgctccgccatggcgccagcgcgggggctcaggattattgcggatgtcttgagcatgggaccattctttttgcatccaccaaataactattgtactactttgcatatataaatatgaaatccatactggttcagtggaatgaagtgagttgacatcttctattacaaaatctacgaggaaatctagaggcctccaaggacctggctgggcttcaactctggctgagtttgagatgagtaaaccagactgaaggaccttgcccaaggcctgcttcagctgccagccacccacacttgctaagagaaaggaaaggagctttgtcacctcctgagggactgcctctgccatcagaaaaccaccccaatccctggcaccagcagagctgggttgcatctgactaccgttagcagctgtccttcagaaggaggagatccacctgtctcgatatcagtgtcctcatttgtggaataaaagctctggaataaggt

SEQ ID NO: 405645 - DNA, 175 bp, Homo sapiens
ctcccaggcgcttgtagggggaagaggggatggcaaaggggattaagagcctggaaaaagccaacggcatgggccagggaagttccacagggaagggcctttccggggtttggggtagaacagtttagaaatgtgtgagcaagaggaaggctctgtgaggccaacaacaggctgg

SEQ ID NO: 405646 - DNA, 562 bp, Homo sapiens
aactaggggtaaagttatcagtagcacatgtattataagctaacttgataattcttacgttgtttatcatgtaatctgtgttttgatagtgatgaagaatattcattgcacttcattaagagagaatatttttgtttctcttcaataattgttcaaaaaaatttgaggcaagttttgcttcttataatggtgagaaaacttttttagactaactatacccctcctcactgagaggtgaagccagacttctgggccgggtggggacttagagaacttttctgtcttacaagaggattgtaaaatgcaccaatcagcactctgtagctaggattgtaaaatgcatcaatcagtgctctgtggctaactagaggtttgtaaagtacgccagtcagtgctctgtaaaaacgcaccaatcagtgctctatggctagctagaggtttgtaaaatggaccaatcagcactctgtaaaatggaccaatcagcgctctgtaaaatggaccaatcagtgctctgtaaaatggaccaatcagcaggacatggtggagacaaataagagaataa

SEQ ID NO: 405647 - DNA, 172 bp, Homo sapiens
acaccaaacactggccatggcaggacgttcctataagcacatattagggtgacatatcatacttgagggctttagtgccatatctgtaagatccattagaagtcaacaggaaaataacatgaaatccaaaaactgctttattttcaacaaagcaacaaacgagccagtagtg

SEQ ID NO: 405648 - DNA, 378 bp, Homo sapiens
gaagggaagggaagagaagagagaagaagaaagggaaaagaggggaggggagggaagaaagaggctgggcacggtggctcacgactgtgatcctagcactttaggaggctgaggcaggaggattgcttgagaccaagagttgaagaccaacctggccaacttaacaagaccccatctctataaaaaaacaaagagaggtagggaggaagaaaaattgggcattcattcaacaaacatttactaagtgcctactgctgtgctgagcgctattttaagtgctgggatacagaagcaaacaagacaaaatccttgctctggaagagctgacattccagaggacagcccacccgagcaaaatggaggaagagtcaggagctg

SEQ ID NO: 405649 - DNA, 418 bp, Homo sapiens
ggggagcaaaataacattccataaagagctgggcttagacaggtgcattggctcaacatctgtaatcccagcactttgggaggcagaagtggaaggatcacttgaggcctggagtttgaaaccagcctaggaaacatagtgagaccgtatctttaaaaaaatttttaaagttagccaggcatggtggtgtgtgcctgtagtcctagctactcaggaggctgaggtgggaggattgcttgagcccaggagttcaaggctgcagtgagctaggatcgtgccactgcactctaccctgggcaacagacctagaccctgtctcttatataaacaaaagagctgggcttaactgtgaacaatgtgtttagaactctggagagttgcagttctagctttccttgtctttttttcttattcactc

SEQ ID NO: 405650 - DNA, 282 bp, Homo sapiens
tctagttgatagaaagtttctctgctgaggtggaatctggcttcccctgcaatccctgtactttggttcttagttttggcttgtgaagtaacacagaatatgtgtcttgtctatagcaggttgctaagtaaatgaagacagccctccatcttctttcatttccagtgtcccttcattcctcgacacccagcctgctctcttgatgtattcttccaattttcatatatggaggagatcacatctaaaaggtgttactaacaaaagaatctggctaggtgctgt

SEQ ID NO: 405651 - DNA, 251 bp, Homo sapiens
ggaatacaccgaaaaaaggacccctcctccccagaacttgggatagtattgttataagtctttttgttatgttatagtttttatgtcttggacttaaaaaaaaaataggtctcttgagtaaagaatatacaagtgaaccatgaggttgatcagcactgactaacgaggtgtggctcagtccttgcagtcccacagctgcctgtggtcctacctggagccgctttgtgtgcattggtccccccttgaggtct

SEQ ID NO: 405652 - DNA, 447 bp, Homo sapiens
caaaattcatggatgctcaagtctcttatatagggtgatgtagtatttgcatataaacctatgcctatcctactatatactttaaataatctctatattactcataattcctaatacaatttaaatactatgaaaataattgttacactgtattgtttagggaataattacaagaaaaaaaaagtctgtacatgttcagtacagatgcaactgtcataagcctaactatattttcaatctgcagttgattgaatccacagaggaggaacttacagatacagggggctgactgtatatacacacatacacagatatttaatatagaagaatttcttttttaaccccaaagctagtattaagttggtgttatgacttgtagtgtcttagttcatacattcttactctaaaaggagtctgtacaaagtttagtgggaggattatggaaga

SEQ ID NO: 405653 - DNA, 134 bp, Homo sapiens
aaccattgtgctagaaagtgaggaaaggggccaggcacatgggccctatataggtctgcatccctgacaagtccagtctggttttccacactgaacttcaaggaaagaaaaatgtttttagagtcactcgattt

SEQ ID NO: 405654 - DNA, 363 bp, Homo sapiens
cccatccccggagcaaggataacccactcctcctgctcaaagggtcaggactgttgatttaaaaggaaaagaacaaaaagaccatcccaggcgtggagaggtcagaccctcacgagggcaaaggggatgtcaaacggcgcggctgctgtggaaagcagcctggggttcctccacggttccatgtggagttaccgccccagcaattccacttctgggcgtgcacccgaggggatggaaaacaggtgtccaaacaaaaacaagcacacgaacacacagggcagcaccatttctagtggcctgaaacaggaacagcccccacgctcgccgctgatgaatggatacacaccatgtggtgggtctgct

SEQ ID NO: 405655 - DNA, 341 bp, Homo sapiens
attaattcttacttctcagcatcaagtatctagatgaatcttaccaattctccttttactctgttgcctggcattgattctactttaattggaactccatctttgccttctcgataagttagcttgctttctcattcctttttttctttctttcttttttgtgtcttcctcaaacttacccttaccctgctatctcttcctgtgtgattatttcactctgaagttttgtcacagttttttttttttactgcagcttccaaggtcatttgaaatttgtgtgttcatggtaattaccactctgctataatgttggagtaaaggcaaaaattgtcattcattct

SEQ ID NO: 405656 - DNA, 2062 bp, Homo sapiens
tccgcgctcgcgctcgacggtgtcctgaagcgcgctcccggggaggtgttgcagccatggctacggcagccggcgcgacctactttcagcgaggcagtctgttctggttcacagtcatcaccctcagctttggctactacacatgggttgtcttctggcctcagagtatcccttatcagaaccttgggcccctgggccccttcactcagtacttggtggaccaccatcacaccctcctgtgcaatgggtattggcttgcctggctgattcatgtgggagagtccttgtatgccatagtattgtgcaagcataaaggcatcacaagtggtcgggctcagctactctggttcctacagactttcttctttgggatagcgtctctcaccatcttgattgcttacaaacggaagcgccaaaaacaaacttgaagttgtctgaaagcttgctctacacttttacattcatcctcacccttttttttgtggggtagaggaggtgcagtaatttactcagtgatctttctactttctagaaactgtccttcaaagctctttaagaccccctcgttagtcagttttttctcttatatgctctggttgagcttgaatagaccagttgttacttaagaaagaaacagagaaagattttagcttttcaatcctatttggcagaggacttcagctaccttcttacagtctttggctgtgttggtaccctcgtgtgctctgagctaagccacatactaaactgactttttggtttgtatacccttgctcccgccttctgatgaaaacaccttaccctcacaaccaccatctttcctctcctttccaaagctctttccaccttgctgcactaagataaagtgacacttccactatatgtcaattccacacacatttattaggtacctgtgaggtaggatcctatcctctcaaacttccatttctcatgctacagagaaagataaggaagatgagcaagtgcctggaatggggcaggctgagcagtcacacaggcatagaggcacgctgagaacctggaggggagactgcagagtgccttccctgatgctgcagccggaagtgatccttccctccacctggcccctgggacactgtgctctgcagtgtgcagggcctgatggcactgctagattgctccttcagctcagggccacagcttaaacagctttacctttcccctcagcacctgtcccactatcttgcacacaggtgctctaaccatgtttattgaacaaaggagggaaactgatttcactttcacttgttcattatcattccaatttttatgtgaaaatggcacaacccatttggggtaccctcaccccaaaataaaagcccaagtctacctttgactggtaccaccttttttgtggtttcgttggtgagaaacctttatctttttcatacctttctattctcaatcacttctccaaaagtgtgtctttccagctctgatttattcaaaacacaagcatttctgtttagagattctagcccatgggttatctggctagttattacctctcctgttcacttagttatactttattattgctcacaggctggggaggcagaatgactctgtcaccactaggagccattagggcttcttccctggaggactgcctgcttgctttctggggacactagccctcatttcccttctgtggtacagtggggcaaattatttgtattaagcaaacatttatgggaaacaacccgctcccgaaaacggagcccccaagtaaagcacaaccctgaaagattatgaactatgaattgtctctagtagagataaatttctgcaaacatatctcagtcttccctctgtttctctggtgattaagaagttcctttttggtaaggaaaaggatttttaaccatagagttaggcatcatggaaattcaaaccagatttcttaatacctggtcttcctcaaagagaaataataacagtaatagtggtgctgggaacaatatggcagattattgaatgaaattgattaacttgaataaaatgctgtgaattttctcta

SEQ ID NO: 405657 - DNA, 2379 bp, Homo sapiens
ctcttaggatagtttctgctttctagtgttcctgtctttgggtcctcacctctgcatggttactaacgggttatccgagcctaagcctctcacgaagcggaaagtcaagttaacagactgccataggcctgccaagtcagaatagggcttccgaagcagaatgtttgagccaataggaattgtttggaaaacggggataaatctaaaggatgggtaggatttaagtggtaagggaggataaagaggctataactgttctgacataggtgtggaagcaagaagaaagctgtacctagaaaaagagcgacgtttgtttggctgagaaataatctgtttaaaggataatgagaaagatgcgtggaaaaccccagcagcggagtgagaccctgtcaaaaaaaaaagaaagaaagaaaatagaagccaagaatggagacccaaatgactgttcagagtttcttcgtgggttgtcttctggcctcagagtatcccttatcagaaccttgggcccctgggccccttcactcagtacttggtggaccaccatcacaccctcctgtgcaatgggtattggcttgcctggctgattcatgtgggagagtccttgtatgccatagtattgtgcaagcataaaggcatcacaagtggtcgggctcagctactctggttcctacagactttcttctttgggatagcgtctctcaccatcttgattgcttacaaacggaagcgccaaaaacaaacttgaagttgtctgaaagcttgctctacacttttacattcatcctcacccttttttttgtggggtagaggaggtgcagtaatttactcagtgatctttctactttctagaaactgtccttcaaagctctttaagaccccctcgttagtcagttttttctcttatatgctctggttgagcttgaatagaccagttgttacttaagaaagaaacagagaaagattttagcttttcaatcctatttggcagaggacttcagctaccttcttacagtctttggctgtgttggtaccctcgtgtgctctgagctaagccacatactaaactgactttttggtttgtatacccttgctcccgccttctgatgaaaacaccttaccctcacaaccaccatctttcctctcctttccaaagctctttccaccttgctgcactaagataaagtgacacttccactatatgtcaattccacacacatttattaggtacctgtgaggtaggatcctatcctctcaaacttccatttctcatgctacagagaaagataaggaagatgagcaagtgcctggaatggggcaggctgagcagtcacacaggcatagaggcacgctgagaacctggaggggagactgcagagtgccttccctgatgctgcagccggaagtgatccttccctccacctggcccctgggacactgtgctctgcagtgtgcagggcctgatggcactgctagattgctccttcagctcagggccacagcttaaacagctttacctttcccctcagcacctgtcccactatcttgcacacaggtgctctaaccatgtttattgaacaaaggagggaaactgatttcactttcacttgttcattatcattccaatttttatgtgaaaatggcacaacccatttggggtaccctcaccccaaaataaaagcccaagtctacctttgactggtaccaccttttttgtggtttcgttggtgagaaacctttatctttttcatacctttctattctcaatcacttctccaaaagtgtgtctttccagctctgatttattcaaaacacaagcatttctgtttagagattctagcccatgggttatctggctagttattacctctcctgttcacttagttatactttattattgctcacaggctggggaggcagaatgactctgtcaccactaggagccattagggcttcttccctggaggactgcctgcttgctttctggggacactagccctcatttcccttctgtggtacagtggggcaaattatttgtattaagcaaacatttatgggaaacaacccgctcccgaaaacggagcccccaagtaaagcacaaccctgaaagattatgaactatgaattgtctctagtagagataaatttctgcaaacatatctcagtcttccctctgtttctctggtgattaagaagttcctttttggtaaggaaaaggatttttaaccatagagttaggcatcatggaaattcaaaccagatttcttaatacctggtcttcctcaaagagaaataataacagtaatagtggtgctgggaacaatatggcagattattgaatgaaattgattaacttgaataaaatgctgtgaattttctcta

SEQ ID NO: 405658 - DNA, 2008 bp, Homo sapiens
tccgcgctcgcgctcgacggtgtcctgaagcgcgctcccggggaggtgttgcagccatggctacggcagccggcgcgacctactttcagcgaggcagtctgttctggttcacagtcatcaccctcagctttggctactacacatgggttgtcttctggcctcagagtatcccttatcagaaccttgggcccctgggccccttcactcagtacttggtggaccaccatcacaccctcctgtgcaatgggtattggcttgcctggctgattcatgtgggagagtccttgtatgccatagtattgtgcaagcataaaggcatcacaagtggtcgggctcagctactctggttcctacagactttcttctttgggatagcgtctctcaccatcttgattgcttacaaacggaagcgccaaaaacaaacttgaagttgtctgaaagcttgctctacacttttacattcatcctcacccttttttttgtggggtagaggaggtgcagtaatttactcagtgatctttctactttctagaaactgtccttcaaagctctttaagaccccctcgttagtcagttttttctcttatatgctctggttgagcttgaatagaccagttgttacttaagaaagaaacagagaaagattttagcttttcaatcctatttggcagaggacttcagctaccttcttacagtctttggctgtgttggtaccctcgtgtgctctgagctaagccacatactaaactgactttttggtttgtatacccttgctcccgccttctgatgaaaacaccttaccctcacaaccaccatctttcctctcctttccaaagctctttccaccttgctgcactaagataaagtgacacttccactatatgtcaattccacacacatttattaggtacctgtgaggtaggatcctatcctctcaaacttccatttctcatgctacagagaaagataaggaagatgagcaagtgcctggaatggggcaggctgagcagtcacacaggcatagaggcacgctgagaacctggaggggagactgcagagtgccttccctgatgctgcagccggaagtgatccttccctccacctggcccctgggacactgtgctctgcagtgtgcagggcctgatggcactgctagattgctccttcagctcagggccacagcttaaacagctttacctttcccctcagcacctgtcccactatcttgcacacaggtgctctaaccatgtttattgaacaaaggagggaaactgatttcactttcacttgttcattatcattccaatttttatgtgaaaatggcacaacccatttggggtaccctcaccccaaaataaaagcccaagtctacctttgactggtaccaccttttttgtggtttcgttggtgagaaacctttatctttttcatacctttctattctcaatcacttctccaaaagtgtgtctttccagctctgatttatttattacctctcctgttcacttagttatactttattattgctcacaggctggggaggcagaatgactctgtcaccactaggagccattagggcttcttccctggaggactgcctgcttgctttctggggacactagccctcatttcccttctgtggtacagtggggcaaattatttgtattaagcaaacatttatgggaaacaacccgctcccgaaaacggagcccccaagtaaagcacaaccctgaaagattatgaactatgaattgtctctagtagagataaatttctgcaaacatatctcagtcttccctctgtttctctggtgattaagaagttcctttttggtaaggaaaaggatttttaaccatagagttaggcatcatggaaattcaaaccagatttcttaatacctggtcttcctcaaagagaaataataacagtaatagtggtgctgggaacaatatggcagattattgaatgaaattgattaacttgaataaaatgctgtgaattttctcta

SEQ ID NO: 405659 - DNA, 2142 bp, Homo sapiens
tccgcgctcgcgctcgacggtgtcctgaagcgcgctcccggggaggtgttgcagccatggctacggcagccggcgcgacctactttcagcgaggcagtctgttctggttcacagtcatcaccctcagctttggctactacacatgggttgtcttctggcctcagagtatcccttatcagaaccttgggcccctgggccccttcactcagtacttggtggaccaccatcacaccctcctgtgcaatgggtattggcttgcctggctgattcatgtgggagagtccttgtatgccatagtattgtgcaagcaaaatgagctaagaatacggataaagatgagaaaactgattctgagagattctgagtgatttgcccaggtcacagctggcataaaggcatcacaagtggtcgggctcagctactctggttcctacagactttcttctttgggatagcgtctctcaccatcttgattgcttacaaacggaagcgccaaaaacaaacttgaagttgtctgaaagcttgctctacacttttacattcatcctcacccttttttttgtggggtagaggaggtgcagtaatttactcagtgatctttctactttctagaaactgtccttcaaagctctttaagaccccctcgttagtcagttttttctcttatatgctctggttgagcttgaatagaccagttgttacttaagaaagaaacagagaaagattttagcttttcaatcctatttggcagaggacttcagctaccttcttacagtctttggctgtgttggtaccctcgtgtgctctgagctaagccacatactaaactgactttttggtttgtatacccttgctcccgccttctgatgaaaacaccttaccctcacaaccaccatctttcctctcctttccaaagctctttccaccttgctgcactaagataaagtgacacttccactatatgtcaattccacacacatttattaggtacctgtgaggtaggatcctatcctctcaaacttccatttctcatgctacagagaaagataaggaagatgagcaagtgcctggaatggggcaggctgagcagtcacacaggcatagaggcacgctgagaacctggaggggagactgcagagtgccttccctgatgctgcagccggaagtgatccttccctccacctggcccctgggacactgtgctctgcagtgtgcagggcctgatggcactgctagattgctccttcagctcagggccacagcttaaacagctttacctttcccctcagcacctgtcccactatcttgcacacaggtgctctaaccatgtttattgaacaaaggagggaaactgatttcactttcacttgttcattatcattccaatttttatgtgaaaatggcacaacccatttggggtaccctcaccccaaaataaaagcccaagtctacctttgactggtaccaccttttttgtggtttcgttggtgagaaacctttatctttttcatacctttctattctcaatcacttctccaaaagtgtgtctttccagctctgatttattcaaaacacaagcatttctgtttagagattctagcccatgggttatctggctagttattacctctcctgttcacttagttatactttattattgctcacaggctggggaggcagaatgactctgtcaccactaggagccattagggcttcttccctggaggactgcctgcttgctttctggggacactagccctcatttcccttctgtggtacagtggggcaaattatttgtattaagcaaacatttatgggaaacaacccgctcccgaaaacggagcccccaagtaaagcacaaccctgaaagattatgaactatgaattgtctctagtagagataaatttctgcaaacatatctcagtcttccctctgtttctctggtgattaagaagttcctttttggtaaggaaaaggatttttaaccatagagttaggcatcatggaaattcaaaccagatttcttaatacctggtcttcctcaaagagaaataataacagtaatagtggtgctgggaacaatatggcagattattgaatgaaattgattaacttgaataaaatgctgtgaattttctcta

SEQ ID NO: 405660 - DNA, 2008 bp, Homo sapiens
tccgcgctcgcgctcgacggtgtcctgaagcgcgctcccggggaggtgttgcagccatggctacggcagccggcgcgacctactttcagcgaggcagtctgttctggttcacagtcatcaccctcagctttggctactacacatgggttgtcttctggcctcagagtatcccttatcagaaccttgggcccctgggccccttcactcagtacttggtggaccaccatcacaccctcctgtgcaatgggtattggcttgcctggctgattcatgtgggagagtccttgtatgccatagtattgtgcaagcataaaggcatcacaagtggtcgggctcagctactctggttcctacagactttcttctttgggatagcgtctctcaccatcttgattgcttacaaacggaagcgccaaaccttttttttgtggggtagaggaggtgcagtaatttactcagtgatctttctactttctagaaactgtccttcaaagctctttaagaccccctcgttagtcagttttttctcttatatgctctggttgagcttgaatagaccagttgttacttaagaaagaaacagagaaagattttagcttttcaatcctatttggcagaggacttcagctaccttcttacagtctttggctgtgttggtaccctcgtgtgctctgagctaagccacatactaaactgactttttggtttgtatacccttgctcccgccttctgatgaaaacaccttaccctcacaaccaccatctttcctctcctttccaaagctctttccaccttgctgcactaagataaagtgacacttccactatatgtcaattccacacacatttattaggtacctgtgaggtaggatcctatcctctcaaacttccatttctcatgctacagagaaagataaggaagatgagcaagtgcctggaatggggcaggctgagcagtcacacaggcatagaggcacgctgagaacctggaggggagactgcagagtgccttccctgatgctgcagccggaagtgatccttccctccacctggcccctgggacactgtgctctgcagtgtgcagggcctgatggcactgctagattgctccttcagctcagggccacagcttaaacagctttacctttcccctcagcacctgtcccactatcttgcacacaggtgctctaaccatgtttattgaacaaaggagggaaactgatttcactttcacttgttcattatcattccaatttttatgtgaaaatggcacaacccatttggggtaccctcaccccaaaataaaagcccaagtctacctttgactggtaccaccttttttgtggtttcgttggtgagaaacctttatctttttcatacctttctattctcaatcacttctccaaaagtgtgtctttccagctctgatttattcaaaacacaagcatttctgtttagagattctagcccatgggttatctggctagttattacctctcctgttcacttagttatactttattattgctcacaggctggggaggcagaatgactctgtcaccactaggagccattagggcttcttccctggaggactgcctgcttgctttctggggacactagccctcatttcccttctgtggtacagtggggcaaattatttgtattaagcaaacatttatgggaaacaacccgctcccgaaaacggagcccccaagtaaagcacaaccctgaaagattatgaactatgaattgtctctagtagagataaatttctgcaaacatatctcagtcttccctctgtttctctggtgattaagaagttcctttttggtaaggaaaaggatttttaaccatagagttaggcatcatggaaattcaaaccagatttcttaatacctggtcttcctcaaagagaaataataacagtaatagtggtgctgggaacaatatggcagattattgaatgaaattgattaacttgaataaaatgctgtgaattttctcta

SEQ ID NO: 405661 - DNA, 1916 bp, Homo sapiens
gggaacggggcctgtgcgcacgcgcatctgacggttgtctcggttactcattgggttgtcttctggcctcagagtatcccttatcagaaccttgggcccctgggccccttcactcagtacttggtggaccaccatcacaccctcctgtgcaatgggtattggcttgcctggctgattcatgtgggagagtccttgtatgccatagtattgtgcaagcataaaggcatcacaagtggtcgggctcagctactctggttcctacagactttcttctttgggatagcgtctctcaccatcttgattgcttacaaacggaagcgccaaaccttttttttgtggggtagaggaggtgcagtaatttactcagtgatctttctactttctagaaactgtccttcaaagctctttaagaccccctcgttagtcagttttttctcttatatgctctggttgagcttgaatagaccagttgttacttaagaaagaaacagagaaagattttagcttttcaatcctatttggcagaggacttcagctaccttcttacagtctttggctgtgttggtaccctcgtgtgctctgagctaagccacatactaaactgactttttggtttgtatacccttgctcccgccttctgatgaaaacaccttaccctcacaaccaccatctttcctctcctttccaaagctctttccaccttgctgcactaagataaagtgacacttccactatatgtcaattccacacacatttattaggtacctgtgaggtaggatcctatcctctcaaacttccatttctcatgctacagagaaagataaggaagatgagcaagtgcctggaatggggcaggctgagcagtcacacaggcatagaggcacgctgagaacctggaggggagactgcagagtgccttccctgatgctgcagccggaagtgatccttccctccacctggcccctgggacactgtgctctgcagtgtgcagggcctgatggcactgctagattgctccttcagctcagggccacagcttaaacagctttacctttcccctcagcacctgtcccactatcttgcacacaggtgctctaaccatgtttattgaacaaaggagggaaactgatttcactttcacttgttcattatcattccaatttttatgtgaaaatggcacaacccatttggggtaccctcaccccaaaataaaagcccaagtctacctttgactggtaccaccttttttgtggtttcgttggtgagaaacctttatctttttcatacctttctattctcaatcacttctccaaaagtgtgtctttccagctctgatttattcaaaacacaagcatttctgtttagagattctagcccatgggttatctggctagttattacctctcctgttcacttagttatactttattattgctcacaggctggggaggcagaatgactctgtcaccactaggagccattagggcttcttccctggaggactgcctgcttgctttctggggacactagccctcatttcccttctgtggtacagtggggcaaattatttgtattaagcaaacatttatgggaaacaacccgctcccgaaaacggagcccccaagtaaagcacaaccctgaaagattatgaactatgaattgtctctagtagagataaatttctgcaaacatatctcagtcttccctctgtttctctggtgattaagaagttcctttttggtaaggaaaaggatttttaaccatagagttaggcatcatggaaattcaaaccagatttcttaatacctggtcttcctcaaagagaaataataacagtaatagtggtgctgggaacaatatggcagattattgaatgaaattgattaacttgaataaaatgctgtgaattttctcta

SEQ ID NO: 405662 - DNA, 1597 bp, Homo sapiens
tccgcgctcgcgctcgacggtgtcctgaagcgcgctcccggggaggtgttgcagccatggctacggcagccggcgcgacctactttcagcgaggcagtctgttctggttcacagtcatcaccctcagctttggctactacacatgggttgtcttctggcctcagagtatcccttatcagaaccttgggcccctgggccccttcactcagtacttggtggaccaccatcacaccctcctgtgcaatgggtattggcttgcctggctgattcatgtgggagagtccttgtatgccatagtattgtgcaagcataaaggcatcacaagtggtcgggctcagctactctggttcctacagactttcttctttgggatagcgtctctcaccatcttgattgcttacaaacggaagcgccaaaaacaaacttgaagttgtctgaaagcttgctctacacttttacattcatcctcacccttttttttgtggggtagaggagagaaagataaggaagatgagcaagtgcctggaatggggcaggctgagcagtcacacaggcatagaggcacgctgagaacctggaggggagactgcagagtgccttccctgatgctgcagccggaagtgatccttccctccacctggcccctgggacactgtgctctgcagtgtgcagggcctgatggcactgctagattgctccttcagctcagggccacagcttaaacagctttacctttcccctcagcacctgtcccactatcttgcacacaggtgctctaaccatgtttattgaacaaaggagggaaactgatttcactttcacttgttcattatcattccaatttttatgtgaaaatggcacaacccatttggggtaccctcaccccaaaataaaagcccaagtctacctttgactggtaccaccttttttgtggtttcgttggtgagaaacctttatctttttcatacctttctattctcaatcacttctccaaaagtgtgtctttccagctctgatttattcaaaacacaagcatttctgtttagagattctagcccatgggttatctggctagttattacctctcctgttcacttagttatactttattattgctcacaggctggggaggcagaatgactctgtcaccactaggagccattagggcttcttccctggaggactgcctgcttgctttctggggacactagccctcatttcccttctgtggtacagtggggcaaattatttgtattaagcaaacatttatgggaaacaacccgctcccgaaaacggagcccccaagtaaagcacaaccctgaaagattatgaactatgaattgtctctagtagagataaatttctgcaaacatatctcagtcttccctctgtttctctggtgattaagaagttcctttttggtaaggaaaaggatttttaaccatagagttaggcatcatggaaattcaaaccagatttcttaatacctggtcttcctcaaagagaaataataacagtaatagtggtgctgggaacaatatggcagattattgaatgaaattgattaacttgaataaaatgctgtgaattttctcta

SEQ ID NO: 405663 - DNA, 1527 bp, Homo sapiens
gacggctggggagctcccagccaactctgtgtctgggtttttcaagaggatggtgaagtcggaggccagcaatgcggctaccgcctatttccgtccagcaagacccttgccctctctggtcacagtcctggggctgggctacttcgcgtgggttgtcttctggcctcagagtatcccttatcagaaccttgggcccctgggccccttcactcagtacttggtggaccaccatcacaccctcctgtgcaatgggtattggcttgcctggctgattcatgtgggagagtccttgtatgccatagtattgtgcaagcataaaggcatcacaagtggtcgggctcagctactctggttcctacagactttcttctttgggatagcgtctctcaccatcttgattgcttacaaacggaagcgccaaaaacaaacttgaagttgtctgaaagcttgctctacacttttacattcatcctcacccttttttttgtggggtagaggaggtgcagtaatttactcagtgatctttctactttctagaaactgtccttcaaagctctttaagaccccctcgttagtcagttttttctcttatatgctctggttgagcttgaatagaccagttgttacttaagaaagaaacagagaaagattttagcttttcaatcctatttggcagaggacttcagctaccttcttacagtctttggctgtgttggtaccctcgtgtgctctgagctaagccacatactaaactgactttttggtttgtatacccttgctcccgccttctgatgaaaacaccttacccctcaccccaaaataaaagcccaagtctacctttgactggtaccaccttttttgtggtttcgttggtgagaaacctttatctttttcatacctttctattctcaatcacttctccaaaagtgtgtctttccagctctgatttattcaaaacacaagcatttctgtttagagattctagcccatgggttatctggctagttattacctctcctgttcacttagttatactttattattgctcacaggctggggaggcagaatgactctgtcaccactaggagccattagggcttcttccctggaggactgcctgcttgctttctggggacactagccctcatttcccttctgtggtacagtggggcaaattatttgtattaagcaaacatttatgggaaacaacccgctcccgaaaacggagcccccaagtaaagcacaaccctgaaagattatgaactatgaattgtctctagtagagataaatttctgcaaacatatctcagtcttccctctgtttctctggtgattaagaagttcctttttggtaaggaaaaggatttttaaccatagagttaggcatcatggaaattcaaaccagatttcttaatacctggtcttcctcaaagagaaataataacagtaatagtggtgctgggaacaatatggcagattattgaatgaaattgattaacttgaataaaatgctgtgaattttctcta

SEQ ID NO: 405664 - DNA, 1062 bp, Homo sapiens
gggaacggggcctgtgcgcacgcgcatctgacggttgtctcggttactcattgggttgtcttctggcctcagagtatcccttatcagaaccttgggcccctgggccccttcactcagtacttggtggaccaccatcacaccctcctgtgcaatgggtattggcttgcctggctgattcatgtgggagagtccttgtatgccatagtattgtgcaagcataaaggcatcacaagtggtcgggctcagctactctggttcctacagactttcttctttgggatagcgtctctcaccatcttgattgcttacaaacggaagcgccaaaaacaaacttgaagttgtctgaaagcttgctctacacttttacattcatcctcacccttttttttgtggggtagaggaggtgcagtaatttactcagtgatctttctactttctagaaactgtccttcaaagctctttaagaccccctcgttagtcagttttttctcttatatgctctggttgagcttgaatagaccagttgttacttaagaaagaaacagagaaagattttagcttttcaatcctatttggcagaggacttcagctaccttcttacagtctttggctgtgttggtaccctcgtgtgctctgagctaagccacatactaaactgactttttggtttgtatacccttgctcccgcttctgtggtacagtggggcaaattatttgtattaagcaaacatttatgggaaacaacccgctcccgaaaacggagcccccaagtaaagcacaaccctgaaagattatgaactatgaattgtctctagtagagataaatttctgcaaacatatctcagtcttccctctgtttctctggtgattaagaagttcctttttggtaaggaaaaggatttttaaccatagagttaggcatcatggaaattcaaaccagatttcttaatacctggtcttcctcaaagagaaataataacagtaatagtggtgctgggaacaatatggcagattattgaatgaaattgattaacttgaataaaatgctgtgaattttctcta

SEQ ID NO: 405665 - DNA, 856 bp, Homo sapiens
ctcttaggatagtttctgctttctagtgttcctgtctttgggtcctcacctctgcatggttactaacgggttatccgagcctaagcctctcacgaagcggaaagtcaagttaacagactgccataggcctgccaagtcagaatagggcttccgaagcagaatgtttgagccaataggaattgtttggaaaacggggataaatctaaaggatgggtaggatttaagtggtaagggaggataaagaggctataactgttctgacataggtgtggaagcaagaagaaagctgtacctagaaaaagagcgacgtttgtttggctgagaaataatctgtttaaaggataatgagaaagatgcgtggaaaaccccagcagcggagtgagaccctgtcaaaaaaaaaagaaagaaagaaaatagaagccaagaatggagacccaaatgactgttcagagtttcttcgtgggttgtcttctggcctcagagtatcccttatcagaaccttgggcccctgggccccttcactcagtacttggtggaccaccatcacaccctcctgtgcaatgggtattggcttgcctggctgattcatgtgggagagtccttgtatgccatagtattgtgcaagcaaaatgagctaagaatacggataaaggtatgtgaatgagaacaagttatgatgaccccaggaaaacccttctccgggttacctagccaccaactgtgacccttctgaaggaggaggaaacaagcactgctgttcagtgagcctgctcttccaagatggcaactcatctttatttttctttactaaatatcatacacatttacaggatcatataaatttactttccaaaac

SEQ ID NO: 405666 - DNA, 393 bp, Homo sapiens
gggaacggggcctgtgcgcacgcgcatctgacggttgtctcggttactcattgggttgtcttctggcctcagagtatcccttatcagaaccttgggcccctgggccccttcactcagtacttggtggaccaccatcacaccctcctgtgcaatgggtattggcttgcctggctgattcatgtgggagagtccttgtatgccatagtattgtgcaagcaaaatgagctaagaatacggataaaggtatgtgaatgagaacaagttatgatgaccccagggaaacaagcactgctgttcagtgagcctgctcttccaagatggcaactcatctttatttttctttactaaatatcatacacatttacaggatcatataaatttactttccaaaac

SEQ ID NO: 405667 - DNA, 2114 bp, Homo sapiens
tccgcgctcgcgctcgacggtgtcctgaagcgcgctcccggggaggtgttgcagccatggctacggcagccggcgcgacctactttcagcgaggcagtctgttctggttcacagtcatcaccctcagctttggctactacacatgggttgtcttctggcctcagagtatcccttatcagaaccttgggcccctgggccccttcactcagtacttggtggaccaccatcacaccctcctgtgcaatgggtattggcttgcctggctgattcatgtgggagagtccttgtatgccatagtattgtgcaaatgagaaaactgattctgagagattctgagtgatttgcccaggtcacagctggcataaaggcatcacaagtggtcgggctcagctactctggttcctacagactttcttctttgggatagcgtctctcaccatcttgattgcttacaaacggaagcgccaaaaacaaacttgaagttgtctgaaagcttgctctacacttttacattcatcctcacccttttttttgtggggtagaggaggtgcagtaatttactcagtgatctttctactttctagaaactgtccttcaaagctctttaagaccccctcgttagtcagttttttctcttatatgctctggttgagcttgaatagaccagttgttacttaagaaagaaacagagaaagattttagcttttcaatcctatttggcagaggacttcagctaccttcttacagtctttggctgtgttggtaccctcgtgtgctctgagctaagccacatactaaactgactttttggtttgtatacccttgctcccgccttctgatgaaaacaccttaccctcacaaccaccatctttcctctcctttccaaagctctttccaccttgctgcactaagataaagtgacacttccactatatgtcaattccacacacatttattaggtacctgtgaggtaggatcctatcctctcaaacttccatttctcatgctacagagaaagataaggaagatgagcaagtgcctggaatggggcaggctgagcagtcacacaggcatagaggcacgctgagaacctggaggggagactgcagagtgccttccctgatgctgcagccggaagtgatccttccctccacctggcccctgggacactgtgctctgcagtgtgcagggcctgatggcactgctagattgctccttcagctcagggccacagcttaaacagctttacctttcccctcagcacctgtcccactatcttgcacacaggtgctctaaccatgtttattgaacaaaggagggaaactgatttcactttcacttgttcattatcattccaatttttatgtgaaaatggcacaacccatttggggtaccctcaccccaaaataaaagcccaagtctacctttgactggtaccaccttttttgtggtttcgttggtgagaaacctttatctttttcatacctttctattctcaatcacttctccaaaagtgtgtctttccagctctgatttattcaaaacacaagcatttctgtttagagattctagcccatgggttatctggctagttattacctctcctgttcacttagttatactttattattgctcacaggctggggaggcagaatgactctgtcaccactaggagccattagggcttcttccctggaggactgcctgcttgctttctggggacactagccctcatttcccttctgtggtacagtggggcaaattatttgtattaagcaaacatttatgggaaacaacccgctcccgaaaacggagcccccaagtaaagcacaaccctgaaagattatgaactatgaattgtctctagtagagataaatttctgcaaacatatctcagtcttccctctgtttctctggtgattaagaagttcctttttggtaaggaaaaggatttttaaccatagagttaggcatcatggaaattcaaaccagatttcttaatacctggtcttcctcaaagagaaataataacagtaatagtggtgctgggaacaatatggcagattattgaatgaaattgattaacttgaataaaatgctgtgaattttctcta

SEQ ID NO: 405668 - DNA, 2098 bp, Homo sapiens
gcgcgacacttattgcatacaaggactctgctcactagttacatcagccatgcccacgccagtacccagttgcacaacatggtttgatttttgtccatcaagtactgcttatacagaacctggggcccctggtccccgttcacgcattacctggtgcaccaacatcacacctgtctctgttcaccggggtcttgggcttgacctggtcgtattccatgatgggacagtcccgctgtgccattagtatcgcggcacgcacgttgacgcctgcaatacggattaccgatagataactgattctgcgagacttctgatttgattttgccccggtgttatactctttcctctgtgttaaaaacagtggtcgggctcagctactctggttcctacagactttcttctttgggatagcgtctctcaccatcttgattgcttacaaacggaagcgccaaaaacaaacttgaagttgtctgaaagcttgctctacacttttacattcatcctcacccttttttttgtggggtagaggaggtgcagtaatttactcagtgatctttctactttctagaaactgtccttcaaagctctttaagaccccctcgttagtcagttttttctcttatatgctctggttgagcttgaatagaccagttgttacttaagaaagaaacagagaaagattttagcttttcaatcctatttggcagaggacttcagctaccttcttacagtctttggctgtgttggtaccctcgtgtgctctgagctaagccacatactaaactgactttttggtttgtatacccttgctcccgccttctgatgaaaacaccttaccctcacaaccaccatctttcctctcctttccaaagctctttccaccttgctgcactaagataaagtgacacttccactatatgtcaattccacacacatttattaggtacctgtgaggtaggatcctatcctctcaaacttccatttctcatgctacagagaaagataaggaagatgagcaagtgcctggaatggggcaggctgagcagtcacacaggcatagaggcacgctgagaacctggaggggagactgcagagtgccttccctgatgctgcagccggaagtgatccttccctccacctggcccctgggacactgtgctctgcagtgtgcagggcctgatggcactgctagattgctccttcagctcagggccacagcttaaacagctttacctttcccctcagcacctgtcccactatcttgcacacaggtgctctaaccatgtttattgaacaaaggagggaaactgatttcactttcacttgttcattatcattccaatttttatgtgaaaatggcacaacccatttggggtaccctcaccccaaaataaaagcccaagtctacctttgactggtaccaccttttttgtggtttcgttggtgagaaacctttatctttttcatacctttctattctcaatcacttctccaaaagtgtgtctttccagctctgatttattcaaaacacaagcatttctgtttagagattctagcccatgggttatctggctagttattacctctcctgttcacttagttatactttattattgctcacaggctggggaggcagaatgactctgtcaccactaggagccattagggcttcttccctggaggactgcctgcttgctttctggggacactagccctcatttcccttctgtggtacagtggggcaaattatttgtattaagcaaacatttatgggaaacaacccgctcccgaaaacggagcccccaagtaaagcacaaccctgaaagattatgaactatgaattgtctctagtagagataaatttctgcaaacatatctcagtcttccctctgtttctctggtgattaagaagttcctttttggtaaggaaaaggatttttaaccatagagttaggcatcatggaaattcaaaccagatttcttaatacctggtcttcctcaaagagaaataataacagtaatagtggtgctgggaacaatatggcagattattgaatgaaattgattaacttgaataaaatgctgtgaattttctcta

SEQ ID NO: 405669 - DNA, 2371 bp, Homo sapiens
tccgcgctcgcgctcgacggtgtcctgaagcgcgctcccggggaggtgttgcagccatggctacggcagccggcgcgacctactttcagcgaggcagtctgttctggttcacagtcatcaccctcagctttggctactacacatgggttgtcttctggcctcagagtatcccttatcagaaccttgggcccctgggccccttcactcagtacttggtggaccaccatcacaccctcctgtgcaatgggtattggcttgcctggctgattcatgtgggagagtccttgtatgccatagtattgtgcaagcataaaggcatcacaagtggtcgggctcagctactctggttcctacagactttcttctttgggatagcgtctctcaccatcttgattgcttacaaacggaagcgccaaaaacaaacttgaagttgtctgaaagcttgctctacacttttacattcatcctcacccttttttttgtggggtagaggaggtgcagtaatttactcagtgatctttctactttctagaaactgtccttcaaagctctttaagaccccctcgttagtcagttttttctcttatatgctctggttgagcttgaatagaccagttgttacttaagaaagaaacagagaaagattttagcttttcaatcctatttggcagaggacttcagctaccttcttacagtctttggctgtgttggtaccctcgtgtgctctgagctaagccacatactaaactgactttttggtttgtatacccttgctcccgccttctgatgaaaacaccttaccctcacaaccaccatctttcctctcctttccaaagctctttccaccttgctgcactaagataaagtgacacttccactatatgtcaattccacacacatttattaggtacctgtgaggtaggatcctatcctctcaaacttccatttctcatgctacagagaaagataaggaagatgagcaagtgcctggaatggggcaggctgagcagtcacacaggcatagaggcacgctgagaacctggaggggagactgcagagtgccttccctgatgctgcagccggaagtgatccttccctccacctggcccctgggacactgtgctctgcagtgtgcagggcctgatggcactgctagattgctccttcagctcagggccacagcttaaacagctttacctttcccctcagcacctgtcccactatcttgcacacaggtgctctaaccatgtttattgaacaaaggagggaaactgatttcactttcacttgttcattatcattccaatttttatgtgaaaatggcacaacccatttggggtaccctcaccccaaaataaaagcccaagtctacctttgactggtaccaccttttttgtggtttcgttggtgagaaacctttatctttttcatacctttctattctcaatcacttctccaaaagtgtgtctttccagctctgatttattcaaaacacaagcatttctgtttagagattctagcccatgggttatctggctagttattacctctcctgttcacttagttatactttattattgctcacaggctggggaggcagaatgactctgtcaccactaggagccattagggcttcttccctggaggactgcctgcttgctttctggggacactagccctcatttcccttctgtggtacagtggggcaaattatttgtattaagcaaacatttatgggaaacaacccgctcccgaaaacggagcccccaagtaaagcacaaccctgaaagattatgaactatgaattgtctctagtagagataaatttctgcaaacatatctcagtcttccctctgtttctctggtgattaagaagttcctttttggtaaggaaaaggatttttaaccatagagttaggcatcatggaaattcaaaccagatttcttaatacctggtcttcctcaaagagaaataataacagtaatagtggtgctgggaacaatatggcagattattgaatgaaattgattaacttgaataaaatgctgtgaattttctctagctgaatgcttttcttgtatttgtcagttttaacatattgatgcacatttgatactttttctcaaatagactactagggaactgtttatacacttcagatatcagtttgtttttcactgataaagaaatgcaaaacactgtggttgtcgggtatatacgtactatattttagaactgtccatgtcccacttacctcctccacatacaaggaatcactagggtggacctgagtgtctccttttcattgtaggattgtctcctttttgtttctgtttttattcaacatttgataaagtctatgcactaagt

SEQ ID NO: 405670 - DNA, 1522 bp, Homo sapiens
tccgcgctcgcgctcgacggtgtcctgaagcgcgctcccggggaggtgttgcagccatggctacggcagccggcgcgacctactttcagcgaggcagtctgttctggttcacagtcatcaccctcagctttggctactacacatgggttgtcttctggcctcagagtatcccttatcagaaccttgggcccctgggccccttcactcagtacttggtggaccaccatcacaccctcctgtgcaatgggtattggcttgcctggctgattcatgtgggagagtccttgtatgccatagtattgtgcaagcataaaggcatcacaagtggtcgggctcagctactctggttcctacagactttcttctttgggatagcgtctctcaccatcttgattgcttacaaacggaagcgccaaaaacaaacttgaagttgtctgaaagcttgctctacacttttacattcatcctcacccttttttttgtggggtagaggaggtgcagtaatttactcagtgatctttctactttctagaaactgtccttcaaagctctttaagaccccctcgttagtcagttttttctcttatatgctctggttgagcttgaatagaccagttgttacttaagaaagaaacagagaaagattttagcttttcaatcctatttggcagaggacttcagctaccttcttacagtctttggctgtgttggtaccctcgtgtgctctgagctaagccacatactaaactgactttttggtttgtatacccttgctcccgccttctgatgaaaacaccttacccctcaccccaaaataaaagcccaagtctacctttgactggtaccaccttttttgtggtttcgttggtgagaaacctttatctttttcatacctttctattctcaatcacttctccaaaagtgtgtctttccagctctgatttattcaaaacacaagcatttctgtttagagattctagcccatgggttatctggctagttattacctctcctgttcacttagttatactttattattgctcacaggctggggaggcagaatgactctgtcaccactaggagccattagggcttcttccctggaggactgcctgcttgctttctggggacactagccctcatttcccttctgtggtacagtggggcaaattatttgtattaagcaaacatttatgggaaacaacccgctcccgaaaacggagcccccaagtaaagcacaaccctgaaagattatgaactatgaattgtctctagtagagataaatttctgcaaacatatctcagtcttccctctgtttctctggtgattaagaagttcctttttggtaaggaaaaggatttttaaccatagagttaggcatcatggaaattcaaaccagatttcttaatacctggtcttcctcaaagagaaataataacagtaatagtggtgctgggaacaatatggcagattattgaatgaaattgattaacttgaataaaatgctgtgaattttctcta

SEQ ID NO: 405671 - DNA, 434 bp, Homo sapiens
agtaagctgaattataagttttaaaagttgcatcataatttctctaaaatctcttataattacttgaaagcaaaatacaaagaattaagtattatgagtgattgtctataatactcatgaaatggaacaagaatctttacaaagtattttccagtaattaagtaactctcttaatggcctatacctatattttgggctctctaatatcatgggaaacaattttcagtaaagattatcattacttatattctacttactgcagttaatttcctggttaaaatagtttataaagagcaaatttttccttttaaagaaagacaggaaagctacatgtagtggtgcttggctctatagccccagctactggggaggatcgcttgagcccaggagttcaagttcagcccagccaacattgttagaccccatctctgggg

SEQ ID NO: 405672 - DNA, 778 bp, Homo sapiens
ttttttaaaatgtaaatggagtaaatgataaaatgtagactgaatttatcataaagacattttcttttggtatactgcaaggaactatgaacttttagtaactactataagcaactgacaggaaaaaatggcaacagaagaaggaaagaggagagaatggggagcagacactaaggtgtagtgaaaggaggaaaatgaaggctaagtctaatgatgtgaatcctctttgcaattccatcaaaggagggatcttcctactgaccagaagacctgaacagcctgagaatgattcctttcaactccgagagaagaagctgcagatgaagagcaatcctgggatacatgtgcagaatgtgcagaatgtgtacataggtacacactaccatggtggtttgctgcacccatcaactcgtcatctacattaggatactgtttactgaaaacccaccaatctgatcttttatgagaagctagtccctgaaaaggcccttggatcaaaggtcaaaaacttgaagcacagagtgggatgtcagatgccaagatttaaatctagtcatttgattccagagcccacattcttaaataatatgctacactgacctttattgtctttaaacattatctttatttaatgtgtttcatagaaattacttctcaggtattcctaaatttatttttaaaaataatgtcatgctatcactataatatagttttttaaattaacttgagaggtaatgtagtatgatcaacttccttaatggccttttaaactggaaat

SEQ ID NO: 405673 - DNA, 499 bp, Homo sapiens
gttaggttgccacatgtgtactgaggaattgctgaaggttttcaaatagggtggaggaagtttcatgataataggttatttgaatatgtttttccagtttgagacatttccaagatgttgaggcatcaacaataagcatatttcattaaaaatctcagagggagcattctgttctgctgtggccccagccatggtctctgggttctcattttggcattttcccttggataaatgttatctcagtttatttatagctcatttagcccatcaaagcaataataataatccccaaaatagagagagatgctctgatgatcaataggttacataaaaaacatttttgcgcagagtgaaagtcaagagggtgctattattaatacaacctcccacaaccaccctctcattctctgcatctacccagtttgtgttatttccttcaagacctttcctcaagtatttttcctctctgaagccattcctgactcaatctaccacatct

SEQ ID NO: 405674 - DNA, 391 bp, Homo sapiens
gggtgtgggtagaggaaactaggtattcaggttcattttaacattctttaaaactgtagaggttatagtgaatgtataatatatttagcaaaaatattaaaacacagctattggttcacactacacatgggttataaggtgtattaaatagaacatggacataagcagttatattgagacttacgcaggagtttttagttttcaaatataatactaatggaatggaaatgaacacttacgtactcaccacacagattaagaaaagtaatatgattactaatacttttgttaagtctctgtgtgccccttcatgattgcattggtggtttatactacatgagatgactgctgtctacacaaagatcttttcgtttggcagtgtgtttttgaa

SEQ ID NO: 405675 - DNA, 918 bp, Homo sapiens
tagtttgtaagattttaatttacaaattaaaaaagctatttaatacatgttttactttttctcctttttctcctctttctttacatcactcttttccttatctttatctttctccttgtcctctttcctatcctttttgctctcttctttctcctgcccttctttcttctctgcatcccggttggcaatcttgttgttgatgaggttgtgcagggcgaccacggaacggatcagcgaggccaagtacactaccaccatctggtcattggtcttcaggtaaaaggccttgacgaactcctgcaggctgacatctggcagcaggttgaagacgtcctgcagctggtagatgatctggtggttgatgggcagcttgcctgtggcgactttttccaggtagctcctgatatccagaagcttggagttcagtcccttcaaaccatggacctggtttgtgatccgctgggacagagtgcccaccgtcgtgtctttgatatctctgtaataacccacagttaaaaagggcaggaaaaggcatcagggtaccatgttatcaggcaagttcttacattctaagaaaattcctagctttgttgggtgaggcaagtttttaaaagaaaaatgtcacttccccatttgataaagatttcgttatcaattaccttaatttcgttatcatttggaacacattttatctttctcatcacaggacatttttcaaaaaacaattataaaagggagctaaaataaaaccatttccacttaaggaaaaaaaaattgcttaggtcaacagttcagatctaccaataactttctgggtaaccttgtactgaagctgtctctctcagctttcctgttcctaaaaggatggcattttctctacatgcatctccagaatattgagaagcttaactaagatgg

SEQ ID NO: 405676 - DNA, 1322 bp, Homo sapiens
  misc_feature (76)..(76): n is a, c, g, or t
  misc_feature (808)..(808): n is a, c, g, or t
tcctcgtagaatgccgccacagtgttgcgctgtcttctgtccccggacgagagtttataagaggcaaaaggtggcntcgccacaaagtcgataggtgcgaagctggagttttcataggaggcccacattttgtgggggatatctcgtttggagaagtagcccgagatgtttgtggtggcctcggcaacgtatgtggttgcagaggatagaggattgaaagaggtgttgggtgtcgacaagatgtggtgcgaacaccgacacgctgggtgggtcgctccatcgcaagaacagccgggggccgcccgctgcagtgtcgcgaaaataatgtatggggagccccctttgcccccgaaaattggaacttgggtagaccaaattggggtttattcgccccgtcccggtgagatatctgtttttgtggggaagtattgagcccctcggaaagcagtgtttttggaggagcccccctgtctcctagaggccttgcccgcgcccgccgtttttgggcgccacccgggttccattgggagattccaagccgttaattgtgagcgtgttgaatgtcgccagatgtgcgtcccttaattgccagggatctgtttagccgggggtgcgccctgtgtgtgtccaagtccaggaaagggtcgcccaaggtttgtcctgccagtgtctgttggaccgaggggcgtttggaattgggccaatgtggagttggacacgttttccaggccctgagatttaagagggcctttttatagctcccgtccatgtgattataattaccgggaccgatgtgctgtttaggtgnccatcgggcccttggtgtccagtcatcttccctgtttgtcgacccggcttgaatgccccagggagcccacggtggatggagaaaccactggaatttgagaggccccaggtccgtttgttcccccccgaccaagggttagaaagtccaccaatcttccaattttgccgtcttttttttttttttttgtcctcttctccaatgacctggatgtgcctgtgggccacattgtgcatactggcatgctcaacgagggtggagggtatgaaaatgactgcagcatagcacgactgaacaagcgcagtttcttcatgatctctccaaccgaccagcaggtccactgttgggcctggcttaagaaacaaagcttagcaggagaggagagccagagaagtgacagggaagctacaggttacaacagatttgtgaactcagccaagcacagtggtggcagggcctagctgctacaaagaagacatgttttagacaaatactcatgtgcatgaacacaccacgg

SEQ ID NO: 405677 - DNA, 2288 bp, Homo sapiens
  misc_feature (76)..(76): n is a, c, g, or t
  misc_feature (808)..(808): n is a, c, g, or t
tcctcgtagaatgccgccacagtgttgcgctgtcttctgtccccggacgagagtttataagaggcaaaaggtggcntcgccacaaagtcgataggtgcgaagctggagttttcataggaggcccacattttgtgggggatatctcgtttggagaagtagcccgagatgtttgtggtggcctcggcaacgtatgtggttgcagaggatagaggattgaaagaggtgttgggtgtcgacaagatgtggtgcgaacaccgacacgctgggtgggtcgctccatcgcaagaacagccgggggccgcccgctgcagtgtcgcgaaaataatgtatggggagccccctttgcccccgaaaattggaacttgggtagaccaaattggggtttattcgccccgtcccggtgagatatctgtttttgtggggaagtattgagcccctcggaaagcagtgtttttggaggagcccccctgtctcctagaggccttgcccgcgcccgccgtttttgggcgccacccgggttccattgggagattccaagccgttaattgtgagcgtgttgaatgtcgccagatgtgcgtcccttaattgccagggatctgtttagccgggggtgcgccctgtgtgtgtccaagtccaggaaagggtcgcccaaggtttgtcctgccagtgtctgttggaccgaggggcgtttggaattgggccaatgtggagttggacacgttttccaggccctgagatttaagagggcctttttatagctcccgtccatgtgattataattaccgggaccgatgtgctgtttaggtgnccatcgggcccttggtgtccagtcatcttccctgtttgtcgacccggcttgaatgccccagggagcccacggtggatggagaaaccactggaatttgagaggccccaggtccgtttgttcccccccgaccaagggttagaaagtccaccaatcttccaattttgccgtcttttttttttttttttgtcctcttctccaatgacctggatgtgcctgtgggccacattgtgcatactggcatgctcaacgagggtggagggtatgaaaatgactgcagcatagcacgactgaacaagcgcagtttcttcatgatctctccaaccgaccagcaggtccactgttgggcctggcttaagaaacacatgccgaaagacagcaacctgctcctggaggacgtcacctggaagtactttgccctcaatctgattggccctcgagctgtggatgtgctgtctgagttgtcctatgcccctatgactccagaccacttcccaagcctcttttgcaaggagatgagcgtgggctatgcaaatgggatccgggtgatgagcatgacgcacacaggagagccaggattcatgctctacatccccatagaggggaatgagatgctctttcataaatgataccaagtgcaagagaacttaaggcagctccaatcgaagactgtcttggctgcttctggaaactacagatcactactcccgaagtcaaaaacgactagaacacagcttaaaaatcaagccatttaattgtatctttgaaggttgtgcagggcgaccacggaacggatcagcgaggccaagtacactaccaccatctggtcattggtcttcaggtaaaaggccttgacgaactcctgcaggctgacatctggcagcaggttgaagacgtcctgcagctggtagatgatctggtggttgatgggcagcttgcctgtggcgactttttccaggtagctcctgatatccagaagcttggagttcagtcccttcaaaccatggacctggtttgtgatccgctgggacagagtgcccaccgtcgtgtctttgatatctctgtaataacccacagttaaaaagggcaggaaaaggcatcagggtaccatgttatcaggcaagttcttacattctaagaaaattcctagctttgttgggtgaggcaagtttttaaaagaaaaatgtcacttccccatttgataaagatttcgttatcaattaccttaatttcgttatcatttggaacacattttatctttctcatcacaggacatttttcaaaaaacaattataaaagggagctaaaataaaaccatttccacttaaggaaaaaaaaattgcttaggtcaacagttcagatctaccaataactttctgggtaaccttgtactgaagctgtctctctcagctttcctgttcctaaaaggatggcattttctctacatgcatctccagaatattgagaagcttaactaagatgg

SEQ ID NO: 405678 - DNA, 1441 bp, Homo sapiens
  misc_feature (27)..(27): n is a, c, g, or t
gcccagacctgcccaggcctgcccagnccctgctctaccctgatgctctgtggctctgttcctgggactcttcctgggagacagaagggagatgagagctcaagaaccagcaccgagatgccaatctagccggcaccagctgcctgttctctgggcactcctccctcatctcacagccacccagcctgcctttccagagtgacaaaagagtgcctgggtgccccctgctcaccctgatccacacttggtgtccagagacttttccccacaccttccaaccagcgagtcctccctctagtgttgccccatgggcagcttgggaagtggggaaggggctgcatctgctcctggaggacgtcacctggaagtacacagccctcaatctgattggccctcgagctgtggatgtgctgtctgagttgtcctatgcccctatgactccagaccacttcccaagcctcttttgcaaggagatgagcgtgggctatgcaaatgggatccgggtgatgagcatgacgcacacaggagagccaggattcatgctctacatccccatagaggggaatgagatgctctttcataaatgataccaagtgcaagagaacttaaggcagctccaatcgaagactgtcttggctgcttctggaaactacagatcactactcccgaagtcaaaaacgactagaacacagcttaaaaatcaagccatttaattgtatctttgaaggttgtgcagggcgaccacggaacggatcagcgaggccaagtacactaccaccatctggtcattggtcttcaggtaaaaggccttgacgaactcctgcaggctgacatctggcagcaggttgaagacgtcctgcagctggtagatgatctggtggttgatgggcagcttgcctgtggcgactttttccaggtagctcctgatatccagaagcttggagttcagtcccttcaaaccatggacctggtttgtgatccgctgggacagagtgcccaccgtcgtgtctttgatatctctgtaataacccacagttaaaaagggcaggaaaaggcatcagggtaccatgttatcaggcaagttcttacattctaagaaaattcctagctttgttgggtgaggcaagtttttaaaagaaaaatgtcacttccccatttgataaagatttcgttatcaattaccttaatttcgttatcatttggaacacattttatctttctcatcacaggacatttttcaaaaaacaattataaaagggagctaaaataaaaccatttccacttaaggaaaaaaaaattgcttaggtcaacagttcagatctaccaataactttctgggtaaccttgtactgaagctgtctctctcagctttcctgttcctaaaaggatggcattttctctacatgcatctccagaatattgagaagcttaactaagatgg

SEQ ID NO: 405679 - DNA, 1871 bp, Homo sapiens
  misc_feature (76)..(76): n is a, c, g, or t
  misc_feature (808)..(808): n is a, c, g, or t
tcctcgtagaatgccgccacagtgttgcgctgtcttctgtccccggacgagagtttataagaggcaaaaggtggcntcgccacaaagtcgataggtgcgaagctggagttttcataggaggcccacattttgtgggggatatctcgtttggagaagtagcccgagatgtttgtggtggcctcggcaacgtatgtggttgcagaggatagaggattgaaagaggtgttgggtgtcgacaagatgtggtgcgaacaccgacacgctgggtgggtcgctccatcgcaagaacagccgggggccgcccgctgcagtgtcgcgaaaataatgtatggggagccccctttgcccccgaaaattggaacttgggtagaccaaattggggtttattcgccccgtcccggtgagatatctgtttttgtggggaagtattgagcccctcggaaagcagtgtttttggaggagcccccctgtctcctagaggccttgcccgcgcccgccgtttttgggcgccacccgggttccattgggagattccaagccgttaattgtgagcgtgttgaatgtcgccagatgtgcgtcccttaattgccagggatctgtttagccgggggtgcgccctgtgtgtgtccaagtccaggaaagggtcgcccaaggtttgtcctgccagtgtctgttggaccgaggggcgtttggaattgggccaatgtggagttggacacgttttccaggccctgagatttaagagggcctttttatagctcccgtccatgtgattataattaccgggaccgatgtgctgtttaggtgnccatcgggcccttggtgtccagtcatcttccctgtttgtcgacccggcttgaatgccccagggagcccacggtggatggagaaaccactggaatttgagaggccccaggtccgtttgttcccccccgaccaagggttagaaagtccaccaatcttccaattttgccgtcttttttttttttttttgtcctcttctccaatgacctggatgtgcctgtgggccacattgtgcatactggcatgctcaacgagggtggagggtatgaaaatgactgcagcatagcacgactgaacaagcgcagtttcttcatgatctctccaaccgaccagcaggtccactgttgggcctggcttaagaaacacatgccgaaagacagcaacctgctcctggaggacgtcacctggaagtactttgccctcaatctgattggccctcgagctgtggatgtgctgtctgagttgtcctatgcccctatgactccagaccacttcccaagcctcttttgcaaggagatgagcgtgggctatgcaaatgggatccgggtgatgagcatgacgcacacaggagagccaggattcatgctctacatccccatagagatggggcttcaccatgttgtccacgcttgtctccaactcctgacctcaagtggtccacacacctcagcctcccaaagtgctgggattacaggcatgagccactgtgcctggccccaggctgctggagtgcagtggcaagatctcggctcaccacaacctccgcctcccaggttcaagcaattctgcctcagcctcctgagtagctgggataacaggcatgcgccaccgtgcctggctaattttgtatttttagtagagacgaggtttcactatggtggtcattggtcaggctggtctcgaactcctgacctcaggtgatccacccacctcagcctcccaaagtgctgggattacaggcgtgagccacggcgcctggcccctcctgtgtttcaaaagctcagcccaagaccaccatcatcccacagtggagcctttccttccccaagagaatggcccctttgggg

SEQ ID NO: 405680 - DNA, 176 bp, Homo sapiens
tttgggatgaaattcttgccttgacgtctgtctccctcaacagtaaacagagggtgcagcactaatgaaaggtttccccaggcgtccctcccttgacaagcaatgtgagtgcccaggctgactgctgcctttgtccctgcaggagatgagcgtgggctatgcaaatgggatccggg

SEQ ID NO: 405681 - DNA, 206 bp, Homo sapiens
cttcaccatgttgtccacgcttgtctccaactcctgacctcaagtggtccacacacctcagcctcccaaagtgctgggattacaggcatgagccactgtgcctggccccaggtaatttttgagtagtttttttttttttttttaagtatttgtacttttgagaatctcataggttaacatgtttacaacaatctcttcatcttgtc

SEQ ID NO: 405682 - DNA, 315 bp, Homo sapiens
cctgggaattaataaaacgtattttcaaatgcataggcttagaatgtgttcacagaagaaaaagaaccacgtggactacactaaactctacagggccttgtgatttttccattccgtagacctcctggcattggagcagagcaagactttctataagccagattggtttgacatcgtggagtctgaagtcaagtgctgtaaggaagctgtgtgtgtcattgacatgtcctctttcacagagtttgagataacagtaagtatttgggaaccaaagtaatagattaggaaactttgcatatttattgaatgcctttt

SEQ ID NO: 405683 - DNA, 558 bp, Homo sapiens
gtattttcaaatgcataggcttagaatgtgttcacagaagaaaaagaaccacgtggactacactaaactctacagggccttgtgatttttccattccgtagacctcctggcattggagcagagcaagactttctataagccagattggtttgacatcgtggagtctgaagtcaagtgctgtaaggaagctgtgtgtgtcattgacatgtcctctttcacagagtttgagataacaaccactggggatcaggcattagaagttctacagtacctcttctccaatgacctggatgtgcctgtgggccacattgtgcatactggcatgctcaacgagggtggagggtatgaaaatgactgcagcatagcacgactgaacaagcgcagtttcttcatgatctctccaaccgaccagcaggtccactgttgggcctggcttaagaaacacatgccgaaagacagcaacctgctcctggaggacgtcacctggaagtactttggcctctcaaatccatgtttctccatccacctggctccctgtgcatccagccggtcatagag

SEQ ID NO: 405684 - DNA, 1563 bp, Homo sapiens
gtattttcaaatgcataggcttagaatgtgttcacagaagaaaaagaaccacgtggactacactaaactctacagggccttgtgatttttccattccgtagacctcctggcattggagcagagcaagactttctataagccagattggtttgacatcgtggagtctgaagtcaagtgctgtaaggaagctgtgtgtgtcattgacatgtcctctttcacagagtttgagataacaaccactggggatcaggcattagaagttctacagtacctcttctccaatgacctggatgtgcctgtgggccacattgtgcatactggcatgctcaacgagggtggagggtatgaaaatgactgcagcatagcacgactgaacaagcgcagtttcttcatgatctctccaaccgaccagcaggtccactgttgggcctggcttaagaaacacatgccgaaagacagcaacctgctcctggaggacgtcacctggaagtactttgccctcaatctgattggccctcgagctgtggatgtgctgtctgagttgtcctatgcccctatgactccagaccacttcccaagcctcttttgcaaggagatgagcgtgggctatgcaaatgggatccgggtgatgagcatgacgcacacaggagagccaggattcatgctctacatccccatagaggggaatgagatgctctttcataaatgataccaagtgcaagagaacttaaggcagctccaatcgaagactgtcttggctgcttctggaaactacagatcactactcccgaagtcaaaaacgactagaacacagcttaaaaatcaagccatttaattgtatctttgaaggttgtgcagggcgaccacggaacggatcagcgaggccaagtacactaccaccatctggtcattggtcttcaggtaaaaggccttgacgaactcctgcaggctgacatctggcagcaggttgaagacgtcctgcagctggtagatgatctggtggttgatgggcagcttgcctgtggcgactttttccaggtagctcctgatatccagaagcttggagttcagtcccttcaaaccatggacctggtttgtgatccgctgggacagagtgcccaccgtcgtgtctttgatatctctgtaataacccacagttaaaaagggcaggaaaaggcatcagggtaccatgttatcaggcaagttcttacattctaagaaaattcctagctttgttgggtgaggcaagtttttaaaagaaaaatgtcacttccccatttgataaagatttcgttatcaattaccttaatttcgttatcatttggaacacattttatctttctcatcacaggacatttttcaaaaaacaattataaaagggagctaaaataaaaccatttccacttaaggaaaaaaaaattgcttaggtcaacagttcagatctaccaataactttctgggtaaccttgtactgaagctgtctctctcagctttcctgttcctaaaaggatggcattttctctacatgcatctccagaatattgagaagcttaactaagatgg

SEQ ID NO: 405685 - DNA, 1989 bp, Homo sapiens
  misc_feature (76)..(76): n is a, c, g, or t
  misc_feature (808)..(808): n is a, c, g, or t
tcctcgtagaatgccgccacagtgttgcgctgtcttctgtccccggacgagagtttataagaggcaaaaggtggcntcgccacaaagtcgataggtgcgaagctggagttttcataggaggcccacattttgtgggggatatctcgtttggagaagtagcccgagatgtttgtggtggcctcggcaacgtatgtggttgcagaggatagaggattgaaagaggtgttgggtgtcgacaagatgtggtgcgaacaccgacacgctgggtgggtcgctccatcgcaagaacagccgggggccgcccgctgcagtgtcgcgaaaataatgtatggggagccccctttgcccccgaaaattggaacttgggtagaccaaattggggtttattcgccccgtcccggtgagatatctgtttttgtggggaagtattgagcccctcggaaagcagtgtttttggaggagcccccctgtctcctagaggccttgcccgcgcccgccgtttttgggcgccacccgggttccattgggagattccaagccgttaattgtgagcgtgttgaatgtcgccagatgtgcgtcccttaattgccagggatctgtttagccgggggtgcgccctgtgtgtgtccaagtccaggaaagggtcgcccaaggtttgtcctgccagtgtctgttggaccgaggggcgtttggaattgggccaatgtggagttggacacgttttccaggccctgagatttaagagggcctttttatagctcccgtccatgtgattataattaccgggaccgatgtgctgtttaggtgnccatcgggcccttggtgtccagtcatcttccctgtttgtcgacccggcttgaatgccccagggagcccacggtggatggagaaaccactggaatttgagaggccccaggtccgtttgttcccccccgaccaagggttagaaagtccaccaatcttccaattttgccgtcttttttttttttttttgtcctcttctccaatgacctggatgtgcctgtgggccacattgtgcatactggcatgctcaacgagggtggagggtatgaaaatgactgcagcatagcacgactgaacaagcgcagtttcttcatgatctctccaaccgaccagcaggtccactgttgggcctggcttaagaaacacatgccgaaagacagcaacctgctcctggaggacgtcacctggaagtactttgccctcaatctgattggccctcgagctgtggatgtgctgtctgagttgtcctatgcccctatgactccagaccacttcccaagcctcttttgcaaggagatgagcgtgggctatgcaaatgggatccgggtgatgagcatgacgcacacaggagagccaggattcatgctctacatccccatagagtacgccctgcatgtatacaatgaagtgatgagtgttggccagaaatacggaatccggaatgctgggtattacgctcttcgcagtctccgaattgagaagttaatgccttctggggtcaaggatataaataacctcaccacgcccctggaatgtggacgagagtctcgggtgaaattagagaagggcatggatttcataggtcgcgatgccctcctgcagcagaagcagaatggagtgtataaacgcctcaccatgttcatcctggacagacatgattcagagctagacctttgagcttggggggaagaggccaataacgggatgggccagatgccggaaggacacaaggcgggccaacagtaaagcaggagagacagttggcagggcattggtcccaaacccagagacaggggaaaaccaagaggacgcagataccacaacgcggagcaacaagggaccacacgaaacccaaaccagcaaggagagcaaacgggagcacagacaaaacgacaaaggtactgaccaaaaaacaagaacagcacacgaaagcaaaccacaaagaaacaggcgcatgaaaagaca

SEQ ID NO: 405686 - DNA, 1137 bp, Homo sapiens
tggggaccagctgcgcacgaggccagcggcggggtcgctgccgttgaggcttcccgccactgctgctggcggatttgtggggcaaaatttctcgctggctagccttcttttccctcccgcactttggtggggagggggtggatcctcgtttcggtgcccaagttcacgatgacccgagagaactcgaggaagttgtcgccgcggccatttcccccagtgccgcaacttgctggccttggagggggaggagcgccgaggcagtgactgcgacgcaaacatcaaaccagatgcaaacagattcattatctccatcccctaatcctgtgtcacctgtgcctttgaataacccaacaagtgccccaagatatggaacagtgatccctaatcgcatctttgtaggaggaattgattttaagacaaacgaaagtgatttaagaaaatttttttcccagtatgggtctgtgaaagaagtgaagattgtaaatgacagagctggagtatccaaagggtatggtttcgtcacttttgaaacacaagaagatgcacaaaaaattttacaagaggctgaaaaacttaattataaggataagaagctgaacattggtccagcaataagaaaacaacaagtagggatccctcgttctagtataatgccagcagctggaacaatgtatctaacaacttcaactggatatccttatacttaccataatggtgttgcttattttcatactccagaggtaacttcggtcccaccgccttggccttcacgttctgtatgtagctcccctgtgatggtagctcagcccatttatcagcaacctgcatatcactaccaggccaccacacagtatttaccaggacagtggcagtggagtgttcctcagccttctgcctcttctgctccattcttatacctgcaaccttctgaggttatttatcaaccagtggaaattgcacaggatggtggatgtgttcctcctccactgtctctgatggaaacttcagttccagagccttattctgatcatggagttcaagcaacatatcaccaggtttatgctccaagtgccatcactatgcctgcgcctgtgatgcagcctgagccaattaaagtaagaaatttgttttgacttt

SEQ ID NO: 405687 - DNA, 1315 bp, Homo sapiens
  misc_feature (22)..(22): n is a, c, g, or t
gggggaaaaagacgaagaagangaaaccgaccaaccaccggcgcaaccacgaacacacaataaaataccgaccctcacccgagattgctgacatggctgccttattctgatcatggagttcaagcaacatatcaccaggtttatgctccaagtgccatcactatgcctgcgcctgtgatgcagcctgagccaattaaaacagtgtggagcattcattattaagacaattgggcagctctattccagctcaactgatttcttgtccaatgatccttgcgtggccgagatccagcttcaacgaaccagctagaagctgcccgttgtgaaacttagtgttagttaatacctcaccatactcagttattccactataagctgtctaaatttgatgaaatttgctttttcagctgttctacaaaattatttaggtagatgtggcatgttggttttttatgtgctaacctaactgtaatgaccttttctacaacatgttttatccattccataaataataaccacattgggaatagtgaggtgtcttttattttctctgctttgtgttattttttcttatcaaacaattagatgttatgtttcatattatttgatatttattttcatatttaggataagaatcatttttaattataatacttttaatactttcatatattttacaacagtatactatttaatattaatgacaattctatttttgctttgctgttttgtcatttaatatgcttttgtctaatttttaattcatttattactgttactccttatttaattttgcgtctgccatggttttcagaatctgaatagtatttatacttcttttttataacattttccaaatattagaaataccatcaacatgatcagtattcttgccttttcatgtaatttgactatattaaattttttctccagtgtttgagacaatattgaaatcttcctataacataatttatttggtatcaaattttataaaatatggatccacctttggaattttgataaaagggttcatctctgacatgatcccataacactgactgaaattccaccaaattactgttctttgaatgctttaatccttaaaccttttcttctgatatgcaaccaatatattcaattatatatgtgattaatttttaaaaggacaattgttttcataaaatgcaaaactattttttacaccaaaggaaaattttagattctgattctaaatccgatttttactataaaattggaaaatagatgggaggggtgtcattcattgttcaaaaggtacagaacaaatcataggggt

SEQ ID NO: 405688 - DNA, 1287 bp, Homo sapiens
  misc_feature (31)..(33): n is a, c, g, or t
  misc_feature (71)..(71): n is a, c, g, or t
acacaggcgctagcacaccaacacagcaccnnntggcaacaccaacgcgacaacgtccgactgtgatcctnccttattctgatcatggagttcaagcaacatatcaccaggtttatgctccaagtgccatcactatgcctgcgcctgtgatgcagcctgagccaattaaaacagtgtggagcattcattattaagacaattgggcagctctattccagctcaactgatttcttgtccaatgatccttgcgtggccgagatccagcttcaacgaaccagctagaagctgcccgttgtgaaacttagtgttagttaatacctcaccatactcagttattccactataagctgtctaaatttgatgaaatttgctttttcagctgttctacaaaattatttaggtagatgtggcatgttggttttttatgtgctaacctaactgtaatgaccttttctacaacatgttttatccattccataaataataaccacattgggaatagtgaggtgtcttttattttctctgctttgtgttattttttcttatcaaacaattagatgttatgtttcatattatttgatatttattttcatatttaggataagaatcatttttaattataatacttttaatactttcatatattttacaacagtatactatttaatattaatgacaattctatttttgctttgctgttttgtcatttaatatgcttttgtctaatttttaattcatttattactgttactccttatttaattttgcgtctgccatggttttcagaatctgaatagtatttatacttcttttttataacattttccaaatattagaaataccatcaacatgatcagtattcttgccttttcatgtaatttgactatattaaattttttctccagtgtttgagacaatattgaaatcttcctataacataatttatttggtatcaaattttataaaatatggatccacctttggaattttgataaaagggttcatctctgacatgatcccataacactgactgaaattccaccaaattactgttctttgaatgctttaatccttaaaccttttcttctgatatgcaaccaatatattcaattatatatgtgattaatttttaaaaggacaattgttttcataaaatgcaaaactattttttacaccaaaggaaaattttagattctgattctaaatccgatttttactataaaattggaaaatagatgggaggggtgtcattcattgttcaaaaggtacagaacaaatcataggggt

SEQ ID NO: 405689 - DNA, 2232 bp, Homo sapiens
tggggaccagctgcgcacgaggccagcggcggggtcgctgccgttgaggcttcccgccactgctgctggcggatttgtggggcaaaatttctcgctggctagccttcttttccctcccgcactttggtggggagggggtggatcctcgtttcggtgcccaagttcacgatgacccgagagaactcgaggaagttgtcgccgcggccatttcccccagtgccgcaacttgctggccttggagggggaggagcgccgaggcagtgactgcgacgcaaacatcaaaccagatgcaaacagattcattatctccatcccctaatcctgtgtcacctgtgcctttgaataacccaacaagtgccccaagatatggaacagtgatccctaatcgcatctttgtaggaggaattgattttaagacaaacgaaagtgatttaagaaaatttttttcccagtatgggtctgtgaaagaagtgaagattgtaaatgacagagctggagtatccaaagggtatggtttcgtcacttttgaaacacaagaagatgcacaaaaaattttacaagaggctgaaaaacttaattataaggataagaagctgaacattggtccagcaataagaaaacaacaagtagggatccctcgttctagtataatgccagcagctggaacaatgtatctaacaacttcaactggatatccttatacttaccataatggtgttgcttattttcatactccagaggtaacttcggtcccaccgccttggccttcacgttctgtatgtagctcccctgtgatggtagctcagcccatttatcagcaacctgcatatcactaccaggccaccacacagtatttaccaggacagtggcagtggagtgttcctcagccttctgcctcttctgctccattcttatacctgcaaccttctgaggttatttatcaaccagtggaaattgcacaggatggtggatgtgttcctcctccactgtctctgatggaaacttcagttccagagccttattctgatcatggagttcaagcaacatatcaccaggtttatgctccaagtgccatcactatgcctgcgcctgtgatgcagcctgagccaattaaaacagtgtggagcattcattattaagacaattgggcagctctattccagctcaactgatttcttgtccaatgatccttgcgtggccgagatccagcttcaacgaaccagctagaagctgcccgttgtgaaacttagtgttagttaatacctcaccatactcagttattccactataagctgtctaaatttgatgaaatttgctttttcagctgttctacaaaattatttaggtagatgtggcatgttggttttttatgtgctaacctaactgtaatgaccttttctacaacatgttttatccattccataaataataaccacattgggaatagtgaggtgtcttttattttctctgctttgtgttattttttcttatcaaacaattagatgttatgtttcatattatttgatatttattttcatatttaggataagaatcatttttaattataatacttttaatactttcatatattttacaacagtatactatttaatattaatgacaattctatttttgctttgctgttttgtcatttaatatgcttttgtctaatttttaattcatttattactgttactccttatttaattttgcgtctgccatggttttcagaatctgaatagtatttatacttcttttttataacattttccaaatattagaaataccatcaacatgatcagtattcttgccttttcatgtaatttgactatattaaattttttctccagtgtttgagacaatattgaaatcttcctataacataatttatttggtatcaaattttataaaatatggatccacctttggaattttgataaaagggttcatctctgacatgatcccataacactgactgaaattccaccaaattactgttctttgaatgctttaatccttaaaccttttcttctgatatgcaaccaatatattcaattatatatgtgattaatttttaaaaggacaattgttttcataaaatgcaaaactattttttacaccaaaggaaaattttagattctgattctaaatccgatttttactataaaattggaaaatagatgggaggggtgtcattcattgttcaaaaggtacagaacaaatcataggggt

SEQ ID NO: 405690 - DNA, 2196 bp, Homo sapiens
acccgaggcgacgcagtccgcttctccccacccgccaggtggcaggttcagggccggggtccgagcctgcttccctgcagctgccacagccaccctcgccgccagggggcgagagtcccaggcaggacaagcagcgctgctgccttggcgtgaaggtggtttcaaactttaggcttcttttccctaccccgcgtctctgaagagcagagaggaagatggaaaccgagtccgggccgcaaacatcaaaccagatgcaaacagattcattatctccatcccctaatcctgtgtcacctgtgcctttgaataacccaacaagtgccccaagatatggaacagtgatccctaatcgcatctttgtaggaggaattgattttaagacaaacgaaagtgatttaagaaaatttttttcccagtatgggtctgtgaaagaagtgaagattgtaaatgacagagctggagtatccaaagggtatggtttcgtcacttttgaaacacaagaagatgcacaaaaaattttacaagaggctgaaaaacttaattataaggataagaagctgaacattggtccagcaataagaaaacaacaagtagggatccctcgttctagtataatgccagcagctggaacaatgtatctaacaacttcaactggatatccttatacttaccataatggtgttgcttattttcatactccagaggtaacttcggtcccaccgccttggccttcacgttctgtatgtagctcccctgtgatggtagctcagcccatttatcagcaacctgcatatcactaccaggccaccacacagtatttaccaggacagtggcagtggagtgttcctcagccttctgcctcttctgctccattcttatacctgcaaccttctgaggttatttatcaaccagtggaaattgcacaggatggtggatgtgttcctcctccactgtctctgatggaaacttcagttccagagccttattctgatcatggagttcaagcaacatatcaccaggtttatgctccaagtgccatcactatgcctgcgcctgtgatgcagcctgagccaattaaaacagtgtggagcattcattattaagacaattgggcagctctattccagctcaactgatttcttgtccaatgatccttgcgtggccgagatccagcttcaacgaaccagctagaagctgcccgttgtgaaacttagtgttagttaatacctcaccatactcagttattccactataagctgtctaaatttgatgaaatttgctttttcagctgttctacaaaattatttaggtagatgtggcatgttggttttttatgtgctaacctaactgtaatgaccttttctacaacatgttttatccattccataaataataaccacattgggaatagtgaggtgtcttttattttctctgctttgtgttattttttcttatcaaacaattagatgttatgtttcatattatttgatatttattttcatatttaggataagaatcatttttaattataatacttttaatactttcatatattttacaacagtatactatttaatattaatgacaattctatttttgctttgctgttttgtcatttaatatgcttttgtctaatttttaattcatttattactgttactccttatttaattttgcgtctgccatggttttcagaatctgaatagtatttatacttcttttttataacattttccaaatattagaaataccatcaacatgatcagtattcttgccttttcatgtaatttgactatattaaattttttctccagtgtttgagacaatattgaaatcttcctataacataatttatttggtatcaaattttataaaatatggatccacctttggaattttgataaaagggttcatctctgacatgatcccataacactgactgaaattccaccaaattactgttctttgaatgctttaatccttaaaccttttcttctgatatgcaaccaatatattcaattatatatgtgattaatttttaaaaggacaattgttttcataaaatgcaaaactattttttacaccaaaggaaaattttagattctgattctaaatccgatttttactataaaattggaaaatagatgggaggggtgtcattcattgttcaaaaggtacagaacaaatcataggggt

SEQ ID NO: 405691 - DNA, 213 bp, Homo sapiens
tgggcaatgagtagaggctggaagggtttgagggagcaagctagaaaaagcctgtaattgctataagtggagcattaggggagattctgatgagggttcagaagacgagagctagggaaaagtctgaatcttcttcaagatttgcttaagtggtggtggccaaaatgttggtagaaatttgaacagtaaaggccattccgacaaggtctcaga

SEQ ID NO: 405692 - DNA, 1653 bp, Homo sapiens
ttcggggccgttttggcggctatgcaggattggcaggagctgcgatgctcacacttgcctcgccgaccgccatttcacatccagcagaggaggcgggggcagccgctgagacggtttttcacaaggaaatgacctcattcttgatggctgctgctaacttacggtgagatgctgggtccctgcccaataccacatggacatccaatcaatttacccagggacaagtccactcaagagcatcatttagaagagggaaaaggcactggggttatttgtttttggagtatgtgcttaaggaaatctagagtattcccacgagcattctgctgagatgaacaatcagatgacctcgtgtgagatttggaggagagaaggaaatggagagcatgcttctgccgcttctgtggtttctgtcggtaagcacagtgatgaggtgctgagttttccccagaaggcctcccagtgtcctattaccagcttcacaagcgtcgagggcagggcatgggcatctattgttcaccagtggagatctatctggcacagaaccgatccaaccattgcagtggtcacagcggtgttggctttctgattctcaaccttcctgaccaccagaggagacagcctctttggtggccctgttctgtggtattgtgctaaccggtggtgggactaaaactgtctctataatgttttatttcttaaaaaaaaattctgaagcaaatgtgacaatatgttaacattcttaaaatctgggtagtgggaacatggatgttgttatttgtggtgtgtttgaaattgtgtcatattataaatttaaaaaaaatgttttgactacaaaatctctatgtatatgcccagtttttgtagattgttgcttacgcttttcatatttttacccaaggagtaatcaggaattctaaaagtcttatgtaacaggatttaaaataaaattacacagaatctcaactgtactatattttgaaaatatgaatgattaagattattttttatatttttattaatatagagaaaataatttctataaaatatgctttcagctaatgggggatcccattccatatttttttctttttcttttttttttttatttctccaagaaaaactcattccagttcttttggcattaaattctcttataccaaaaaaattgtttcaaaagttgcttagttgttatagaagatgattgcttatatgataaagaaatgttaaggccttgataatattcaaaagcttctgtataaaaacaataccatggaaattaatgacagagtaaactttctgaattaaagttctctttcaaactatgagtaagaggagaattagctggcttcttttttcttttttttgaggcagggtcttgctctgtcacccaggctcaatcacagctcactgcagccttgacctcctgggctcaggtgattttcccaccttagcctcctgagtagctgggaccacaggcatgagccaccacacctggctaatttttgtattattttggtagagatgggatttcgccatgttgcccaagctggtcacaaacttcctgccttggcctcccaaagtgctgggattacaggcatgagccactatgcccaacctcagttggatgggtttgtgtgtatgtgtgtgtgt

SEQ ID NO: 405693 - DNA, 1771 bp, Homo sapiens
ttcggggccgttttggcggctatgcaggattggcaggagctgcgatgctcacacttgcctcgccgaccgccatttcacatccagcagaggaggcgggggcagccgctgagacggtttttcacaaggtgcattttagtggttaccaggttgccacgtatttgaagtggtgtgagagctactcgtttggaaccgttgtggattttcaaataggaaaatcaaaaggcccaaagagacagctcactggaaatgacctcattcttgatggctgctgctaacttacggtgagatgctgggtccctgcccaataccacatggacatccaatcaatttacccagggacaagtccactcaagagcatcatttagaagagggaaaaggcactggggttatttgtttttggagtatgtgcttaaggaaatctagagtattcccacgagcattctgctgagatgaacaatcagatgacctcgtgtgagatttggaggagagaaggaaatggagagcatgcttctgccgcttctgtggtttctgtcggtaagcacagtgatgaggtgctgagttttccccagaaggcctcccagtgtcctattaccagcttcacaagcgtcgagggcagggcatgggcatctattgttcaccagtggagatctatctggcacagaaccgatccaaccattgcagtggtcacagcggtgttggctttctgattctcaaccttcctgaccaccagaggagacagcctctttggtggccctgttctgtggtattgtgctaaccggtggtgggactaaaactgtctctataatgttttatttcttaaaaaaaaattctgaagcaaatgtgacaatatgttaacattcttaaaatctgggtagtgggaacatggatgttgttatttgtggtgtgtttgaaattgtgtcatattataaatttaaaaaaaatgttttgactacaaaatctctatgtatatgcccagtttttgtagattgttgcttacgcttttcatatttttacccaaggagtaatcaggaattctaaaagtcttatgtaacaggatttaaaataaaattacacagaatctcaactgtactatattttgaaaatatgaatgattaagattattttttatatttttattaatatagagaaaataatttctataaaatatgctttcagctaatgggggatcccattccatatttttttctttttcttttttttttttatttctccaagaaaaactcattccagttcttttggcattaaattctcttataccaaaaaaattgtttcaaaagttgcttagttgttatagaagatgattgcttatatgataaagaaatgttaaggccttgataatattcaaaagcttctgtataaaaacaataccatggaaattaatgacagagtaaactttctgaattaaagttctctttcaaactatgagtaagaggagaattagctggcttcttttttcttttttttgaggcagggtcttgctctgtcacccaggctcaatcacagctcactgcagccttgacctcctgggctcaggtgattttcccaccttagcctcctgagtagctgggaccacaggcatgagccaccacacctggctaatttttgtattattttggtagagatgggatttcgccatgttgcccaagctggtcacaaacttcctgccttggcctcccaaagtgctgggattacaggcatgagccactatgcccaacctcagttggatgggtttgtgtgtatgtgtgtgtgt

SEQ ID NO: 405694 - DNA, 1509 bp, Homo sapiens
ttcggggccgttttggcggctatgcaggattggcaggagctgcgatgctcacacttgcctcgccgaccgccatttcacatccagcagaggaggcgggggcagccgctgagacggtttttcacaaggaaatgacctcattcttgatggctgctgctaacttacgtattcccacgagcattctgctgagatgaacaatcagatgacctcgtgtgagatttggaggagagaaggaaatggagagcatgcttctgccgcttctgtggtttctgtcggtaagcacagtgatgaggtgctgagttttccccagaaggcctcccagtgtcctattaccagcttcacaagcgtcgagggcagggcatgggcatctattgttcaccagtggagatctatctggcacagaaccgatccaaccattgcagtggtcacagcggtgttggctttctgattctcaaccttcctgaccaccagaggagacagcctctttggtggccctgttctgtggtattgtgctaaccggtggtgggactaaaactgtctctataatgttttatttcttaaaaaaaaattctgaagcaaatgtgacaatatgttaacattcttaaaatctgggtagtgggaacatggatgttgttatttgtggtgtgtttgaaattgtgtcatattataaatttaaaaaaaatgttttgactacaaaatctctatgtatatgcccagtttttgtagattgttgcttacgcttttcatatttttacccaaggagtaatcaggaattctaaaagtcttatgtaacaggatttaaaataaaattacacagaatctcaactgtactatattttgaaaatatgaatgattaagattattttttatatttttattaatatagagaaaataatttctataaaatatgctttcagctaatgggggatcccattccatatttttttctttttcttttttttttttatttctccaagaaaaactcattccagttcttttggcattaaattctcttataccaaaaaaattgtttcaaaagttgcttagttgttatagaagatgattgcttatatgataaagaaatgttaaggccttgataatattcaaaagcttctgtataaaaacaataccatggaaattaatgacagagtaaactttctgaattaaagttctctttcaaactatgagtaagaggagaattagctggcttcttttttcttttttttgaggcagggtcttgctctgtcacccaggctcaatcacagctcactgcagccttgacctcctgggctcaggtgattttcccaccttagcctcctgagtagctgggaccacaggcatgagccaccacacctggctaatttttgtattattttggtagagatgggatttcgccatgttgcccaagctggtcacaaacttcctgccttggcctcccaaagtgctgggattacaggcatgagccactatgcccaacctcagttggatgggtttgtgtgtatgtgtgtgtgt

SEQ ID NO: 405695 - DNA, 1556 bp, Homo sapiens
caagttcgaaatttgcccctgaattaggacccttgacacatttctaacccatccaagtagagatcgttcttttacatttgtgtgttatacaggtgcattttagtggttaccaggttgccacgtatttgaagtggtgtgagagctactcgtttggaaccgttgtggattttcaaataggaaaatcaaaaggcccaaagagacagctcactgtattcccacgagcattctgctgagatgaacaatcagatgacctcgtgtgagatttggaggagagaaggaaatggagagcatgcttctgccgcttctgtggtttctgtcggtaagcacagtgatgaggtgctgagttttccccagaaggcctcccagtgtcctattaccagcttcacaagcgtcgagggcagggcatgggcatctattgttcaccagtggagatctatctggcacagaaccgatccaaccattgcagtggtcacagcggtgttggctttctgattctcaaccttcctgaccaccagaggagacagcctctttggtggccctgttctgtggtattgtgctaaccggtggtgggactaaaactgtctctataatgttttatttcttaaaaaaaaattctgaagcaaatgtgacaatatgttaacattcttaaaatctgggtagtgggaacatggatgttgttatttgtggtgtgtttgaaattgtgtcatattataaatttaaaaaaaatgttttgactacaaaatctctatgtatatgcccagtttttgtagattgttgcttacgcttttcatatttttacccaaggagtaatcaggaattctaaaagtcttatgtaacaggatttaaaataaaattacacagaatctcaactgtactatattttgaaaatatgaatgattaagattattttttatatttttattaatatagagaaaataatttctataaaatatgctttcagctaatgggggatcccattccatatttttttctttttcttttttttttttatttctccaagaaaaactcattccagttcttttggcattaaattctcttataccaaaaaaattgtttcaaaagttgcttagttgttatagaagatgattgcttatatgataaagaaatgttaaggccttgataatattcaaaagcttctgtataaaaacaataccatggaaattaatgacagagtaaactttctgaattaaagttctctttcaaactatgagtaagaggagaattagctggcttcttttttcttttttttgaggcagggtcttgctctgtcacccaggctcaatcacagctcactgcagccttgacctcctgggctcaggtgattttcccaccttagcctcctgagtagctgggaccacaggcatgagccaccacacctggctaatttttgtattattttggtagagatgggatttcgccatgttgcccaagctggtcacaaacttcctgccttggcctcccaaagtgctgggattacaggcatgagccactatgcccaacctcagttggatgggtttgtgtgtatgtgtgtgtgt

SEQ ID NO: 405696 - DNA, 519 bp, Homo sapiens
ctagagaatattattttaaagaaaaaatggcaacaatacattgtatattttcctccttggtaagctaacaaatgctatgtttggtaaaaacaaacacaattatctacctgttgaagctcacacaacttttactatttaaggttgttttctttaactgttattagaagaaaataattatgctcaagtcatatctgtctcatttccctgtaggtgaccatgctttgggattttcatagtttgagtaattcctatgggctctaccacccagcgagttaaagaagacaagattccacccccagggggttgtggttctgggaatgtgagcagcttgttttcaggagatctgcatcttgatctggcctgctattaggatctgtggtggtggtgcctgtctggttttagttgtttcttttatcttacacagatttttgtaagttatttgcatataaaggtttttgaaaagtgaatgttttatgggggcatcttgcttatacaaagaaaaattaaaactgttttaaa

SEQ ID NO: 405697 - DNA, 1032 bp, Homo sapiens
ttcggggccgttttggcggctatgcaggattggcaggagctgcgatgctcacacttgcctcgccgaccgccatttcacatccagcagaggaggcgggggcagccgctgagacggtttttcacaaggtaagaaaatccgcccgcgtgaggagggaggcgaggcgcagatctcgtgccgctgcggcctcgcgggagggaagggcgggcgggcggcggaacgggcggggccgggtgcggacgcagccggcccttctcaggtaacgccgcggctccgcgcgtggcccgggggcggtgcgaagggtgggggcgcgcgggcgcgggcttcggcctataaaagggccgccctggcgttcccccttcccgaacgtgccgcgcgagccgcggtgccccctcctctttgctgctgcagtgtctgcgccgggccatttaatgagatttattcacgcacggctcttctcagctttgcgaggggttggcagatccagtgcacagggatttcccactaccgtgtttttctcccgcccccttccttccctctcgtcctaatacatccttcgttggtttcctcggccccgcaggctgcgtcccgggcacgcgcaagtacatgtgcattttagtggttaccaggttgccacgtatttgaagtggtgtgagagctactcgtttggaaccgttgtggattttcaaataggaaaatcaaaaggcccaaagagacagctcactggtgaccatgctttgggattttcatagtttgagtaattcctatgggctctaccacccagcgagttaaagaagacaagattccacccccagggggttgtggttctgggaatgtgagcagcttgttttcaggagatctgcatcttgatctggcctgctattaggatctgtggtggtggtgcctgtctggttttagttgtttcttttatcttacacagatttttgtaagttatttgcatataaaggtttttgaaaagtgaatgttttatgggggcatcttgcttatacaaagaaaaattaaaactgttttaaa

SEQ ID NO: 405698 - DNA, 798 bp, Homo sapiens
ttcggggccgttttggcggctatgcaggattggcaggagctgcgatgctcacacttgcctcgccgaccgccatttcacatccagcagaggaggcgggggcagccgctgagacggtttttcacaaggtaagaaaatccgcccgcgtgaggagggaggcgaggcgcagatctcgtgccgctgcggcctcgcgggagggaagggcgggcgggcggcggaacgggcggggccgggtgcggacgcagccggcccttctcaggtaacgccgcggctccgcgcgtggcccgggggcggtgcgaagggtgggggcgcgcgggcgcgggcttcggcctataaaagggccgccctggcgttcccccttcccgaacgtgccgcgcgagccgcggtgccccctcctctttgctgctgcagtgtctgcgccgggccatttaatgagatttattcacgcacggctcttctcagctttgcgaggggttggcagatccagtgcacagggatttcccactaccgtgtttttctcccgcccccttccttccctctcgtcctaatacatccttcgttggtttcctcggccccgcaggctgcgtcccgggcacgcgcaagtacatgtaaggacttgtcagctgccggtgacctccctcctccctcgtcgctcctcccccagcggaatgtaggattaacagtctttccgagaaaattttggccaaagaaaaaggcctgtgaaagtcaccgcgttagacgtggcctcctcgtgtttttcactaacacgttatggaaggttttactacccgaaggcataaa

SEQ ID NO: 405699 - DNA, 269 bp, Homo sapiens
ctgggtccctgcccaataccacatggacatccaatcaatttacccagggacaagtccactcaagagcatcatttagaagagggaaaaggcactggggttatttgtttttggagtatgtgcttaaggaaatctagaggtaagcagtttttgagtgttactagtggtgtcagaatcactaaaaacattcatacaaaatgctggttactttttaagcaaaaagcaaaaaagtgcattttattttactgtgtacatgagaaatagctgaggtt

SEQ ID NO: 405700 - DNA, 1471 bp, Homo sapiens
ttcggggccgttttggcggctatgcaggattggcaggagctgcgatgctcacacttgcctcgccgaccgccatttcacatccagcagaggaggcgggggcagccgctgagacggtttttcacaagtattcccacgagcattctgctgagatgaacaatcagatgacctcgtgtgagatttggaggagagaaggaaatggagagcatgcttctgccgcttctgtggtttctgtcggtaagcacagtgatgaggtgctgagttttccccagaaggcctcccagtgtcctattaccagcttcacaagcgtcgagggcagggcatgggcatctattgttcaccagtggagatctatctggcacagaaccgatccaaccattgcagtggtcacagcggtgttggctttctgattctcaaccttcctgaccaccagaggagacagcctctttggtggccctgttctgtggtattgtgctaaccggtggtgggactaaaactgtctctataatgttttatttcttaaaaaaaaattctgaagcaaatgtgacaatatgttaacattcttaaaatctgggtagtgggaacatggatgttgttatttgtggtgtgtttgaaattgtgtcatattataaatttaaaaaaaatgttttgactacaaaatctctatgtatatgcccagtttttgtagattgttgcttacgcttttcatatttttacccaaggagtaatcaggaattctaaaagtcttatgtaacaggatttaaaataaaattacacagaatctcaactgtactatattttgaaaatatgaatgattaagattattttttatatttttattaatatagagaaaataatttctataaaatatgctttcagctaatgggggatcccattccatatttttttctttttcttttttttttttatttctccaagaaaaactcattccagttcttttggcattaaattctcttataccaaaaaaattgtttcaaaagttgcttagttgttatagaagatgattgcttatatgataaagaaatgttaaggccttgataatattcaaaagcttctgtataaaaacaataccatggaaattaatgacagagtaaactttctgaattaaagttctctttcaaactatgagtaagaggagaattagctggcttcttttttcttttttttgaggcagggtcttgctctgtcacccaggctcaatcacagctcactgcagccttgacctcctgggctcaggtgattttcccaccttagcctcctgagtagctgggaccacaggcatgagccaccacacctggctaatttttgtattattttggtagagatgggatttcgccatgttgcccaagctggtcacaaacttcctgccttggcctcccaaagtgctgggattacaggcatgagccactatgcccaacctcagttggatgggtttgtgtgtatgtgtgtgtgt

SEQ ID NO: 405701 - DNA, 629 bp, Homo sapiens
gccttctgccatgattgttaagttccctgaggcttcctcagccatgtggaactgtgagtcaattaaacctctttcctttataaattgccctgtctctggcagttctttatagcagtgcgagaatggactaacacaatatgtcattcatttctttctattacttttcctgtcagtgacgtgttctttcttgagaataaacaatgagaggaaagttgacctcatttttaatgaaaagaaaaattttctgctcattttctagataaaagaacaaattgttattgaataaacagagaaaatatgataaatcctccaaaatagcattgaaattcctttctacccacagaaagaaaagctcaagagcaatgcaattttatcatgtcatacaatatcaggtgtgctgcatgtctacacagaaagtaggacatagcaatatctgaaagtgaattttttttttaattgagatatagttttgttctcgttgcccaggctggagtgcaatggtgcaatcttggctcaccacaacctccgcctcccaggagaatggcgtgaatcccggaggcagagcttgcagtgagccagcatcgcgccactgcactccatcgtgggcgacaaagcgagactccgtctca

SEQ ID NO: 405702 - DNA, 687 bp, Homo sapiens
gggagtggatcacaaggtcaggagttcaagaccagcctggccaatactgtgaacccgtctctactaaaaatacaaaaattagctgggtgtggtggcgcacacctgtagtcccagctactcgggaggctgaggcaggagaatcacttgaacccgggagacggaggttgcagtgggctgagatcctgccattgcactacagccccggcaacaagagcgaaactccgtctcaaaataaacaaataaataaaataaaataaaataaagtctccttccaacttttcagtctgtgaaacaaagatttgatctattcctcaaggcaagttgttactagctgagggtggcttggatttacctcagattaatgagtttttaaaatctgagttgattcttttcaataattttctattcaagcaggacagagctgggtaaaaggtaaaagggaggcaggggtctgacaggatcacagcgctgctgtgagaaaaaaacgactccacagcctgaaattttattattttttccttattatcttttttttctgagacagggtttcactgtcaccaaggctggagtgaagtggcgtgatcactgctcactgcagccacgacctcccggggcttagctgatcctcccacctcagcctctggagtagatgggactacaggcccgcgtcagtacgcccagctagtt

SEQ ID NO: 405703 - DNA, 309 bp, Homo sapiens
ggcaaaaacctggataatttttttcagaagatacatgcatggcaaacagaaaacgaaaaagttctcaacattcctaattatcagaggaattcaaatgagaagcacaatgcaatatcaactcacactagttaatatggctattatcagaaatgtaacagatgacaaatgttggcaagaatgtgggggaaagggaaatatcctgtggtaggattggttacttgataagttaaaaataaagctatcatataatctggtgatcccacttcttgttatatatgcaaaggaaataaaattactttgccaaagaca

SEQ ID NO: 405704 - DNA, 363 bp, Homo sapiens
ttagagggtttattttaaagtccaagtctaaagaatttgctctcagcagatgtttctgaatattctaaataaaaaaaatcataatgaatatagtttctaaatatactccaaaatggatgacctgtgaagaattgatacgatacctggctagcaggtgtcatcatggattagaaagaaactgcttttatgatgcatatattgttatggtttaaaataacaacaaagattaacaacagcagttgtaatgagtggcagtcatcatcactgttataataacaattatatgaaggctttgcagagaaaaagatattttaaggaaaagtagctgagctattagaagaataacattaaggctggtcacag

SEQ ID NO: 405705 - DNA, 550 bp, Homo sapiens
tactgaagctgttaatggatgtgtggatggttcctcacattcttctgtttactttctatacgtttaaaattttccctagtaaatgagttaaatttaatcacctattgcatccctgatatacgtctgccttgcatgttcacacctgtgacctcattaaatcctcccagcaatcctgtgaggcaagtccattgtccaggagaagaaaatgagacgtggagaaccagccaaggacccccatgtcgcctttcatccctcctgccactgcccaatgcaggtctttaccgtcacagacaggaagtgctcccgatcacggacaaaattccaaaggcatcgtgggtcagacagcacggaatgagtagtgcagggcaggtaagcagacctcacagaggtccagaggacaggaggcagtcagggttgctttcctgacaagactcctcctcctcctacacccctccagcccagggacactggagtgggcgggccctgggacacagcatcccccgaactacccagcaatcagaactccagtggtcacagccgtgcttcactg

SEQ ID NO: 405706 - DNA, 971 bp, Homo sapiens
tgggggctcagggtgctcagccctgggcattacataaaagctgtttattgacattacgttcttcagagtaacaaacccccttggaggactctcctgccgggatgtccatgtccgcctttgctccgagctggggtctcatgtctgtggtgctggaatccagagccctgacggtaggggagtgattttgcaacacagttgcatttcacatcttctgacaggattccttgagggagggttggaccctggcacctggccagctccaggaagggtggccaggcccctcactgccccatcaagagtacttggtgttggagatcttcttccagagcagagtcttgaggtggctgagcaccagcgagtgatgggcctccacctggctggccagcccgctcagcgtggtacaggtgcgcagctgtgtgcccagctcctcgcggaggtcggcgggcgcgccaggcagcaggtagccccgtagcagtgcgcacaccttggccaggttgggctggatgaggtcgcccttgcactgcctcatgagcctgtcacacggggccctgcagtcgcgcccgtaggtgcagtcggtgctgtgctcgcagcggcggccctgcaggaagcggcgcacggtggcctcgggtgccacctgctgcaggtcggccatcttgaagtcgtaggtggctgtgtagcccacgttggccagtgtggtctcacacatgtagaaagtcccgtaagagccgtggaagagctcctccacgaactccagcaggccgatggcgatcttggcccgccaaggccacgcaggccccagccactgctggagagcaccctgcagggcaggcggcagcagtgggcgcaacaggggtgggagggcggccgcgtgccaggcgccatgcggcacgccctcggtgaggtagaggtccccacagtagcccagcagtctggaggcgtgctccttctcctgcagggacagcagcagcagg

SEQ ID NO: 405707 - DNA, 1233 bp, Homo sapiens
agcggctctgcgtgcgccggaggctgccgtggcgggtgggccgcctgacttctcctcccggccagttctcgagcgcctcaccgggcctcgccctgcagcctcgctctcgctggcgctgcgcggcctaggggactgggctgctggcctccgggtgcggggtgggggcaggctccgacctggggcgtcctggcagcgcgagccgcgggatgggggcccgggccgcggaggaggcgccgctgctgtgtcccttggtggagagggcgctgccggccctgcgcggtttccagccaggaagcttcgggaagcctggacgtctgctcactggagatgacacgtgcgtggggtgttggcattcttgttatttaacacgggaaggaggtgacttcgcctgtgatggacttccagtgtgagcactggccagagtgaccaggctgaccagcaccagccctgatccagatgcagaggccaggatgtgggcccagccctgtgccaggaggctggctggaataaaggtacagatagaggcctcaccccctctgggaccactggcactcagggtgtttgcagcctcagagcccacctgcccccagggccacagctgcatctcctgccctgctgtcattacagggatgggcaggctggcatgggggcagccgctgcccctgcctgggtgttgctgtgtattcctgccggccaggggccactgccaggaccacgcctcccttttcatatcccgattcttaagttctgctattgtggtattctggtggagaaaaaagaaccgcgtggctgtttttgaactgcctggaacctaagaccctgaattcttttcccccccaaggggaaaatctatatggaaaacatttattttaaaatacaggatgaagtgaattaaaagatttaaatgcacatttctttaaggataatatttctgtgttggcaaaatttgagagtaaattggtcttgaatggaatggattgtcttgactcacacattgcggagcagagcccgccctgaagaaaggtgttgctgtggtgggatcttcccacgagggtccttgcctgttctcctaggggatggttgctgggtgccctgggctactggggagagcgtacggggctggagaagatggccattcctgggctgtttcctagggaatgagttgtacatctcatggctggattttgtaaaatcagtttttaaaataccgcatatatctgttttcttactgga

SEQ ID NO: 405708 - DNA, 794 bp, Homo sapiens
agcggctctgcgtgcgccggaggctgccgtggcgggtgggccgcctgacttctcctcccggccagttctcgagcgcctcaccgggcctcgccctgcagcctcgctctcgctggcgctgcgcggcctaggggactgggctgctggcctccgggtgcggggtgggggcaggctccgacctggggcgtcctggcagcgcgagccgcgggatgggggcccgggccgcggaggaggcgccgctgctgtgtcccttggtggagagggcgctgccggccctgcgcggtttccagccaggaagcttcgggaagcctggacgtctgctcactggagatgacacgtgcgtggggtgttggcattcttgttatttaacacgggaaggaggtgacttcgcctgtgatggacttccagtgtgagcactggccagagtgaccaggctgaccagcaccagccctgatccagatgcagaggccaggatgtgggcccagccctgtgccaggaggctggctggaataaagggatgggcaggctggcatgggggcagccgctgcccctgcctgggtgttgctgtgtattcctgccggccaggggccactgccaggaccacgcctcccttttcatatcccgattcttaagttctgctattgtggtattctggtggagaaaaaagaaccgcgtggctgtttttgaactgcctggaacctaagaccctgaattcttttcccccccaaggggaaaatctatatggaaaacatttattttaaaatacaggatgaagtgaattaaaagatttaaatgca

SEQ ID NO: 405709 - DNA, 472 bp, Homo sapiens
agcggctctgcgtgcgccggaggctgccgtggcgggtgggccgcctgacttctcctcccggccagttctcgagcgcctcaccgggcctcgccctgcagcctcgctctcgctggcgctgcgcggcctaggggactgggctgctggcctccgggtgcggggtgggggcaggctccgacctggggcgtcctggcagcgcgagccgcgggatgggggcccgggccgcggaggaggcgccgctgctgtgtattcctgccggccaggggccactgccaggaccacgcctcccttttcatatcccgattcttaagttctgctattgtggtattctggtggagaaaaaagaaccgcgtggctgtttttgaactgcctggaacctaagaccctgaattcttttcccccccaaggggaaaatctatatggaaaacatttattttaaaatacaggatgaagtgaattaaaagatttaaatgca

SEQ ID NO: 405710 - DNA, 857 bp, Homo sapiens
agcggctctgcgtgcgccggaggctgccgtggcgggtgggccgcctgacttctcctcccggccagttctcgagcgcctcaccgggcctcgccctgcagcctcgctctcgctggcgctgcgcggcctaggggactgggctgctggcctccgggtgcggggtgggggcaggctccgacctggggcgtcctggcagcgcgagccgcgggatgggggcccgggccgcggaggaggcgccgctgctgtgtcccttggtggagagggcgctgccggccctgcgcggtttccagccaggaagcttcgggaagcctggacgtctgctcactggagatgacacgtgcgtggggtgttggcattcttgttatttaacacgggaaggaggtgacttcgcctgtgatggacttccagtgtgagcactggccagagtgaccaggctgaccagcaccagccctgatccagatgcagaggccaggatgtgggcccagccctgtgccaggaggctggctggaataaagggatgggcaggctggcatgggggcagccgctgcccctgcctgggtgttgctgtgtattcctgccggccaggggccactgccaggaccacgcctcccttttcatatcccgattcttaagttctgctattgtggtattctggtggagaaaaaagaaccgcgtggctgtttttgaactgcctggaacctaagaccctgaattcttttcccccccaaggggaaaatctatatggaaaacatttattttaaaatacaggatgaagtgaattaaaagatttaaatgcacatttctttaaggataatatttctgtgttggcaaaatttgagagtaaattggtcttgaatgga

SEQ ID NO: 405711 - DNA, 1481 bp, Homo sapiens
agcggctctgcgtgcgccggaggctgccgtggcgggtgggccgcctgacttctcctcccggccagttctcgagcgcctcaccgggcctcgccctgcagcctcgctctcgctggcgctgcgcggcctaggggactgggctgctggcctccgggtgcggggtgggggcaggctccgacctggggcgtcctggcagcgcgagccgcgggatgggggcccgggccgcggaggaggcgccgctgctgtgtcccttggtggagagggcgctgccggccctgcgcggtttccagccaggaagcttcgggaagcctggacgtctgctcactggagatgacacgtgcgtggggtgttgggtaagttggtgcattggagctggaacagggtcaatcctccaatgtaactaagccctcctgtgcaacatcttaagtgactggagggaccagtcggtcttgtgttcacattgaggctagaagctgtctccaggggagtaaaaacggattatttagtcttcaacaggacactgcccctagaggcgttgcagctgtggctgccgtgtcacatctgtgtcattaggtggcagagattagagaggctatgtctacgctcagcgttctgccccgtgaacgtttgaatgtttgatagtctcacactcctgttttgtggacaggcatctgttttcctttgctggtatctgggagagagggtgggccctgtgagtgggctttctaactctcgcgctgggctaggctggcctctaggggtctgaagggatagtgggaaggtggagggtgccttcaccaggagcagccttcatgagtgagttttaagaacctgtgaggatcggtcaggtctggtgtgcgctggatcatgccgtacaccgtgtcaggatcacgcaggacaggactggggaagggtttgctggcgtctcggttaatagcagtaacggcagccgcttgtgttcttgattctttgccaagcattcttgttatttaacacgggaaggaggtgacttcgcctgtgatggacttccagtgtgagcactggccagagtgaccaggctgaccagcaccagccctgatccagatgcagaggccaggatgtgggcccagccctgtgccaggaggctggctggaataaagggatgggcaggctggcatgggggcagccgctgcccctgcctgggtgttgctgtgtattcctgccggccaggggccactgccaggaccacgcctcccttttcatatcccgattcttaagttctgctattgtggtattctggtggagaaaaaagaaccgcgtggctgtttttgaactgcctggaacctaagaccctgaattcttttcccccccaaggggaaaatctatatggaaaacatttattttaaaatacaggatgaagtgaattaaaagatttaaatgcacatttctttaaggataatatttctgtgttggcaaaatttgagagtaaattggtcttgaatgga

SEQ ID NO: 405712 - DNA, 921 bp, Homo sapiens
tgggggctcagggtgctcagccctgggcattacataaaagctgtttattgacattacgttcttcagagtaacaaacccccttggaggactctcctgccgggatgtccatgtccgcctttgctccgagctggggtctcatgtctgtggtgctggaatccagagccctgacggtaggggagtgattttgcaacacagttgcatttcacatcttctgacaggattccttgagggagggttggaccctggcacctggccagctccaggaagggtggccaggcccctcactgccccatcaagagtacttggtgttggagatcttcttccagagcagagtcttgaggtggctgagcaccagcgagtgatgggcctccacctggctggccagcccgctcagcgtggtacaggtgcgcagctgtgtgcccagctcctcgcggaggtcggcgggcgcgccaggcagcaggtagccccgtagcagtgcgcacaccttggccaggttgggctggatgaggtcgcccttgcactgcctcatgagcctgtcacacggggccctgcagtcgcgcccgtaggtgcagtcggtgctgtgctcgcagcggcggccctgcaggaagcggcgcacggtggcctcgggtgccacctgctgcaggtcggccatcttgaagtcgtaggtggctgtgtagcccacgttggccagtgtggtctcacacatgtagaaagtcccgtaagagccgtggaagagctcctccacgaactccagcaggccgatggcgatcttggcccgccaaggcgagcacagcaccgactgcacctacgggcgcgactgcagggccccgtgtgacaggctcatgaggcagtgcaagggcgacctcatccagcccaacctggccaaggtgtgcgcactgctacggggctactgctgcctgg

SEQ ID NO: 405713 - DNA, 683 bp, Homo sapiens
agcggctctgcgtgcgccggaggctgccgtggcgggtgggccgcctgacttctcctcccggccagttctcgagcgcctcaccgggcctcgccctgcagcctcgctctcgctggcgctgcgcggcctaggggactgggctgctggcctccgggtgcggggtgggggcaggctccgacctggggcgtcctggcagcgcgagccgcgggatgggggcccgggccgcggaggaggcgccgctgctgtgtcccttggtggagagggcgctgccggccctgcgcggtttccagccaggaagcttcgggaagcctggacgtctgctcactggagatgacacgtgcgtggggtgttggcattcttgttatttaacacgggaaggaggtgacttcgcctgtgatggacttccagtgtgagcactggccagagtgaccaggctgaccagcaccagccctgatccagatgcagaggccaggatgtgggcccagccctgtgccaggaggctggctggaataaagagtaacaaacccccttggaggactctcctgccgggatgtccatgtccgcctctaccccaactgccctgacgctgtaaactgccctgacgctgcaaactgccctgacgctgtaaactgccctgacgctgtaaactgccctgacgctggaaactgccctgacgcttgtaactg

SEQ ID NO: 405714 - DNA, 909 bp, Homo sapiens
agcggctctgcgtgcgccggaggctgccgtggcgggtgggccgcctgacttctcctcccggccagttctcgagcgcctcaccgggcctcgccctgcagcctcgctctcgctggcgctgcgcggcctaggggactgggctgctggcctccgggtgcggggtgggggcaggctccgacctggggcgtcctggcagcgcgagccgcgggatgggggcccgggccgcggaggaggcgccgctgctgtgtcccttggtggagagggcgctgccggccctgcgcggtttccagccaggaagcttcgggaagcctggacgtctgctcactggagatgacacgtgcgtggggtgttggcattcttgttatttaacacgggaaggaggtgacttcgcctgtgatggacttccagtgtgagcactggccagagtgaccaggctgaccagcaccagccctgatccagatgcagaggccaggatgtgggcccagccctgtgccaggaggctggctggaataaaggtacagatagaggcctcaccccctctgggaccactggcactcagggtgtttgcagcctcagagcccacctgcccccagggccacagctgcatctcctgccctgctgtcattacagggatgggcaggctggcatgggggcagccgctgcccctgcctgggtgttgctgtgtattcctgccggccaggggccactgccaggaccacgcctcccttttcatatcccgattcttaagttctgctattgtggtattctggtggagaaaaaagaaccgcgtggctgtttttgaactgcctggaacctaagaccctgaattcttttcccccccaaggggaaaatctatatggaaaacatttattttaaaatacaggatgaagtgaattaaaagatttaaatgca

SEQ ID NO: 405715 - DNA, 972 bp, Homo sapiens
agcggctctgcgtgcgccggaggctgccgtggcgggtgggccgcctgacttctcctcccggccagttctcgagcgcctcaccgggcctcgccctgcagcctcgctctcgctggcgctgcgcggcctaggggactgggctgctggcctccgggtgcggggtgggggcaggctccgacctggggcgtcctggcagcgcgagccgcgggatgggggcccgggccgcggaggaggcgccgctgctgtgtcccttggtggagagggcgctgccggccctgcgcggtttccagccaggaagcttcgggaagcctggacgtctgctcactggagatgacacgtgcgtggggtgttggcattcttgttatttaacacgggaaggaggtgacttcgcctgtgatggacttccagtgtgagcactggccagagtgaccaggctgaccagcaccagccctgatccagatgcagaggccaggatgtgggcccagccctgtgccaggaggctggctggaataaaggtacagatagaggcctcaccccctctgggaccactggcactcagggtgtttgcagcctcagagcccacctgcccccagggccacagctgcatctcctgccctgctgtcattacagggatgggcaggctggcatgggggcagccgctgcccctgcctgggtgttgctgtgtattcctgccggccaggggccactgccaggaccacgcctcccttttcatatcccgattcttaagttctgctattgtggtattctggtggagaaaaaagaaccgcgtggctgtttttgaactgcctggaacctaagaccctgaattcttttcccccccaaggggaaaatctatatggaaaacatttattttaaaatacaggatgaagtgaattaaaagatttaaatgcacatttctttaaggataatatttctgtgttggcaaaatttgagagtaaattggtcttgaatgga

SEQ ID NO: 405716 - DNA, 1533 bp, Homo sapiens
agcggctctgcgtgcgccggaggctgccgtggcgggtgggccgcctgacttctcctcccggccagttctcgagcgcctcaccgggcctcgccctgcagcctcgctctcgctggcgctgcgcggcctaggggactgggctgctggcctccgggtgcggggtgggggcaggctccgacctggggcgtcctggcagcgcgagccgcgggatgggggcccgggccgcggaggaggcgccgctgctgtgtcccttggtggagagggcgctgccggccctgcgcggtttccagccaggaagcttcgggaagcctggacgtctgctcactggagatgacacgtgcgtggggtgttgggtaagttggtgcattggagctggaacagggtcaatcctccaatgtaactaagccctcctgtgcaacatcttaagtgactggagggaccagtcggtcttgtgttcacattgaggctagaagctgtctccaggggagtaaaaacggattatttagtcttcaacaggacactgcccctagaggcgttgcagctgtggctgccgtgtcacatctgtgtcattaggtggcagagattagagaggctatgtctacgctcagcgttctgccccgtgaacgtttgaatgtttgatagtctcacactcctgttttgtggacaggcatctgttttcctttgctggtatctgggagagagggtgggccctgtgagtgggctttctaactctcgcgctgggctaggctggcctctaggggtctgaagggatagtgggaaggtggagggtgccttcaccaggagcagccttcatgagtgagttttaagaacctgtgaggatcggtcaggtctggtgtgcgctggatcatgccgtacaccgtgtcaggatcacgcaggacaggactggggaagggtttgctggcgtctcggttaatagcagtaacggcagccgcttgtgttcttgattctttgccaagcattcttgttatttaacacgggaaggaggtgacttcgcctgtgatggacttccagtgtgagcactggccagagtgaccaggctgaccagcaccagccctgatccagatgcagaggccaggatgtgggcccagccctgtgccaggaggctggctggaataaaggtacagatagaggcctcaccccctctgggaccactggcactcagggtgtttgcagcctcagagcccacctgcccccagggccacagctgcatctcctgccctgctgtcattacagggatgggcaggctggcatgggggcagccgctgcccctgcctgggtgttgctgtgtattcctgccggccaggggccactgccaggaccacgcctcccttttcatatcccgattcttaagttctgctattgtggtattctggtggagaaaaaagaaccgcgtggctgtttttgaactgcctggaacctaagaccctgaattcttttcccccccaaggggaaaatctatatggaaaacatttattttaaaatacaggatgaagtgaattaaaagatttaaatgca

SEQ ID NO: 405717 - DNA, 386 bp, Homo sapiens
ggtatctaaggatctcagtttaagcgtcaggcaggtgtttgcagcctcagagcccacctgcccccagggccacagctgcatctcctgccctgctgtcattacagggatgggcaggctggcatgggggcagccgctgcccctgcctgggtgttgctgtgtattcctgccggccaggggccactgccaggaccacgcctcccttttcatatcccgattcttaagttctgctattgtggtattctggtggagaaaaaagaaccgcgtggctgtttttgaactgcctggaacctaagaccctgaattcttttcccccccaaggggaaaatctatatggaaaacatttattttaaaatacaggatgaagtgaattaaaagatttaaatgca

SEQ ID NO: 405718 - DNA, 1418 bp, Homo sapiens
agcggctctgcgtgcgccggaggctgccgtggcgggtgggccgcctgacttctcctcccggccagttctcgagcgcctcaccgggcctcgccctgcagcctcgctctcgctggcgctgcgcggcctaggggactgggctgctggcctccgggtgcggggtgggggcaggctccgacctggggcgtcctggcagcgcgagccgcgggatgggggcccgggccgcggaggaggcgccgctgctgtgtcccttggtggagagggcgctgccggccctgcgcggtttccagccaggaagcttcgggaagcctggacgtctgctcactggagatgacacgtgcgtggggtgttgggtaagttggtgcattggagctggaacagggtcaatcctccaatgtaactaagccctcctgtgcaacatcttaagtgactggagggaccagtcggtcttgtgttcacattgaggctagaagctgtctccaggggagtaaaaacggattatttagtcttcaacaggacactgcccctagaggcgttgcagctgtggctgccgtgtcacatctgtgtcattaggtggcagagattagagaggctatgtctacgctcagcgttctgccccgtgaacgtttgaatgtttgatagtctcacactcctgttttgtggacaggcatctgttttcctttgctggtatctgggagagagggtgggccctgtgagtgggctttctaactctcgcgctgggctaggctggcctctaggggtctgaagggatagtgggaaggtggagggtgccttcaccaggagcagccttcatgagtgagttttaagaacctgtgaggatcggtcaggtctggtgtgcgctggatcatgccgtacaccgtgtcaggatcacgcaggacaggactggggaagggtttgctggcgtctcggttaatagcagtaacggcagccgcttgtgttcttgattctttgccaagcattcttgttatttaacacgggaaggaggtgacttcgcctgtgatggacttccagtgtgagcactggccagagtgaccaggctgaccagcaccagccctgatccagatgcagaggccaggatgtgggcccagccctgtgccaggaggctggctggaataaagggatgggcaggctggcatgggggcagccgctgcccctgcctgggtgttgctgtgtattcctgccggccaggggccactgccaggaccacgcctcccttttcatatcccgattcttaagttctgctattgtggtattctggtggagaaaaaagaaccgcgtggctgtttttgaactgcctggaacctaagaccctgaattcttttcccccccaaggggaaaatctatatggaaaacatttattttaaaatacaggatgaagtgaattaaaagatttaaatgca

SEQ ID NO: 405719 - DNA, 909 bp, Homo sapiens
ctgccgtggcgggtgggccgcctgacttctcctcccggccagttctcgagcgcctcaccgggcctcgccctgcagcctcgctctcgctggcgctgcgcggcctaggggactgggctgctggcctccgggtgcggggtgggggcaggctccgacctggggcgtcctggcagcgcgagccgcgggatgggggcccgggccgcggaggaggcgccgctgctgtgtcccttggtggagagggcgctgccggccctgcgcggtttccagccaggaagcttcgggaagcctggtgagagctgagtgcgcgaattcggatcttagagaaaggcaccccgttcacccacgacccttccgctcctgccgctgcttccctgagtcgctcaggctgtgggaagatgtttgtcggcatctttgaaaaattgatttcttatgctgcgtcaggtggtttccttgtcactgtggctgctcagcgggaggctgttctggcgggaggaggactgctcggttgtctggtgggcattccgcctcgtggtcctggtcccttgatacctgcaggggatcagcagcccgcgtttcgtggccactgtgttgtaactccaacttcccctcccgcaaattaagcgtagagtaaggggagagagtaacatgggtcggatttttctagaacggcccttgtgacagtgagctttttggtggcagggagcttctttggtccgccttcctggagaccagatgcagcaaaacgcagtctttttcttttcgagacagagtctcagttgcccaggctggagtgcagtggcgcgatctcagctcactaccacctctgcctcctgggttcaagcgactttcctgcttcagcctccagagtagctgggattacaggcgccagccactaggccagctaactttttt

SEQ ID NO: 405720 - DNA, 3515 bp, Homo sapiens
aaaaaaggacagcgagcggggagccccgaggacccccttttccctgcccagggattgagctccagagcctgttagggagctacccagacaggctttagttcctaaagtgctgaggaaacgcacggggcggtaaaggggaggctcgtcggtgagatggcgccggatctcgcttctcagaggcattcagagagcttccccagcgtgaactctcggccgaatgtaattttgccaggccgcgagggacgcagagaggggctgccaccaggcgggggcacgcgcggtagtcttgtccctacccgcccggtgccgccgtccccggctcccctcgggacgagtccgtacagctggagccgttccggacccggaaggggcggtggcgcagggtcctcgcgcgtcccacgtggggtcccgggcccagcagtctgcgcaccgggctcgctgctgcaccacgcgtcacccacgcagaccatggcagccgccgacggttcgctcttcgacaaccccaggacgttctccagacgtcccccagcccaggcgagtcggcaagcaaaggctacgaaaagaaaataccaagcgtccagtgaggctcccccagcgaaacggaggaacgaaacttcatttctcccagccaagaaaactagtgttaaagaaactcagaggacttttaaggggaacgcacaaaaaatgttttctccaaagaagcattcggttagcacaagtgatagaaaccaggaggagagacagtgcattaagacttcatcactgtttaaaaacaaccctgacattccagaactccacagacctgtggtaaagcaggtgcaagaaaaagtgtttacttcagctgcttttcatgagctgggcctccacccacatttaatttccacaataaatacggtcttaaaaatgtctagtatgaccagtgttcagaagcaaagtattcctgtgttgctggaaggcagagatgctctcgtgagatcccagacgggctcaggtaaaactcttgcctattgcatccctgtggtccagtcccttcaagcaatggagtcaaaaatacagcgcagtgatggcccctatgccctggtgctcgtgccaacgagagagctagctctacaaagctttgacactgtccagaaactgcttaagcctttcacctggattgtgcctggagtgttaatgggaggagagaagagaaaatcagaaaaggccagactccgcaaaggaataaatatccttatctcaactcctggacgcctggtggatcatataaaatccacaaagaacattcattttagtcggctgcggtggttggtgtttgatgaagcagacagaatcttggatttgggttttgaaaaggacatcacagtgatacttaatgctgtaaatgctgaatgccaaaaacgacagaatgtcttgctatcagcgacactcacagaaggtgtaacgcggctagctgatatcagtttgcatgatccagtcagtatttctgtcctggacaagagccatgaccagttgaacccaaaggacaaagcggtccaggaggtctgtcctccaccagctggcgacaagctggacagctttgcaataccagagagtctcaagcagcatgtgactgtggttcccagcaaactgaggcttgtctgcctagcggccttcatccttcagaaatgcaagtttgaggaagaccagaagatggttgtctttttctcaagttgcgagctggtggagttccactacagcctcttcctacagaccctgctgagcagctcaggggcgccggcatcagggcagttgccatctgcctccatgcgattaaaattcctacggctgcatggcggcatggagcaggaggaaagaacagcagtgtttcaggaattttcacattccagaagaggcgtccttctttgcacggatgttgcagctcggggcttagatctccctcaagtcacgtggattgttcagtacaacgctccatcttcacctgcagaatacatccaccggattggaagaaccgcccggattggctgccatgggagcagcctgctcattttggctccttcggaggcagaatatgtcaactcgttggcttctcacaaaatcaacgtttctgagattaagatggaagatattttgtgtgttctgacaagagatgattgttttaaagggaaacgatggggagcccagaaatcccatgctgttggcccccaggaaatccgagagcgagccacagtcttgcagacggtatttgaagattacgtgcactccagtgagaggagggtctcctgggcaaagaaagctctgcagtccttcatccaagcctacgccacctaccccagggagctgaagcacatcttccacgtccgatccctccaccttgggcatgtggcgaagagcttcggactaagagatgcccccaggaatcttagtgccttgactagaaagaagaggaaagcacacgtgaaaaggcctgaccttcataagaagacccagagtaaacacagcctcgctgaaatcctacgttcggaatactcaagcggcatggaggccgacgtcgccaaggtcaaaaagcaaaacgcacctggagagcctggtggccggcccctgcagcacagtctgcagccgacaccctgctttggccgtgggaaaacattaaaatggagaaaaacccaaaaaggtgtacagcgggacagcaagacttcccagaaagtttaaaatctctctgggtcttcgagtggaacctggaagccccgggtggcagtggattgatgtccagttcttgtcagaggagccttgtgaaaaataactgcgcctttgcctgaataccacgtccccaagaatcagaggggccacagcccttctcctccatgggaggccctggagcctgatagaaatcagtggtgtggggcactgtagagactagccagctcccgacggaaggggtctgtgtcttgtattgatcccatcagtgcccggcactcccttcacccaggtgctgacgtgccggggttgagctggcaccccgggatgtgatgtaagaacgccctgcgcgtcagcctggaacgggcttgattgctgcccttaactgtgttctgaagtttcacagcttggcttcagcctatcagcgcatacattggcatgaattttgtgaattagggtgttaaaaactggaattgaatttgtacaaaaagagaatatatttatcactaattattttcttaatgtaggaatgtaccgttaaaaaggaccaaaagtttttggtctgggtcaaaaaatacgaatgtgttctcaggctcgtggtccctcttattttcttctggaaacacgaggttgcatttacatgcattgctccctctttcatgtccactgaaaactcactctctcagggctaattgatttactgttggctttttattatttgcctttgaagtcaaaaggcaccagtatcccaagctttttttccctatcgaatcctgtcttgtcttcaagaaaggtctgggggtctttgtattgtgacccag

SEQ ID NO: 405721 - DNA, 557 bp, Homo sapiens
aaacaagagaaagtagacagatatatgttggtaaatgctaactgtccatattcacatagagacacagtgtaccctctgagcccaatatacagagaaaggaggaaaaaagctagaattctatgcactactacacaggggcctagcactctccagcctatcagcgcatacattggcatgaattttgtgaattagggtgttaaaaactggaattgaatttgtacaaaaagagaatatatttatcactaattattttcttaatgtaggaatgtaccgttaaaaaggaccaaaagtttttggtctgggtcaaaaaatacgaatgtgttctcaggctcgtggtccctcttattttcttctggaaacacgaggttgcatttacatgcattgctccctctttcatgtccactgaaaactcactctctcagggctaattgatttactgttggctttttattatttgcctttgaagtcaaaaggcaccagtatcccaagctttttttccctatcgaatcctgtcttgtcttcaagaaaggtctgggggtctttgtattgtgacccag

SEQ ID NO: 405722 - DNA, 448 bp, Homo sapiens
aggagtcccctacgtgctcgacaaaagaaactcagaggacttttaaggggaacgcacaaaaaatgttttctccaaagaagcattcggttagcacaagtgatagaaaccaggaggagagacagtgcattaagacttcatcactgtttaaaaacaaccctgacattccagaactccacagacctgtggtaaagcaggtgcaagaaaaagtgtttacttcagctgcttttcatgagctgggcctccacccacatttaatttccacaataaatacggtcttaaaaatgtctagtatgaccaggtaagaacttcaggctcctcttgatttcttaggcattacgtgggtataaccggacgaaacctgtgtgtgcaaggcagagcaaatttgtgtcttggcgttggaacacagtgccaggttatcgaccataaagggttgtcgtctcacttagct

SEQ ID NO: 405723 - DNA, 1343 bp, Homo sapiens
aaaaaaggacagcgagcggggagccccgaggacccccttttccctgcccagggattgagctccagagcctgttagggagctacccagacaggctttagttcctaaagtgctgaggaaacgcacggggcggtaaaggggaggctcgtcggtgagatggcgccggatctcgcttctcagaggcattcagagagcttccccagcgtgaactctcggccgaatgtaattttgccaggccgcgagggacgcagagaggggctgccaccaggcgggggcacgcgcggtagtcttgtccctacccgcccggtgccgccgtccccggctcccctcgggacgagtccgtacagctggagccgttccggacccggaaggggcggtggcgcagggtcctcgcgcgtcccacgtggggtcccgggcccagcagtctgcgcaccgggctcgctgctgcaccacgcgtcacccacgcagaccatggcagccgccgacggttcgctcttcgacaaccccaggacgttctccagacgtcccccagcccaggcgagtcggcaagcaaaggctacgaaaagaaaataccaagcgtccagtgaggctcccccagcgaaacggaggaacgaaacttcatttctcccagccaagaaaactagtgttaaagaaactcagaggacttttaaggggaacgcacaaaaaatgttttctccaaagaagcattcggttagcacaagtgatagaaaccaggaggagagacagtgcattaagacttcatcactgtttaaaaacaaccctgacattccagaactccacagacctgtggtaaagcaggtgcaagaaaaagtgtttacttcagctgcttttcatgagctgggcctccacccacatttaatttccacaataaatacggtcttaaaaatgtctagtatgaccagtgttcagaagcaaagtattcctgtgttgctggaaggcagagatgctctcgtgagatcccagacgggctcaggtaaaactcttgcctattgcatccctgtggtccagtcccttcaagcaatggagtcaaaaatacaggtattactgttatccacattttacgaagaagaacagaggcttaggaaagttaaataaccaaggccatgcagcaagtaatggaggaactggatttctacctcagttctgtttggctgcagagaccaagctccttactcttgtgtgaagacttacagtgaaggttaattcctggctcctgtgctatgtaggggccatgcatctgtgtcttccacagtacctaacgtgggaccttttacagaatggtcactcaataaaggtgatttggttttgcagctatccattcatgc

SEQ ID NO: 405724 - DNA, 1255 bp, Homo sapiens
tagaggaattggatgttccttctcctaggggaagtttggacatcatgcatttaagcacattcctgtaatggaaataagaagcaacaggcaagagatccctagtgctgtgtagcctgtaatccgcaatcaggcagagactcggggactcagagactcgaaaggcaagggaggtaggaagtaattgtggtagaggtgatggatggagcagcattctcatttggaatgggaacagggcgtaggaattttctccaggccgtctgaatctggaggagcagcttgagaggagagaatgagagagatccaggcgctagggtagaatggtaatgaatgtttccgcttcctgggcacgggctgagatgcgcattccccctcgcccctctctcctgtgcggtctccagtgtgctttgttggtggagagaaaagattcgttttcccccacccctcttttctccttgggtgaatgggttcctaggaatatggattgacacacccttcacaaggtggattcttgcttcccttaaaacagactccattagttaacattcaactggaaaaatgctgcttcttcatccttaccttatcttgattgatttaacagttaagaatggctggtgaggtctggtagatgagtgagctgagacttttttcttttttcttttctttaccttttggaagaagctgagtcaaagagtctgattgcaaaccctaaactgttgcttgacatatggggcataatgatctctgcagggagagatgcaattctgtgggcagtcaggcttcactccgagctctgttttcatggactaatgcatctcttgttgatctttccttctgggaacaacgcagcaagcaaaggctacgaaaagaaaataccaagcgtccagtgaggctcccccagcgaaacggaggaacgaaacttcatttctcccagccaagaaaactagtgttaaagaaactcagaggacttttaaggggaacgcacaaaaaatgttttctccaaagaagcattcggttagcacaagtgatagaaaccaggaggagagacagtgcattaagacttcatcactgtttaaaaacaaccctgacattccagaactccacaggtatgtccaggggcggatgcccttcaggaagaaaaaaatgtgttctgccttttctttgttaatattggcactgatgcctgggttcttgttcatcatttgcagagttccacatggctgggggaggtctcataatcatggcagaggacgaaaga

SEQ ID NO: 405725 - DNA, 1278 bp, Homo sapiens
tggagcttggagaccccggtcctgacagcttccctccccgctctcttttctttcagctctgcagtccttcatccaagcctacgccacctaccccagggagctgaagcacatcttccacgtccgatccctccaccttgggcatgtggcgaagagcttcggactaagagatgcccccaggaatcttagtgccttgactagaaagaagaggaaagcacacgtgaaaaggcctgaccttcataagaagacccagagtaaacacagcctcgctgaaatcctacgttcggaatactcaagcggcatggaggccgacgtcgccaaggtcaaaaagcaaaacgcacctggagagcctggtggccggcccctgcagcacagtctgcagccgacaccctgctttggccgtgggaaaacattaaaatggagaaaaacccaaaaaggtgtacagcgggacagcaagacttcccagaaagtttaaaatctctctgggtcttcgagtggaacctggaagccccgggtggcagtggattgatgtccagttcttgtcagaggagccttgtgaaaaataactgcgcctttgcctgaataccacgtccccaagaatcagaggggccacagcccttctcctccatgggaggccctggagcctgatagaaatcagtggtgtggggcactgtagagactagccagctcccgacggaaggggtctgtgtcttgtattgatcccatcagtgcccggcactcccttcacccaggtgctgacgtgccggggttgagctggcaccccgggatgtgatgtaagaacgccctgcgcgtcagcctggaacgggcttgattgctgcccttaactgtgttctgaagtttcacagcttggcttcagcctatcagcgcatacattggcatgaattttgtgaattagggtgttaaaaactggaattgaatttgtacaaaaagagaatatatttatcactaattattttcttaatgtaggaatgtaccgttaaaaaggaccaaaagtttttggtctgggtcaaaaaatacgaatgtgttctcaggctcgtggtccctcttattttcttctggaaacacgaggttgcatttacatgcattgctccctctttcatgtccactgaaaactcactctctcagggctaattgatttactgttggctttttattatttgcctttgaagtcaaaaggcaccagtatcccaagctttttttccctatcgaatcctgtcttgtcttcaagaaaggtctgggggtctttgtattgtgacccag

SEQ ID NO: 405726 - DNA, 234 bp, Homo sapiens
ttacccttgttggccctaggtggttactgtgtgattttactgttattaaatctattataaactgcttcattattcctgaccttgactctatctctcctttaatccttccgtcgccctctcagaaatcccatgctgttggcccccaggaaatccgagagcgagccacagtcttgcagacggtatttgaagattacgtgcactccagtgagaggagggtctcctgggcaaagaaag

SEQ ID NO: 405727 - DNA, 2409 bp, Homo sapiens
aaaaaaggacagcgagcggggagccccgaggacccccttttccctgcccagggattgagctccagagcctgttagggagctacccagacaggctttagttcctaaagtgctgaggaaacgcacggggcggtaaaggggaggctcgtcggtgagatggcgccggatctcgcttctcagaggcattcagagagcttccccagcgtgaactctcggccgaatgtaattttgccaggccgcgagggacgcagagaggggctgccaccaggcgggggcacgcgcggtagtcttgtccctacccgcccggtgccgccgtccccggctcccctcgggacgagtccgtacagctggagccgttccggacccggaaggggcggtggcgcagggtcctcgcgcgtcccacgtggggtcccgggcccagcagtctgcgcaccgggctcgctgctgcaccacgcgtcacccacgcagaccatggcagccgccgacggttcgctcttcgacaaccccaggacgttctccagacgtcccccagcccaggcgagtcggcaagcaaaggctacgaaaagaaaataccaagcgtccagtgaggctcccccagcgaaacggaggaacgaaacttcatttctcccagccaagaaaactagtgttaaagaaactcagaggacttttaaggggaacgcacaaaaaatgttttctccaaagaagcattcggttagcacaagtgatagaaaccaggaggagagacagtgcattaagacttcatcactgtttaaaaacaaccctgacattccagaactccacagacctgtggtaaagcaggtgcaagaaaaagtgtttacttcagctgcttttcatgagctgggcctccacccacatttaatttccacaataaatacggtcttaaaaatgtctagtatgaccagtgttcagaagcaaagtattcctgtgttgctggaaggcagagatgctctcgtgagatcccagacgggctcaggtaaaactcttgcctattgcatccctgtggtccagtcccttcaagcaatggagtcaaaaatacagcgcagtgatggcccctatgccctggtgctcgtgccaacgagagagctagctctacaaagctttgacactgtccagaaactgcttaagcctttcacctggattgtgcctggagtgttaatgggaggagagaagagaaaatcagaaaaggccagactccgcaaaggaataaatatccttatctcaactcctggacgcctggtggatcatataaaatccacaaagaacattcattttagtcggctgcggtggttggtgtttgatgaagcagacagaatcttggatttgggttttgaaaaggacatcacagtgatacttaatgctgtaaatgctgaatgccaaaaacgacagaatgtcttgctatcagcgacactcacagaaggtgtaacgcggctagctgatatcagtttgcatgatccagtcagtatttctgtcctggacaagagccatgaccagttgaacccaaaggacaaagcggtccaggaggtctgtcctccaccagctggcgacaagctggacagctttgcaataccagagagtctcaagcagcatgtgactgtggttcccagcaaactgaggcttgtctgcctagcggccttcatccttcagaaatgcaagtttgaggaagaccagaagatggttgtctttttctcaagttgcgagctggtggagttccactacagcctcttcctacagaccctgctgagcagctcaggggcgccggcatcagggcagttgccatctgcctccatgcgattaaaattcctacggctgcatggcggcatggagcaggaggaaagaacagcagtgtttcaggaattttcacattccagaagaggcgtccttctttgcacgtgaagaactcaccctaagccagaggaaaggaaccttgcttttaataccatcattatgttgacgagttgataagaagtaccaccgaatggccggaaaatggagtttctaagccacctgattttaaggctgacattaggttttctgttggtctccggtggctgtccttgattgtccctggatggagtgcagtcacctttttcccagaaaggaaagatacctgcagcccgccctgggcgccaactgtcccttggcatcctccttggctgtccggcgcgtgcatttctttttcagaagatgcacctaaatcacctgtgctgctttcctccaccttctccgtatttttttccgcttgaagcatactgttctgtctgtgcagttcttaatttcctctcctcctggggaatttccaccgtgccaggaggctaggagacaaaggagatacggctgtgaagagtcacaatgtcagttctgtgtcccaaataaatgtagactttcgtgctt

SEQ ID NO: 405728 - DNA, 3920 bp, Homo sapiens
tagaggaattggatgttccttctcctaggggaagtttggacatcatgcatttaagcacattcctgtaatggaaataagaagcaacaggcaagagatccctagtgctgtgtagcctgtaatccgcaatcaggcagagactcggggactcagagactcgaaaggcaagggaggtaggaagtaattgtggtagaggtgatggatggagcagcattctcatttggaatgggaacagggcgtaggaattttctccaggccgtctgaatctggaggagcagcttgagaggagagaatgagagagatccaggcgctagggtagaatggtaatgaatgtttccgcttcctgggcacgggctgagatgcgcattccccctcgcccctctctcctgtgcggtctccagtgtgctttgttggtggagagaaaagattcgttttcccccacccctcttttctccttgggtgaatgggttcctaggaatatggattgacacacccttcacaaggtggattcttgcttcccttaaaacagactccattagttaacattcaactggaaaaatgctgcttcttcatccttaccttatcttgattgatttaacagttaagaatggctggtgaggtctggtagatgagtgagctgagacttttttcttttttcttttctttaccttttggaagaagctgagtcaaagagtctgattgcaaaccctaaactgttgcttgacatatggggcataatgatctctgcagggagagatgcaattctgtgggcagtcaggcttcactccgagctctgttttcatggactaatgcatctcttgttgatctttccttctgggaacaacgcagcaagcaaaggctacgaaaagaaaataccaagcgtccagtgaggctcccccagcgaaacggaggaacgaaacttcatttctcccagccaagaaaactagtgttaaagaaactcagaggacttttaaggggaacgcacaaaaaatgttttctccaaagaagcattcggttagcacaagtgatagaaaccaggaggagagacagtgcattaagacttcatcactgtttaaaaacaaccctgacattccagaactccacaggtatgtccaggggcggatgcccttcaggaagaaaaaaatgtgttctgccttttctttgttaatattggcactgatgcctgggttcttgttcatcatttgcagacctgtggtaaagcaggtgcaagaaaaagtgtttacttcagctgcttttcatgagctgggcctccacccacatttaatttccacaataaatacggtcttaaaaatgtctagtatgaccagtgttcagaagcaaagtattcctgtgttgctggaaggcagagatgctctcgtgagatcccagacgggctcaggtaaaactcttgcctattgcatccctgtggtccagtcccttcaagcaatggagtcaaaaatacagcgcagtgatggcccctatgccctggtgctcgtgccaacgagagagctagctctacaaagctttgacactgtccagaaactgcttaagcctttcacctggattgtgcctggagtgttaatgggaggagagaagagaaaatcagaaaaggccagactccgcaaaggaataaatatccttatctcaactcctggacgcctggtggatcatataaaatccacaaagaacattcattttagtcggctgcggtggttggtgtttgatgaagcagacagaatcttggatttgggttttgaaaaggacatcacagtgatacttaatgctgtaaatgctgaatgccaaaaacgacagaatgtcttgctatcagcgacactcacagaaggtgtaacgcggctagctgatatcagtttgcatgatccagtcagtatttctgtcctggacaagagccatgaccagttgaacccaaaggacaaagcggtccaggaggtctgtcctccaccagctggcgacaagctggacagctttgcaataccagagagtctcaagcagcatgtgactgtggttcccagcaaactgaggcttgtctgcctagcggccttcatccttcagaaatgcaagtttgaggaagaccagaagatggttgtctttttctcaagttgcgagctggtggagttccactacagcctcttcctacagaccctgctgagcagctcaggggcgccggcatcagggcagttgccatctgcctccatgcgattaaaattcctacggctgcatggcggcatggagcaggaggaaagaacagcagtgtttcaggaattttcacattccagaagaggcgtccttctttgcacggatgttgcagctcggggcttagatctccctcaagtcacgtggattgttcagtacaacgctccatcttcacctgcagaatacatccaccggattggaagaaccgcccggattggctgccatgggagcagcctgctcattttggctccttcggaggcagaatatgtcaactcgttggcttctcacaaaatcaacgtttctgagattaagatggaagatattttgtgtgttctgacaagagatgattgttttaaagggaaacgatggggagcccagaaatcccatgctgttggcccccaggaaatccgagagcgagccacagtcttgcagacggtatttgaagattacgtgcactccagtgagaggagggtctcctgggcaaagaaagctctgcagtccttcatccaagcctacgccacctaccccagggagctgaagcacatcttccacgtccgatccctccaccttgggcatgtggcgaagagcttcggactaagagatgcccccaggaatcttagtgccttgactagaaagaagaggaaagcacacgtgaaaaggcctgaccttcataagaagacccagagtaaacacagcctcgctgaaatcctacgttcggaatactcaagcggcatggaggccgacgtcgccaaggtcaaaaagcaaaacgcacctggagagcctggtggccggcccctgcagcacagtctgcagccgacaccctgctttggccgtgggaaaacattaaaatggagaaaaacccaaaaaggtgtacagcgggacagcaagacttcccagaaagtttaaaatctctctgggtcttcgagtggaacctggaagccccgggtggcagtggattgatgtccagttcttgtcagaggagccttgtgaaaaataactgcgcctttgcctgaataccacgtccccaagaatcagaggggccacagcccttctcctccatgggaggccctggagcctgatagaaatcagtggtgtggggcactgtagagactagccagctcccgacggaaggggtctgtgtcttgtattgatcccatcagtgcccggcactcccttcacccaggtgctgacgtgccggggttgagctggcaccccgggatgtgatgtaagaacgccctgcgcgtcagcctggaacgggcttgattgctgcccttaactgtgttctgaagtttcacagcttggcttcagcctatcagcgcatacattggcatgaattttgtgaattagggtgttaaaaactggaattgaatttgtacaaaaagagaatatatttatcactaattattttcttaatgtaggaatgtaccgttaaaaaggaccaaaagtttttggtctgggtcaaaaaatacgaatgtgttctcaggctcgtggtccctcttattttcttctggaaacacgaggttgcatttacatgcattgctccctctttcatgtccactgaaaactcactctctcagggctaattgatttactgttggctttttattatttgcctttgaagtcaaaaggcaccagtatcccaagctttttttccctatcgaatcctgtcttgtcttcaagaaaggtctgggggtctttgtattgtgacccag

SEQ ID NO: 405729 - DNA, 853 bp, Homo sapiens
  misc_feature (837)..(838): n is a, c, g, or t
gctgcctcctctgactgtggtggagcagctcagcaggataataagcttactcgcctgaccttgggtctctctctcatcctttctcttggctaaccttcattttggtgccaaaacccaggaaggggataggctctggctgggcgtccttagaggattctctctctctctctcctatcatcccttacccagccaacctccccttcccgaacctgctaaagaccctaaggatctcccaaaattctcccattgttggccacctcatccaccatcaaagcctctgagagggtttttacagggccgtgttagagccttcacccatggaacagtacaagacatgatgctactccgagaataccgacagctccaggaacagcagtccctactacccagcctctccccccaaccatcgcccctattcagcaagaagcagccagaggacaacggcgcccctcttctattacctattaaaaggctggaatgttaggaacaagttgcaccagaacccctccccaccccaatgcagctgtcccttaccctgaatactctgcagctgcattcctggacccttatctaggcgctacagcaaggtcaccagacttgctttaaccctacgggcagcatgggggaggtcacgagaaacgtggataaacctaagttacaccctcttgtaaattcctatattgtaacctggtcacgagatgatatgtggtaaggttaaccaacaaacaaccccagggtctctctcccccatataaaaccctcattttgtaagctcagggctgcctcctttgactgtggtgaagcagcctggcaggttagtaaacttactctcctgannttgggtctctctctc

SEQ ID NO: 405730 - DNA, 398 bp, Homo sapiens
  misc_feature (50)..(50): n is a, c, g, or t
  misc_feature (398)..(398): n is a, c, g, or t
cgtatacccccccccccgcacggttttaactccccgctaactccagaggncttaggccccgagaatggcgtgtggggtgaacccgggaggcggagcttgcagtgagcagagatgatgccactgcactccagcctgggcgacagagcaagactccatctccaaaaaaaaaaaaaaaaaagctgctgaaatcaggcagcgcctttcagattcccggcccaggtgatttcgtaactcctgggcaccctggctactgcccttcctaggccctgccattaccctcttcctccatttagcacttggcccatgtctcttacatctccttacccagtttttacagggccgtgttagagccttcacccatggaacagtacaacctgccgtgggggatgcgctctagn

SEQ ID NO: 405731 - DNA, 8465 bp, Homo sapiens
  misc_feature (6693)..(6694): n is a, c, g, or t
gctgcctcctctgactgtggtggagcagctcagcaggataataagcttactcgcctgaccttgggtctctctctcatcctttctcttggctaaccttcattttggtgccaaaacccaggaaggggataggctctggctgggcgtccttagaggattctctctctctctctcctatcatcccttacccagccaacctccccttcccgaacctgctaaagaccctaaggatctcccaaaattctcccattgttggccacctcatccaccatcaaagcctctgagaggggtgagtaagagagacttttgcctattacctggaacccttgaccatctcttcactcccaaaagacccagcgctgggccaagggcttcctctggcctccaggcctctggttcctctgtttcctggacgcctgactccgcagctacctcctctattccatacaaggcctgcaagacaggcgccgccctctctcgtctttgtcgtctgtggtcccttcttcctctaccctcacctcctccattcactatgggagcctctcagtctacccctcccaagaccaccccccttgggtgtctcctccgcaatcgcaaggctctcggcctccgttcagggatccgttctaagaggcttatcttttactgcaatactgcatggcctcaataccaattggacaatggctcccaatggcccgaaaatggcactttcgatttcaatatacttagagacttagacaacttttgccatcgcaatgagaaatggtctgagattccttatattcaggctttcttcattctccgtaaccacccttctctctgccactcctgctctactttccaaatcctactcaccagctcaaaacctgactcatctcccgtcaccccacccacagacccagccgatgactcctcttcctttgaccccgtggattttctccctcctcgacagcatcatgatcctccaccagagcatcatgatcctccaccgtatgtccctgctccggctctacccctctcccccactctctccaaccaacccacttctgactctgagtcctctctgcctcctcccctcacccgctctcgggcccaatgtgctcagcaaccagctcccttgcttcctctccgggaagtagcgggagttgaggggatcgtccatgtccacgtccctttctccttctacgatctcttacagattgaagaacgtctcgggtccttctcctccgatcctgatacttacatcaaagaatttaaatatcttactcaatcttatgaactcacttggcatgatctctactttatcctctcttctaccctccttccagaagagaaggaaagagtgtggctcgcagcacaggcatatgccgatgaccttcatcagcaggatcctactaagcccgtaggagctgctgctgttccctgggaagagccttcctgggaataccaacccacagaacctggccaagtgtactgtagccatatgattacttgcctcattgcaggccttaacaaagctgcccataggctgtaaattttgaaaaacttaaagacatttcccaaaaggcagatgaaaatcctgcccaatctctttcccgccttacagaagctctccaaaaatatacccgcatcgaccctgcctcctgagaaggaactattgttctttctttaaaaaattttatttattttttaattattattatactttaagttttagggtacatgtgcacaatgtgcaggtttgttacatatgtaggaactattgttcttaatacccattttatttcccaatctgcccctgacatccggcacaaacttaaaaaggctgaagatggctctcaaaccccacaacaagacctccttaacctggctttcaaagtctttaataacagggacgagcaaaataaattagataaagcccaaagagatcgtgctaaataccagcttccagcagtggctatctgtcagtctagccatagtacccaagggcacaaaagacctgatagcagcaaacctcctgggccttgttttaagtgcggcaaagaaggccactggacgggggcatgtccccacccatgagtgccgaagagcccttgcctagtctgccagcagatgggcactggaagtctgactgtcctctcaacagatgggcagacaagcatgctcctcagagccaccatcccttcaacaagacaaaaagtgaagaatcacttgcactcccatagctccttggcctagccactgaagactgatgaggccagggcccctgggccccggctcccggcccccactgccatcactgcatcggagcccagggtaactctactagtagcaggtaagctgatctcttttttaattgatagtggggccacctactcagctttgcctgagttctcaggacccactcatccctctcaagtctcagttgtgggggttgacggactcatctcttgtccgcttgccaccagacctcttacttgttccctgtttgatgccattttctcacactctttccttatcatgcctcattgccccacccccattctaggctgagaccttttagccaaagtcaaagcttctatcaccttttcttgcccccttcaaccagagtcccctcctgctcctctccgctagtccggcccctgacccctttccccagtacccacttcctgcctctctcattaacccttccgtagctgctcaccatgaccccatcagaatccagttaaaagactcttccaaatttcccaacgttcctcaataccccatctctctaacccaccaaaagggcctacagcccatcgtaaacaagctctgctcatgcagtcttcttagaccaacacactctccatataacacccctatcctccctgttaaaaagtctgatggctcataccgactcgttcacaacctccaagccatcagtcaagctgtcctccctattcatcccatagtccataacccctatccacttctctctctcgtcgctaccaacaccaccctctacactgcaattgacctgaaggatgccttctttaccatttccctacaccctgattcccaaaacctatttgctttcacctggactgaccctgacaccctccagtcacaacaactcacatggactgtcctccctcagggcttcagggatagccctcatttctttggacaagctctagcccgaaacctcacttccttaaacctgtctcccagtcatcttcaatatgtggacgaccttcttctttgcagcccctctctaaaagactctcaaactcacacggccactgctctcttaaactttctcgctatcaaagggtatagggtctccccctccaaggcccaactctccatctccatgatgacttacttaggaattcaactttcccctggggcccaggctatgactccagccagggcagcattaatagaaaatctacccccaccctcctccaaaagcgaaatcctttccttcccagggctagcaggcttctttagaatatggatttccaactttgccctcctagctcatcccctctatgaagtggccaaaggccctcccaatgaacccctaaacccctcacataacatactccccagcttccacaaactccaaactgctcttgtcactgcgtcagctccgtccttacctgatatctcccaacctttcactctctatactgctgaaagctgaggaatagccctcggtgtcttaggacaacagaaaggaaatcctccttcctttgcccctgtagcttacctctctaaacaactagataacacagtcaaagggtggccagcctgctttaaagcactagaagtggtagccagcttagctctagaaagcaggaaactaactttcagccagaataccaccgtccacagttctcataatctacaagatctcctctcctcccaagcagtaagctcccttcctccttccaggattcaattactccatgccctctttataaaaaatcccaaattcagtcttaccagaagtgcttccctcaacccagcatccttactccccgtatcctcttcccttcctactcattcttccactgatatcctggaccacgtacagccacatttcccaaacatttcctccgagcctctcaccaaccccgatgatcaactattcatagatggctcctcttccaggcccaccagctaccccccagattgctggatatgcagttgtttcccttgaccaagtaattgaagccaggatcctcctcccaaaaagcagaactcatagctctcaccagggccctaaatctttccaaaggcaaacgagtcaacatttatacagactccaaatatgcctatcacattcctcgttcccacgctgctatctggcaaaagagaggactccttactgccaaaggaacccctatcactaatggccaccttatttactaactccttcaggccacacacctcccagctaaagcaggagttatacactgttgaggacatcgaacaggttcagatgaaatctcgaggcaacagaaaggccgatgaggcagcaaaagaagcctccctttcttctgcctctgcccctctccttcctgttatcccagcaatcctacccaagaactctcccaccgagaaagctttgctatacagcaaggagcctcctttcaaggggactggatagtcaaaaatcaaaagctcgtcctcccctaagagcagaccaaagaaattctgacatctcttcaccaatccttccatatcagtgtgcgcccccatacctactccttcaccctatttctcctccccccatctattcacctcactaagagacataacctcaaactgtcctatatgctctgttacttcctcccaaggggccctccactctccctccatccctacacatcccctcagaggaacactcccaggggaggactggcaaatagacttcacccacattcatcccgtcaagaggacaaaatttattcttactcttatagacaccttctctaggtgggtagaagcatttcctacctcttcagaaaaggccgcagaagtctcccaaattcttgtaacagaaatcatccctacatttggtctccctggctccatacaatcagacaatggcccctagcttcatctcccaaatcactcaacaggtttctcagtcccttggcatccagtggcgtctccatatcccatgctggccccagacatccggaaaagtcgaaagggcaaatgggatccttaaggctcagttaaccaaactcactcttgaagtccaaaaaccatggacctcccttttgcccatagcactggagagcattagagccagtccaaaagcaccctccttcctcagtccatttgagttaatatacggacgccctttcctcttacaaaacaggcccccttctaactctcagctaggagaatacctcccaacagtctccctcatgagctatctcctctgccaacaagccgaccaggccctcccaaaaccccacgaaggggtctccaatcccaaatagacttgctctccaattccaaaagactctttaagcagcagtgacacttcaaaaccatcgaggtttagatctcctcactgccgagaaaggcggcctgtgtatctttttagaagaggagtgctgtttctatactaaccagtcaggactagtacaagatgctgctggacgaataaatgaaaaagcttctggccgggtgcagtggctcacgcctgtaatcccagatctttgggaggctgaggcgggcggatcacgaggtcaggagatcgagaccatcttggctaacacggtgaaaccccgtctctactaaaaatagaaaaaattagccgggcgtggtggccggcagctgtactcccagctactcaggaggctgaggcaggagaatggcgtgtggggtgaacccgggaggcggagcttgcagtgagcagagatgatgccactgcactccagcctgggcgacagagcaagactccatctccaaaaaaaaaaaaaaaaaagctgctgaaatcaggcagcgcctttcagattcccggcccaggtgatttcgtaactcctgggcaccctggctactgcccttcctaggccctgccattaccctcttcctccatttagcacttggcccatgtctcttacatctccttacccagtttttacagggccgtgttagagccttcacccatggaacagtacaagacatgatgctactccgagaataccgacagctccaggaacagcagtccctactacccagcctctccccccaaccatcgcccctattcagcaagaagcagccagaggacaacggcgcccctcttctattacctattaaaaggctggaatgttaggaacaagttgcaccagaacccctccccaccccaatgcagctgtcccttaccctgaatactctgcagctgcattcctggacccttatctaggcgctacagcaaggtcaccagacttgctttaaccctacgggcagcatgggggaggtcacgagaaacgtggataaacctaagttacaccctcttgtaaattcctatattgtaacctggtcacgagatgatatgtggtaaggttaaccaacaaacaaccccagggtctctctcccccatataaaaccctcattttgtaagctcagggctgcctcctttgactgtggtgaagcagcctggcaggttagtaaacttactctcctgannttgggtctctctctcgtcctttctctcggctaaccttacagcgccctcatccattctccaattataatgtgtttacacctttcctcctgcatgtctcacattttaccttgtcatcctcttacttgtgtatgtgtctatgcctcccagcatttgacagtacctgaaggtcaaagcctatctgctgtttacccttacaattctattcactcggcacgcactaggcacagaataaatgccattcatccctacttttacttcagggtacattttagagatctaagatttggtgtatctttcccattatccattcttattgcctcaaggctctcctcttataaatctagtggtatgcattactttgggggtaaggacaaatttatccagaacagagaagatttagttcagtctttagttttaaaataagcatttttaagtaatagcagagacaaaagtctgaaagccaacatagttttaatttaaaagaaatttgattttgctacagctttttggccaggagtaagtgaggatgctgtttcgaaagctggtcttgcatcttaagcagtacggtgtgggtcttaggggctggagtgtatcttgcaggaaacacagagtaggcaagaatgtgaggtggtgtaagactagtttgtctggttcaaaaagtaaaaaagaagactgaaaaaagtaggaaatctaacccaaagcaatcaatctttgagaagagcccagcacacttcccttccaattgatttgtcctacacccctccatgagcctaagcattagagcagaaatgactgagggtagcatccaagccactgggccaaggggcactggtacgatgaggataccgtgtcccacaattccagggtagtctgggaaaaacaaagcagagttcctgagaagaatgcagtagtggctgacagaaccagaaagggtgttgtagtgatatgtggccatgacatcagaagactaaaatgaggctatggatattccctagcaaatgtcttgggaacagaggccaaagccgaaagctcaagaattaatggaatgactacacctcaacgaaggttatagattagtgaggactgatgagtacaaaccagactcacacatccatcctcatcctcactccccacccccaggctacaatattacatatatgtcccctactcctgagggatggaaaagaggatgggtaggataagttcaaactgctttaatggctaacaaaattcacctttattcctttttatttttagttgacatgtaaaaattgtacatatttattggctacagagtgatattttgatacaagtataaagtgtgtaatgatcaaatcagagtaattagcacatcaatcacctcaaatagttatcacttatttgtactgggaacactcgaaatccttttctagctttgaaaaaatatacaataaattattgttaactgtattcaccacatagcactatagaacagtagaacagaatttattcctcctatattgctgtaatttgtatctgttaattaacctctccctagcctcccctccccctacccttcccaatctctcataaccacaattctactctctagatctatgagctcattttttaagtccctgcatttgagtgagaagatgaagtatttatctttctgcgcatgacttgctttgcttaacataatatcctccagattcatccacgttggtgcaaatggaaggattccatactttattttatgggtgattattgttccattgtgtgtataccatat

SEQ ID NO: 405732 - DNA, 8496 bp, Homo sapiens
  misc_feature (6724)..(6725): n is a, c, g, or t
gctgcctcctctgactgtggtggagcagctcagcaggataataagcttactcgcctgaccttgggtctctctctcatcctttctcttggctaaccttcattttggtgccaaaacccaggaaggggataggctctggctgggcgtccttagaggattctctctctctctctcctatcatcccttacccagccaacctccccttcccgaacctgctaaagaccctaaggatctcccaaaattctcccattgttggccacctcatccaccatcaaagcctctgagaggggtgagtaagagagacttttgcctattacctggaacccttgaccatctcttcactcccaaaagacccagcgctgggccaagggcttcctctggcctccaggcctctggttcctctgtttcctggacgcctgactccgcagctacctcctctattccatacaaggcctgcaagacaggcgccgccctctctcgtctttgtcgtctgtggtcccttcttcctctaccctcacctcctccattcactatgggagcctctcagtctacccctcccaagaccaccccccttgggtgtctcctccgcaatcgcaaggctctcggcctccgttcagggatccgttctaagaggcttatcttttactgcaatactgcatggcctcaataccaattggacaatggctcccaatggcccgaaaatggcactttcgatttcaatatacttagagacttagacaacttttgccatcgcaatgagaaatggtctgagattccttatattcaggctttcttcattctccgtaaccacccttctctctgccactcctgctctactttccaaatcctactcaccagctcaaaacctgactcatctcccgtcaccccacccacagacccagccgatgactcctcttcctttgaccccgtggattttctccctcctcgacagcatcatgatcctccaccagagcatcatgatcctccaccgtatgtccctgctccggctctacccctctcccccactctctccaaccaacccacttctgactctgagtcctctctgcctcctcccctcacccgctctcgggcccaatgtgctcagcaaccagctcccttgcttcctctccgggaagtagcgggagttgaggggatcgtccatgtccacgtccctttctccttctacgatctcttacagattgaagaacgtctcgggtccttctcctccgatcctgatacttacatcaaagaatttaaatatcttactcaatcttatgaactcacttggcatgatctctactttatcctctcttctaccctccttccagaagagaaggaaagagtgtggctcgcagcacaggcatatgccgatgaccttcatcagcaggatcctactaagcccgtaggagctgctgctgttccctgggaagagccttcctgggaataccaacccacagaacctggccaagtgtactgtagccatatgattacttgcctcattgcaggccttaacaaagctgcccataggctgtaaattttgaaaaacttaaagacatttcccaaaaggcagatgaaaatcctgcccaatctctttcccgccttacagaagctctccaaaaatatacccgcatcgaccctgcctcctgagaaggaactattgttctttctttaaaaaattttatttattttttaattattattatactttaagttttagggtacatgtgcacaatgtgcaggtttgttacatatgtaggaactattgttcttaatacccattttatttcccaatctgcccctgacatccggcacaaacttaaaaaggctgaagatggctctcaaaccccacaacaagacctccttaacctggctttcaaagtctttaataacagggacgagcaaaataaattagataaagcccaaagagatcgtgctaaataccagcttccagcagtggctatctgtcagtctagccatagtacccaagggcacaaaagacctgatagcagcaaacctcctgggccttgttttaagtgcggcaaagaaggccactggacgggggcatgtccccacccatgagtgccgaagagcccttgcctagtctgccagcagatgggcactggaagtctgactgtcctctcaacagatgggcagacaagcatgctcctcagagccaccatcccttcaacaagacaaaaagtgaagaatcacttgcactcccatagctccttggcctagccactgaagactgatgaggccagggcccctgggccccggctcccggcccccactgccatcactgcatcggagcccagggtaactctactagtagcaggtaagctgatctcttttttaattgatagtggggccacctactcagctttgcctgagttctcaggacccactcatccctctcaagtctcagttgtgggggttgacggactcatctcttgtccgcttgccaccagacctcttacttgttccctgtttgatgccattttctcacactctttccttatcatgcctcattgccccacccccattctaggctgagaccttttagccaaagtcaaagcttctatcaccttttcttgcccccttcaaccagagtcccctcctgctcctctccgctagtccggcccctgacccctttccccagtacccacttcctgcctctctcattaacccttccgtagctgctcaccatgaccccatcagaatccagttaaaagactcttccaaatttcccaacgttcctcaataccccatctctctaacccaccaaaagggcctacagcccatcgtaaacaagctctgctcatgcagtcttcttagaccaacacactctccatataacacccctatcctccctgttaaaaagtctgatggctcataccgactcgttcacaacctccaagccatcagtcaagctgtcctccctattcatcccatagtccataacccctatccacttctctctctcgtcgctaccaacaccaccctctacactgcaattgacctgaaggatgccttctttaccatttccctacaccctgattcccaaaacctatttgctttcacctggactgaccctgacaccctccagtcacaacaactcacatggactgtcctccctcagggcttcagggatagccctcatttctttggacaagctctagcccgaaacctcacttccttaaacctgtctcccagtcatcttcaatatgtggacgaccttcttctttgcagcccctctctaaaagactctcaaactcacacggccactgctctcttaaactttctcgctatcaaagggtatagggtctccccctccaaggcccaactctccatctccatgatgacttacttaggaattcaactttcccctggggcccaggctatgactccagccagggcagcattaatagaaaatctacccccaccctcctccaaaagcgaaatcctttccttcccagggctagcaggcttctttagaatatggatttccaactttgccctcctagctcatcccctctatgaagtggccaaaggccctcccaatgaacccctaaacccctcacataacatactccccagcttccacaaactccaaactgctcttgtcactgcgtcagctccgtccttacctgatatctcccaacctttcactctctatactgctgaaagctgaggaatagccctcggtgtcttaggacaacagaaaggaaatcctccttcctttgcccctgtagcttacctctctaaacaactagataacacagtcaaagggtggccagcctgctttaaagcactagaagtggtagccagcttagctctagaaagcaggaaactaactttcagccagaataccaccgtccacagttctcataatctacaagatctcctctcctcccaagcagtaagctcccttcctccttccaggattcaattactccatgccctctttataaaaaatcccaaattcagtcttaccagaagtgcttccctcaacccagcatccttactccccgtatcctcttcccttcctactcattcttccactgatatcctggaccacgtacagccacatttcccaaacatttcctccgagcctctcaccaaccccgatgatcaactattcatagatggctcctcttccaggcccaccagctaccccccagattgctggatatgcagttgtttcccttgaccaagtaattgaagccaggatcctcctcccaaaaagcagaactcatagctctcaccagggccctaaatctttccaaaggcaaacgagtcaacatttatacagactccaaatatgcctatcacattcctcgttcccacgctgctatctggcaaaagagaggactccttactgccaaaggaacccctatcactaatggccaccttatttactaactccttcaggccacacacctcccagctaaagcaggagttatacactgttgaggacatcgaacaggttcagatgaaatctcgaggcaacagaaaggccgatgaggcagcaaaagaagcctccctttcttctgcctctgcccctctccttcctgttatcccagcaatcctacccaagaactctcccaccgagaaagctttgctatacagcaaggagcctcctttcaaggggactggatagtcaaaaatcaaaagctcgtcctcccctaagagcagaccaaagaaattctgacatctcttcaccaatccttccatatcagtgtgcgcccccatacctactccttcaccctatttctcctccccccatctattcacctcactaagagacataacctcaaactgtcctatatgctctgttacttcctcccaaggggccctccactctccctccatccctacacatcccctcagaggaacactcccaggggaggactggcaaatagacttcacccacattcatcccgtcaagaggacaaaatttattcttactcttatagacaccttctctaggtgggtagaagcatttcctacctcttcagaaaaggccgcagaagtctcccaaattcttgtaacagaaatcatccctacatttggtctccctggctccatacaatcagacaatggcccctagcttcatctcccaaatcactcaacaggtttctcagtcccttggcatccagtggcgtctccatatcccatgctggccccagacatccggaaaagtcgaaagggcaaatgggatccttaaggctcagttaaccaaactcactcttgaagtccaaaaaccatggacctcccttttgcccatagcactggagagcattagagccagtccaaaagcaccctccttcctcagtccatttgagttaatatacggacgccctttcctcttacaaaacaggcccccttctaactctcagctaggagaatacctcccaacagtctccctcatgagctatctcctctgccaacaagccgaccaggccctcccaaaaccccacgaaggggtctccaatcccaaatagacttgctctccaattccaaaagactctttaagcagcagtgacacttcaaaaccatcgaggtttagatctcctcactgccgagaaaggcggcctgtgtatctttttagaagaggagtgctgtttctatactaaccagtcaggactagtacaagatgctgctggacgaataaatgaaaaagcttctggccgggtgcagtggctcacgcctgtaatcccagatctttgggaggctgaggcgggcggatcacgaggtcaggagatcgagaccatcttggctaacacggtgaaaccccgtctctactaaaaatagaaaaaattagccgggcgtggtggccggcagctgtactcccagctactcaggaggctgaggcaggagaatggcgtgtggggtgaacccgggaggcggagcttgcagtgagcagagatgatgccactgcactccagcctgggcgacagagcaagactccatctccaaaaaaaaaaaaaaaaaagctgctgaaatcaggcagcgcctttcagattcccggcccaggtgatttcgtaactcctgggcaccctggctactgcccttcctaggccctgccattaccctcttcctccatttagcacttggcccatgtctcttacatctccttacccagtttttacagggccgtgttagagccttcacccatggaacagtacaagacatgatgctactccgagaataccgacagctccaggaacagcagtccctactacccagcctctccccccaaccatcgcccctattcagcaagaagcagccagaggacaacggcgcccctcttctattacctattaaaaggctggaatgttaggaacaagttgcaccagaacccctccccctccccccccgcccccgacccccccccccccaccccaatgcagctgtcccttaccctgaatactctgcagctgcattcctggacccttatctaggcgctacagcaaggtcaccagacttgctttaaccctacgggcagcatgggggaggtcacgagaaacgtggataaacctaagttacaccctcttgtaaattcctatattgtaacctggtcacgagatgatatgtggtaaggttaaccaacaaacaaccccagggtctctctcccccatataaaaccctcattttgtaagctcagggctgcctcctttgactgtggtgaagcagcctggcaggttagtaaacttactctcctgannttgggtctctctctcgtcctttctctcggctaaccttacagcgccctcatccattctccaattataatgtgtttacacctttcctcctgcatgtctcacattttaccttgtcatcctcttacttgtgtatgtgtctatgcctcccagcatttgacagtacctgaaggtcaaagcctatctgctgtttacccttacaattctattcactcggcacgcactaggcacagaataaatgccattcatccctacttttacttcagggtacattttagagatctaagatttggtgtatctttcccattatccattcttattgcctcaaggctctcctcttataaatctagtggtatgcattactttgggggtaaggacaaatttatccagaacagagaagatttagttcagtctttagttttaaaataagcatttttaagtaatagcagagacaaaagtctgaaagccaacatagttttaatttaaaagaaatttgattttgctacagctttttggccaggagtaagtgaggatgctgtttcgaaagctggtcttgcatcttaagcagtacggtgtgggtcttaggggctggagtgtatcttgcaggaaacacagagtaggcaagaatgtgaggtggtgtaagactagtttgtctggttcaaaaagtaaaaaagaagactgaaaaaagtaggaaatctaacccaaagcaatcaatctttgagaagagcccagcacacttcccttccaattgatttgtcctacacccctccatgagcctaagcattagagcagaaatgactgagggtagcatccaagccactgggccaaggggcactggtacgatgaggataccgtgtcccacaattccagggtagtctgggaaaaacaaagcagagttcctgagaagaatgcagtagtggctgacagaaccagaaagggtgttgtagtgatatgtggccatgacatcagaagactaaaatgaggctatggatattccctagcaaatgtcttgggaacagaggccaaagccgaaagctcaagaattaatggaatgactacacctcaacgaaggttatagattagtgaggactgatgagtacaaaccagactcacacatccatcctcatcctcactccccacccccaggctacaatattacatatatgtcccctactcctgagggatggaaaagaggatgggtaggataagttcaaactgctttaatggctaacaaaattcacctttattcctttttatttttagttgacatgtaaaaattgtacatatttattggctacagagtgatattttgatacaagtataaagtgtgtaatgatcaaatcagagtaattagcacatcaatcacctcaaatagttatcacttatttgtactgggaacactcgaaatccttttctagctttgaaaaaatatacaataaattattgttaactgtattcaccacatagcactatagaacagtagaacagaatttattcctcctatattgctgtaatttgtatctgttaattaacctctccctagcctcccctccccctacccttcccaatctctcataaccacaattctactctctagatctatgagctcattttttaagtccctgcatttgagtgagaagatgaagtatttatctttctgcgcatgacttgctttgcttaacataatatcctccagattcatccacgttggtgcaaatggaaggattccatactttattttatgggtgattattgttccattgtgtgtataccatat

SEQ ID NO: 405733 - DNA, 8099 bp, Homo sapiens
  misc_feature (6327)..(6328): n is a, c, g, or t
tgtctcagtttcgggacgtcccgaaactgagacatgtctcagtttcgggacggcagcaggagggtggagtctccgaggagatgaagggcccacaggcgccgccctctctcgtctttgtcgtctgtggtcccttcttcctctaccctcacctcctccattcactatgggagcctctcagtctacccctcccaagaccaccccccttgggtgtctcctccgcaatcgcaaggctctcggcctccgttcagggatccgttctaagaggcttatcttttactgcaatactgcatggcctcaataccaattggacaatggctcccaatggcccgaaaatggcactttcgatttcaatatacttagagacttagacaacttttgccatcgcaatgagaaatggtctgagattccttatattcaggctttcttcattctccgtaaccacccttctctctgccactcctgctctactttccaaatcctactcaccagctcaaaacctgactcatctcccgtcaccccacccacagacccagccgatgactcctcttcctttgaccccgtggattttctccctcctcgacagcatcatgatcctccaccagagcatcatgatcctccaccgtatgtccctgctccggctctacccctctcccccactctctccaaccaacccacttctgactctgagtcctctctgcctcctcccctcacccgctctcgggcccaatgtgctcagcaaccagctcccttgcttcctctccgggaagtagcgggagttgaggggatcgtccatgtccacgtccctttctccttctacgatctcttacagattgaagaacgtctcgggtccttctcctccgatcctgatacttacatcaaagaatttaaatatcttactcaatcttatgaactcacttggcatgatctctactttatcctctcttctaccctccttccagaagagaaggaaagagtgtggctcgcagcacaggcatatgccgatgaccttcatcagcaggatcctactaagcccgtaggagctgctgctgttccctgggaagagccttcctgggaataccaacccacagaacctggccaagtgtactgtagccatatgattacttgcctcattgcaggccttaacaaagctgcccataggctgtaaattttgaaaaacttaaagacatttcccaaaaggcagatgaaaatcctgcccaatctctttcccgccttacagaagctctccaaaaatatacccgcatcgaccctgcctcctgagaaggaactattgttctttctttaaaaaattttatttattttttaattattattatactttaagttttagggtacatgtgcacaatgtgcaggtttgttacatatgtaggaactattgttcttaatacccattttatttcccaatctgcccctgacatccggcacaaacttaaaaaggctgaagatggctctcaaaccccacaacaagacctccttaacctggctttcaaagtctttaataacagggacgagcaaaataaattagataaagcccaaagagatcgtgctaaataccagcttccagcagtggctatctgtcagtctagccatagtacccaagggcacaaaagacctgatagcagcaaacctcctgggccttgttttaagtgcggcaaagaaggccactggacgggggcatgtccccacccatgagtgccgaagagcccttgcctagtctgccagcagatgggcactggaagtctgactgtcctctcaacagatgggcagacaagcatgctcctcagagccaccatcccttcaacaagacaaaaagtgaagaatcacttgcactcccatagctccttggcctagccactgaagactgatgaggccagggcccctgggccccggctcccggcccccactgccatcactgcatcggagcccagggtaactctactagtagcaggtaagctgatctcttttttaattgatagtggggccacctactcagctttgcctgagttctcaggacccactcatccctctcaagtctcagttgtgggggttgacggactcatctcttgtccgcttgccaccagacctcttacttgttccctgtttgatgccattttctcacactctttccttatcatgcctcattgccccacccccattctaggctgagaccttttagccaaagtcaaagcttctatcaccttttcttgcccccttcaaccagagtcccctcctgctcctctccgctagtccggcccctgacccctttccccagtacccacttcctgcctctctcattaacccttccgtagctgctcaccatgaccccatcagaatccagttaaaagactcttccaaatttcccaacgttcctcaataccccatctctctaacccaccaaaagggcctacagcccatcgtaaacaagctctgctcatgcagtcttcttagaccaacacactctccatataacacccctatcctccctgttaaaaagtctgatggctcataccgactcgttcacaacctccaagccatcagtcaagctgtcctccctattcatcccatagtccataacccctatccacttctctctctcgtcgctaccaacaccaccctctacactgcaattgacctgaaggatgccttctttaccatttccctacaccctgattcccaaaacctatttgctttcacctggactgaccctgacaccctccagtcacaacaactcacatggactgtcctccctcagggcttcagggatagccctcatttctttggacaagctctagcccgaaacctcacttccttaaacctgtctcccagtcatcttcaatatgtggacgaccttcttctttgcagcccctctctaaaagactctcaaactcacacggccactgctctcttaaactttctcgctatcaaagggtatagggtctccccctccaaggcccaactctccatctccatgatgacttacttaggaattcaactttcccctggggcccaggctatgactccagccagggcagcattaatagaaaatctacccccaccctcctccaaaagcgaaatcctttccttcccagggctagcaggcttctttagaatatggatttccaactttgccctcctagctcatcccctctatgaagtggccaaaggccctcccaatgaacccctaaacccctcacataacatactccccagcttccacaaactccaaactgctcttgtcactgcgtcagctccgtccttacctgatatctcccaacctttcactctctatactgctgaaagctgaggaatagccctcggtgtcttaggacaacagaaaggaaatcctccttcctttgcccctgtagcttacctctctaaacaactagataacacagtcaaagggtggccagcctgctttaaagcactagaagtggtagccagcttagctctagaaagcaggaaactaactttcagccagaataccaccgtccacagttctcataatctacaagatctcctctcctcccaagcagtaagctcccttcctccttccaggattcaattactccatgccctctttataaaaaatcccaaattcagtcttaccagaagtgcttccctcaacccagcatccttactccccgtatcctcttcccttcctactcattcttccactgatatcctggaccacgtacagccacatttcccaaacatttcctccgagcctctcaccaaccccgatgatcaactattcatagatggctcctcttccaggcccaccagctaccccccagattgctggatatgcagttgtttcccttgaccaagtaattgaagccaggatcctcctcccaaaaagcagaactcatagctctcaccagggccctaaatctttccaaaggcaaacgagtcaacatttatacagactccaaatatgcctatcacattcctcgttcccacgctgctatctggcaaaagagaggactccttactgccaaaggaacccctatcactaatggccaccttatttactaactccttcaggccacacacctcccagctaaagcaggagttatacactgttgaggacatcgaacaggttcagatgaaatctcgaggcaacagaaaggccgatgaggcagcaaaagaagcctccctttcttctgcctctgcccctctccttcctgttatcccagcaatcctacccaagaactctcccaccgagaaagctttgctatacagcaaggagcctcctttcaaggggactggatagtcaaaaatcaaaagctcgtcctcccctaagagcagaccaaagaaattctgacatctcttcaccaatccttccatatcagtgtgcgcccccatacctactccttcaccctatttctcctccccccatctattcacctcactaagagacataacctcaaactgtcctatatgctctgttacttcctcccaaggggccctccactctccctccatccctacacatcccctcagaggaacactcccaggggaggactggcaaatagacttcacccacattcatcccgtcaagaggacaaaatttattcttactcttatagacaccttctctaggtgggtagaagcatttcctacctcttcagaaaaggccgcagaagtctcccaaattcttgtaacagaaatcatccctacatttggtctccctggctccatacaatcagacaatggcccctagcttcatctcccaaatcactcaacaggtttctcagtcccttggcatccagtggcgtctccatatcccatgctggccccagacatccggaaaagtcgaaagggcaaatgggatccttaaggctcagttaaccaaactcactcttgaagtccaaaaaccatggacctcccttttgcccatagcactggagagcattagagccagtccaaaagcaccctccttcctcagtccatttgagttaatatacggacgccctttcctcttacaaaacaggcccccttctaactctcagctaggagaatacctcccaacagtctccctcatgagctatctcctctgccaacaagccgaccaggccctcccaaaaccccacgaaggggtctccaatcccaaatagacttgctctccaattccaaaagactctttaagcagcagtgacacttcaaaaccatcgaggtttagatctcctcactgccgagaaaggcggcctgtgtatctttttagaagaggagtgctgtttctatactaaccagtcaggactagtacaagatgctgctggacgaataaatgaaaaagcttctggccgggtgcagtggctcacgcctgtaatcccagatctttgggaggctgaggcgggcggatcacgaggtcaggagatcgagaccatcttggctaacacggtgaaaccccgtctctactaaaaatagaaaaaattagccgggcgtggtggccggcagctgtactcccagctactcaggaggctgaggcaggagaatggcgtgtggggtgaacccgggaggcggagcttgcagtgagcagagatgatgccactgcactccagcctgggcgacagagcaagactccatctccaaaaaaaaaaaaaaaaaagctgctgaaatcaggcagcgcctttcagattcccggcccaggtgatttcgtaactcctgggcaccctggctactgcccttcctaggccctgccattaccctcttcctccatttagcacttggcccatgtctcttacatctccttacccagtttttacagggccgtgttagagccttcacccatggaacagtacaagacatgatgctactccgagaataccgacagctccaggaacagcagtccctactacccagcctctccccccaaccatcgcccctattcagcaagaagcagccagaggacaacggcgcccctcttctattacctattaaaaggctggaatgttaggaacaagttgcaccagaacccctccccaccccaatgcagctgtcccttaccctgaatactctgcagctgcattcctggacccttatctaggcgctacagcaaggtcaccagacttgctttaaccctacgggcagcatgggggaggtcacgagaaacgtggataaacctaagttacaccctcttgtaaattcctatattgtaacctggtcacgagatgatatgtggtaaggttaaccaacaaacaaccccagggtctctctcccccatataaaaccctcattttgtaagctcagggctgcctcctttgactgtggtgaagcagcctggcaggttagtaaacttactctcctgannttgggtctctctctcgtcctttctctcggctaaccttacagcgccctcatccattctccaattataatgtgtttacacctttcctcctgcatgtctcacattttaccttgtcatcctcttacttgtgtatgtgtctatgcctcccagcatttgacagtacctgaaggtcaaagcctatctgctgtttacccttacaattctattcactcggcacgcactaggcacagaataaatgccattcatccctacttttacttcagggtacattttagagatctaagatttggtgtatctttcccattatccattcttattgcctcaaggctctcctcttataaatctagtggtatgcattactttgggggtaaggacaaatttatccagaacagagaagatttagttcagtctttagttttaaaataagcatttttaagtaatagcagagacaaaagtctgaaagccaacatagttttaatttaaaagaaatttgattttgctacagctttttggccaggagtaagtgaggatgctgtttcgaaagctggtcttgcatcttaagcagtacggtgtgggtcttaggggctggagtgtatcttgcaggaaacacagagtaggcaagaatgtgaggtggtgtaagactagtttgtctggttcaaaaagtaaaaaagaagactgaaaaaagtaggaaatctaacccaaagcaatcaatctttgagaagagcccagcacacttcccttccaattgatttgtcctacacccctccatgagcctaagcattagagcagaaatgactgagggtagcatccaagccactgggccaaggggcactggtacgatgaggataccgtgtcccacaattccagggtagtctgggaaaaacaaagcagagttcctgagaagaatgcagtagtggctgacagaaccagaaagggtgttgtagtgatatgtggccatgacatcagaagactaaaatgaggctatggatattccctagcaaatgtcttgggaacagaggccaaagccgaaagctcaagaattaatggaatgactacacctcaacgaaggttatagattagtgaggactgatgagtacaaaccagactcacacatccatcctcatcctcactccccacccccaggctacaatattacatatatgtcccctactcctgagggatggaaaagaggatgggtaggataagttcaaactgctttaatggctaacaaaattcacctttattcctttttatttttagttgacatgtaaaaattgtacatatttattggctacagagtgatattttgatacaagtataaagtgtgtaatgatcaaatcagagtaattagcacatcaatcacctcaaatagttatcacttatttgtactgggaacactcgaaatccttttctagctttgaaaaaatatacaataaattattgttaactgtattcaccacatagcactatagaacagtagaacagaatttattcctcctatattgctgtaatttgtatctgttaattaacctctccctagcctcccctccccctacccttcccaatctctcataaccacaattctactctctagatctatgagctcattttttaagtccctgcatttgagtgagaagatgaagtatttatctttctgcgcatgacttgctttgcttaacataatatcctccagattcatccacgttggtgcaaatggaaggattccatactttattttatgggtgattattgttccattgtgtgtataccatat

SEQ ID NO: 405734 - DNA, 6709 bp, Homo sapiens
  misc_feature (6693)..(6694): n is a, c, g, or t
gctgcctcctctgactgtggtggagcagctcagcaggataataagcttactcgcctgaccttgggtctctctctcatcctttctcttggctaaccttcattttggtgccaaaacccaggaaggggataggctctggctgggcgtccttagaggattctctctctctctctcctatcatcccttacccagccaacctccccttcccgaacctgctaaagaccctaaggatctcccaaaattctcccattgttggccacctcatccaccatcaaagcctctgagaggggtgagtaagagagacttttgcctattacctggaacccttgaccatctcttcactcccaaaagacccagcgctgggccaagggcttcctctggcctccaggcctctggttcctctgtttcctggacgcctgactccgcagctacctcctctattccatacaaggcctgcaagacaggcgccgccctctctcgtctttgtcgtctgtggtcccttcttcctctaccctcacctcctccattcactatgggagcctctcagtctacccctcccaagaccaccccccttgggtgtctcctccgcaatcgcaaggctctcggcctccgttcagggatccgttctaagaggcttatcttttactgcaatactgcatggcctcaataccaattggacaatggctcccaatggcccgaaaatggcactttcgatttcaatatacttagagacttagacaacttttgccatcgcaatgagaaatggtctgagattccttatattcaggctttcttcattctccgtaaccacccttctctctgccactcctgctctactttccaaatcctactcaccagctcaaaacctgactcatctcccgtcaccccacccacagacccagccgatgactcctcttcctttgaccccgtggattttctccctcctcgacagcatcatgatcctccaccagagcatcatgatcctccaccgtatgtccctgctccggctctacccctctcccccactctctccaaccaacccacttctgactctgagtcctctctgcctcctcccctcacccgctctcgggcccaatgtgctcagcaaccagctcccttgcttcctctccgggaagtagcgggagttgaggggatcgtccatgtccacgtccctttctccttctacgatctcttacagattgaagaacgtctcgggtccttctcctccgatcctgatacttacatcaaagaatttaaatatcttactcaatcttatgaactcacttggcatgatctctactttatcctctcttctaccctccttccagaagagaaggaaagagtgtggctcgcagcacaggcatatgccgatgaccttcatcagcaggatcctactaagcccgtaggagctgctgctgttccctgggaagagccttcctgggaataccaacccacagaacctggccaagtgtactgtagccatatgattacttgcctcattgcaggccttaacaaagctgcccataggctgtaaattttgaaaaacttaaagacatttcccaaaaggcagatgaaaatcctgcccaatctctttcccgccttacagaagctctccaaaaatatacccgcatcgaccctgcctcctgagaaggaactattgttctttctttaaaaaattttatttattttttaattattattatactttaagttttagggtacatgtgcacaatgtgcaggtttgttacatatgtaggaactattgttcttaatacccattttatttcccaatctgcccctgacatccggcacaaacttaaaaaggctgaagatggctctcaaaccccacaacaagacctccttaacctggctttcaaagtctttaataacagggacgagcaaaataaattagataaagcccaaagagatcgtgctaaataccagcttccagcagtggctatctgtcagtctagccatagtacccaagggcacaaaagacctgatagcagcaaacctcctgggccttgttttaagtgcggcaaagaaggccactggacgggggcatgtccccacccatgagtgccgaagagcccttgcctagtctgccagcagatgggcactggaagtctgactgtcctctcaacagatgggcagacaagcatgctcctcagagccaccatcccttcaacaagacaaaaagtgaagaatcacttgcactcccatagctccttggcctagccactgaagactgatgaggccagggcccctgggccccggctcccggcccccactgccatcactgcatcggagcccagggtaactctactagtagcaggtaagctgatctcttttttaattgatagtggggccacctactcagctttgcctgagttctcaggacccactcatccctctcaagtctcagttgtgggggttgacggactcatctcttgtccgcttgccaccagacctcttacttgttccctgtttgatgccattttctcacactctttccttatcatgcctcattgccccacccccattctaggctgagaccttttagccaaagtcaaagcttctatcaccttttcttgcccccttcaaccagagtcccctcctgctcctctccgctagtccggcccctgacccctttccccagtacccacttcctgcctctctcattaacccttccgtagctgctcaccatgaccccatcagaatccagttaaaagactcttccaaatttcccaacgttcctcaataccccatctctctaacccaccaaaagggcctacagcccatcgtaaacaagctctgctcatgcagtcttcttagaccaacacactctccatataacacccctatcctccctgttaaaaagtctgatggctcataccgactcgttcacaacctccaagccatcagtcaagctgtcctccctattcatcccatagtccataacccctatccacttctctctctcgtcgctaccaacaccaccctctacactgcaattgacctgaaggatgccttctttaccatttccctacaccctgattcccaaaacctatttgctttcacctggactgaccctgacaccctccagtcacaacaactcacatggactgtcctccctcagggcttcagggatagccctcatttctttggacaagctctagcccgaaacctcacttccttaaacctgtctcccagtcatcttcaatatgtggacgaccttcttctttgcagcccctctctaaaagactctcaaactcacacggccactgctctcttaaactttctcgctatcaaagggtatagggtctccccctccaaggcccaactctccatctccatgatgacttacttaggaattcaactttcccctggggcccaggctatgactccagccagggcagcattaatagaaaatctacccccaccctcctccaaaagcgaaatcctttccttcccagggctagcaggcttctttagaatatggatttccaactttgccctcctagctcatcccctctatgaagtggccaaaggccctcccaatgaacccctaaacccctcacataacatactccccagcttccacaaactccaaactgctcttgtcactgcgtcagctccgtccttacctgatatctcccaacctttcactctctatactgctgaaagctgaggaatagccctcggtgtcttaggacaacagaaaggaaatcctccttcctttgcccctgtagcttacctctctaaacaactagataacacagtcaaagggtggccagcctgctttaaagcactagaagtggtagccagcttagctctagaaagcaggaaactaactttcagccagaataccaccgtccacagttctcataatctacaagatctcctctcctcccaagcagtaagctcccttcctccttccaggattcaattactccatgccctctttataaaaaatcccaaattcagtcttaccagaagtgcttccctcaacccagcatccttactccccgtatcctcttcccttcctactcattcttccactgatatcctggaccacgtacagccacatttcccaaacatttcctccgagcctctcaccaaccccgatgatcaactattcatagatggctcctcttccaggcccaccagctaccccccagattgctggatatgcagttgtttcccttgaccaagtaattgaagccaggatcctcctcccaaaaagcagaactcatagctctcaccagggccctaaatctttccaaaggcaaacgagtcaacatttatacagactccaaatatgcctatcacattcctcgttcccacgctgctatctggcaaaagagaggactccttactgccaaaggaacccctatcactaatggccaccttatttactaactccttcaggccacacacctcccagctaaagcaggagttatacactgttgaggacatcgaacaggttcagatgaaatctcgaggcaacagaaaggccgatgaggcagcaaaagaagcctccctttcttctgcctctgcccctctccttcctgttatcccagcaatcctacccaagaactctcccaccgagaaagctttgctatacagcaaggagcctcctttcaaggggactggatagtcaaaaatcaaaagctcgtcctcccctaagagcagaccaaagaaattctgacatctcttcaccaatccttccatatcagtgtgcgcccccatacctactccttcaccctatttctcctccccccatctattcacctcactaagagacataacctcaaactgtcctatatgctctgttacttcctcccaaggggccctccactctccctccatccctacacatcccctcagaggaacactcccaggggaggactggcaaatagacttcacccacattcatcccgtcaagaggacaaaatttattcttactcttatagacaccttctctaggtgggtagaagcatttcctacctcttcagaaaaggccgcagaagtctcccaaattcttgtaacagaaatcatccctacatttggtctccctggctccatacaatcagacaatggcccctagcttcatctcccaaatcactcaacaggtttctcagtcccttggcatccagtggcgtctccatatcccatgctggccccagacatccggaaaagtcgaaagggcaaatgggatccttaaggctcagttaaccaaactcactcttgaagtccaaaaaccatggacctcccttttgcccatagcactggagagcattagagccagtccaaaagcaccctccttcctcagtccatttgagttaatatacggacgccctttcctcttacaaaacaggcccccttctaactctcagctaggagaatacctcccaacagtctccctcatgagctatctcctctgccaacaagccgaccaggccctcccaaaaccccacgaaggggtctccaatcccaaatagacttgctctccaattccaaaagactctttaagcagcagtgacacttcaaaaccatcgaggtttagatctcctcactgccgagaaaggcggcctgtgtatctttttagaagaggagtgctgtttctatactaaccagtcaggactagtacaagatgctgctggacgaataaatgaaaaagcttctggccgggtgcagtggctcacgcctgtaatcccagatctttgggaggctgaggcgggcggatcacgaggtcaggagatcgagaccatcttggctaacacggtgaaaccccgtctctactaaaaatagaaaaaattagccgggcgtggtggccggcagctgtactcccagctactcaggaggctgaggcaggagaatggcgtgtggggtgaacccgggaggcggagcttgcagtgagcagagatgatgccactgcactccagcctgggcgacagagcaagactccatctccaaaaaaaaaaaaaaaaaagctgctgaaatcaggcagcgcctttcagattcccggcccaggtgatttcgtaactcctgggcaccctggctactgcccttcctaggccctgccattaccctcttcctccatttagcacttggcccatgtctcttacatctccttacccagtttttacagggccgtgttagagccttcacccatggaacagtacaagacatgatgctactccgagaataccgacagctccaggaacagcagtccctactacccagcctctccccccaaccatcgcccctattcagcaagaagcagccagaggacaacggcgcccctcttctattacctattaaaaggctggaatgttaggaacaagttgcaccagaacccctccccaccccaatgcagctgtcccttaccctgaatactctgcagctgcattcctggacccttatctaggcgctacagcaaggtcaccagacttgctttaaccctacgggcagcatgggggaggtcacgagaaacgtggataaacctaagttacaccctcttgtaaattcctatattgtaacctggtcacgagatgatatgtggtaaggttaaccaacaaacaaccccagggtctctctcccccatataaaaccctcattttgtaagctcagggctgcctcctttgactgtggtgaagcagcctggcaggttagtaaacttactctcctgannttgggtctctctctc

SEQ ID NO: 405735 - DNA, 7638 bp, Homo sapiens
  misc_feature (6693)..(6694): n is a, c, g, or t
gctgcctcctctgactgtggtggagcagctcagcaggataataagcttactcgcctgaccttgggtctctctctcatcctttctcttggctaaccttcattttggtgccaaaacccaggaaggggataggctctggctgggcgtccttagaggattctctctctctctctcctatcatcccttacccagccaacctccccttcccgaacctgctaaagaccctaaggatctcccaaaattctcccattgttggccacctcatccaccatcaaagcctctgagaggggtgagtaagagagacttttgcctattacctggaacccttgaccatctcttcactcccaaaagacccagcgctgggccaagggcttcctctggcctccaggcctctggttcctctgtttcctggacgcctgactccgcagctacctcctctattccatacaaggcctgcaagacaggcgccgccctctctcgtctttgtcgtctgtggtcccttcttcctctaccctcacctcctccattcactatgggagcctctcagtctacccctcccaagaccaccccccttgggtgtctcctccgcaatcgcaaggctctcggcctccgttcagggatccgttctaagaggcttatcttttactgcaatactgcatggcctcaataccaattggacaatggctcccaatggcccgaaaatggcactttcgatttcaatatacttagagacttagacaacttttgccatcgcaatgagaaatggtctgagattccttatattcaggctttcttcattctccgtaaccacccttctctctgccactcctgctctactttccaaatcctactcaccagctcaaaacctgactcatctcccgtcaccccacccacagacccagccgatgactcctcttcctttgaccccgtggattttctccctcctcgacagcatcatgatcctccaccagagcatcatgatcctccaccgtatgtccctgctccggctctacccctctcccccactctctccaaccaacccacttctgactctgagtcctctctgcctcctcccctcacccgctctcgggcccaatgtgctcagcaaccagctcccttgcttcctctccgggaagtagcgggagttgaggggatcgtccatgtccacgtccctttctccttctacgatctcttacagattgaagaacgtctcgggtccttctcctccgatcctgatacttacatcaaagaatttaaatatcttactcaatcttatgaactcacttggcatgatctctactttatcctctcttctaccctccttccagaagagaaggaaagagtgtggctcgcagcacaggcatatgccgatgaccttcatcagcaggatcctactaagcccgtaggagctgctgctgttccctgggaagagccttcctgggaataccaacccacagaacctggccaagtgtactgtagccatatgattacttgcctcattgcaggccttaacaaagctgcccataggctgtaaattttgaaaaacttaaagacatttcccaaaaggcagatgaaaatcctgcccaatctctttcccgccttacagaagctctccaaaaatatacccgcatcgaccctgcctcctgagaaggaactattgttctttctttaaaaaattttatttattttttaattattattatactttaagttttagggtacatgtgcacaatgtgcaggtttgttacatatgtaggaactattgttcttaatacccattttatttcccaatctgcccctgacatccggcacaaacttaaaaaggctgaagatggctctcaaaccccacaacaagacctccttaacctggctttcaaagtctttaataacagggacgagcaaaataaattagataaagcccaaagagatcgtgctaaataccagcttccagcagtggctatctgtcagtctagccatagtacccaagggcacaaaagacctgatagcagcaaacctcctgggccttgttttaagtgcggcaaagaaggccactggacgggggcatgtccccacccatgagtgccgaagagcccttgcctagtctgccagcagatgggcactggaagtctgactgtcctctcaacagatgggcagacaagcatgctcctcagagccaccatcccttcaacaagacaaaaagtgaagaatcacttgcactcccatagctccttggcctagccactgaagactgatgaggccagggcccctgggccccggctcccggcccccactgccatcactgcatcggagcccagggtaactctactagtagcaggtaagctgatctcttttttaattgatagtggggccacctactcagctttgcctgagttctcaggacccactcatccctctcaagtctcagttgtgggggttgacggactcatctcttgtccgcttgccaccagacctcttacttgttccctgtttgatgccattttctcacactctttccttatcatgcctcattgccccacccccattctaggctgagaccttttagccaaagtcaaagcttctatcaccttttcttgcccccttcaaccagagtcccctcctgctcctctccgctagtccggcccctgacccctttccccagtacccacttcctgcctctctcattaacccttccgtagctgctcaccatgaccccatcagaatccagttaaaagactcttccaaatttcccaacgttcctcaataccccatctctctaacccaccaaaagggcctacagcccatcgtaaacaagctctgctcatgcagtcttcttagaccaacacactctccatataacacccctatcctccctgttaaaaagtctgatggctcataccgactcgttcacaacctccaagccatcagtcaagctgtcctccctattcatcccatagtccataacccctatccacttctctctctcgtcgctaccaacaccaccctctacactgcaattgacctgaaggatgccttctttaccatttccctacaccctgattcccaaaacctatttgctttcacctggactgaccctgacaccctccagtcacaacaactcacatggactgtcctccctcagggcttcagggatagccctcatttctttggacaagctctagcccgaaacctcacttccttaaacctgtctcccagtcatcttcaatatgtggacgaccttcttctttgcagcccctctctaaaagactctcaaactcacacggccactgctctcttaaactttctcgctatcaaagggtatagggtctccccctccaaggcccaactctccatctccatgatgacttacttaggaattcaactttcccctggggcccaggctatgactccagccagggcagcattaatagaaaatctacccccaccctcctccaaaagcgaaatcctttccttcccagggctagcaggcttctttagaatatggatttccaactttgccctcctagctcatcccctctatgaagtggccaaaggccctcccaatgaacccctaaacccctcacataacatactccccagcttccacaaactccaaactgctcttgtcactgcgtcagctccgtccttacctgatatctcccaacctttcactctctatactgctgaaagctgaggaatagccctcggtgtcttaggacaacagaaaggaaatcctccttcctttgcccctgtagcttacctctctaaacaactagataacacagtcaaagggtggccagcctgctttaaagcactagaagtggtagccagcttagctctagaaagcaggaaactaactttcagccagaataccaccgtccacagttctcataatctacaagatctcctctcctcccaagcagtaagctcccttcctccttccaggattcaattactccatgccctctttataaaaaatcccaaattcagtcttaccagaagtgcttccctcaacccagcatccttactccccgtatcctcttcccttcctactcattcttccactgatatcctggaccacgtacagccacatttcccaaacatttcctccgagcctctcaccaaccccgatgatcaactattcatagatggctcctcttccaggcccaccagctaccccccagattgctggatatgcagttgtttcccttgaccaagtaattgaagccaggatcctcctcccaaaaagcagaactcatagctctcaccagggccctaaatctttccaaaggcaaacgagtcaacatttatacagactccaaatatgcctatcacattcctcgttcccacgctgctatctggcaaaagagaggactccttactgccaaaggaacccctatcactaatggccaccttatttactaactccttcaggccacacacctcccagctaaagcaggagttatacactgttgaggacatcgaacaggttcagatgaaatctcgaggcaacagaaaggccgatgaggcagcaaaagaagcctccctttcttctgcctctgcccctctccttcctgttatcccagcaatcctacccaagaactctcccaccgagaaagctttgctatacagcaaggagcctcctttcaaggggactggatagtcaaaaatcaaaagctcgtcctcccctaagagcagaccaaagaaattctgacatctcttcaccaatccttccatatcagtgtgcgcccccatacctactccttcaccctatttctcctccccccatctattcacctcactaagagacataacctcaaactgtcctatatgctctgttacttcctcccaaggggccctccactctccctccatccctacacatcccctcagaggaacactcccaggggaggactggcaaatagacttcacccacattcatcccgtcaagaggacaaaatttattcttactcttatagacaccttctctaggtgggtagaagcatttcctacctcttcagaaaaggccgcagaagtctcccaaattcttgtaacagaaatcatccctacatttggtctccctggctccatacaatcagacaatggcccctagcttcatctcccaaatcactcaacaggtttctcagtcccttggcatccagtggcgtctccatatcccatgctggccccagacatccggaaaagtcgaaagggcaaatgggatccttaaggctcagttaaccaaactcactcttgaagtccaaaaaccatggacctcccttttgcccatagcactggagagcattagagccagtccaaaagcaccctccttcctcagtccatttgagttaatatacggacgccctttcctcttacaaaacaggcccccttctaactctcagctaggagaatacctcccaacagtctccctcatgagctatctcctctgccaacaagccgaccaggccctcccaaaaccccacgaaggggtctccaatcccaaatagacttgctctccaattccaaaagactctttaagcagcagtgacacttcaaaaccatcgaggtttagatctcctcactgccgagaaaggcggcctgtgtatctttttagaagaggagtgctgtttctatactaaccagtcaggactagtacaagatgctgctggacgaataaatgaaaaagcttctggccgggtgcagtggctcacgcctgtaatcccagatctttgggaggctgaggcgggcggatcacgaggtcaggagatcgagaccatcttggctaacacggtgaaaccccgtctctactaaaaatagaaaaaattagccgggcgtggtggccggcagctgtactcccagctactcaggaggctgaggcaggagaatggcgtgtggggtgaacccgggaggcggagcttgcagtgagcagagatgatgccactgcactccagcctgggcgacagagcaagactccatctccaaaaaaaaaaaaaaaaaagctgctgaaatcaggcagcgcctttcagattcccggcccaggtgatttcgtaactcctgggcaccctggctactgcccttcctaggccctgccattaccctcttcctccatttagcacttggcccatgtctcttacatctccttacccagtttttacagggccgtgttagagccttcacccatggaacagtacaagacatgatgctactccgagaataccgacagctccaggaacagcagtccctactacccagcctctccccccaaccatcgcccctattcagcaagaagcagccagaggacaacggcgcccctcttctattacctattaaaaggctggaatgttaggaacaagttgcaccagaacccctccccaccccaatgcagctgtcccttaccctgaatactctgcagctgcattcctggacccttatctaggcgctacagcaaggtcaccagacttgctttaaccctacgggcagcatgggggaggtcacgagaaacgtggataaacctaagttacaccctcttgtaaattcctatattgtaacctggtcacgagatgatatgtggtaaggttaaccaacaaacaaccccagggtctctctcccccatataaaaccctcattttgtaagctcagggctgcctcctttgactgtggtgaagcagcctggcaggttagtaaacttactctcctgannttgggtctctctctcgtcctttctctcggctaaccttacagcgccctcatccattctccaattataatgtgtttacacctttcctcctgcatgtctcacattttaccttgtcatcctcttacttgtgtatgtgtctatgcctcccagcatttgacagtacctgaaggtcaaagcctatctgctgtttacccttacaattctattcactcggcacgcactaggcacagaataaatgccattcatccctacttttacttcagggtacattttagagatctaagatttggtgtatctttcccattatccattcttattgcctcaaggctctcctcttataaatctagtggtatgcattactttgggggtaaggacaaatttatccagaacagagaagatttagttcagtctttagttttaaaataagcatttttaagtaatagcagagacaaaagtctgaaagccaacatagttttaatttaaaagaaatttgattttgctacagctttttggccaggagtaagtgaggatgctgtttcgaaagctggtcttgcatcttaagcagtacggtgtgggtcttaggggctggagtgtatcttgcaggaaacacagagtaggcaagaatgtgaggtggtgtaagactagtttgtctggttcaaaaagtaaaaaagaagactgaaaaaagtaggaaatctaacccaaagcaatcaatctttgagaagagcccagcacacttcccttccaattgatttgtcctacacccctccatgagcctaagcattagagcagaaatgactgagggtagcatccaagccactgggccaaggggcactggtacgatgaggataccgtgtcccacaattccagggtagtctgggaaaaactcccgagtccctgagaaccatgacccttgttccgccgcattccggatcctctggaacgccacc

SEQ ID NO: 405736 - DNA, 6740 bp, Homo sapiens
  misc_feature (6724)..(6725): n is a, c, g, or t
gctgcctcctctgactgtggtggagcagctcagcaggataataagcttactcgcctgaccttgggtctctctctcatcctttctcttggctaaccttcattttggtgccaaaacccaggaaggggataggctctggctgggcgtccttagaggattctctctctctctctcctatcatcccttacccagccaacctccccttcccgaacctgctaaagaccctaaggatctcccaaaattctcccattgttggccacctcatccaccatcaaagcctctgagaggggtgagtaagagagacttttgcctattacctggaacccttgaccatctcttcactcccaaaagacccagcgctgggccaagggcttcctctggcctccaggcctctggttcctctgtttcctggacgcctgactccgcagctacctcctctattccatacaaggcctgcaagacaggcgccgccctctctcgtctttgtcgtctgtggtcccttcttcctctaccctcacctcctccattcactatgggagcctctcagtctacccctcccaagaccaccccccttgggtgtctcctccgcaatcgcaaggctctcggcctccgttcagggatccgttctaagaggcttatcttttactgcaatactgcatggcctcaataccaattggacaatggctcccaatggcccgaaaatggcactttcgatttcaatatacttagagacttagacaacttttgccatcgcaatgagaaatggtctgagattccttatattcaggctttcttcattctccgtaaccacccttctctctgccactcctgctctactttccaaatcctactcaccagctcaaaacctgactcatctcccgtcaccccacccacagacccagccgatgactcctcttcctttgaccccgtggattttctccctcctcgacagcatcatgatcctccaccagagcatcatgatcctccaccgtatgtccctgctccggctctacccctctcccccactctctccaaccaacccacttctgactctgagtcctctctgcctcctcccctcacccgctctcgggcccaatgtgctcagcaaccagctcccttgcttcctctccgggaagtagcgggagttgaggggatcgtccatgtccacgtccctttctccttctacgatctcttacagattgaagaacgtctcgggtccttctcctccgatcctgatacttacatcaaagaatttaaatatcttactcaatcttatgaactcacttggcatgatctctactttatcctctcttctaccctccttccagaagagaaggaaagagtgtggctcgcagcacaggcatatgccgatgaccttcatcagcaggatcctactaagcccgtaggagctgctgctgttccctgggaagagccttcctgggaataccaacccacagaacctggccaagtgtactgtagccatatgattacttgcctcattgcaggccttaacaaagctgcccataggctgtaaattttgaaaaacttaaagacatttcccaaaaggcagatgaaaatcctgcccaatctctttcccgccttacagaagctctccaaaaatatacccgcatcgaccctgcctcctgagaaggaactattgttctttctttaaaaaattttatttattttttaattattattatactttaagttttagggtacatgtgcacaatgtgcaggtttgttacatatgtaggaactattgttcttaatacccattttatttcccaatctgcccctgacatccggcacaaacttaaaaaggctgaagatggctctcaaaccccacaacaagacctccttaacctggctttcaaagtctttaataacagggacgagcaaaataaattagataaagcccaaagagatcgtgctaaataccagcttccagcagtggctatctgtcagtctagccatagtacccaagggcacaaaagacctgatagcagcaaacctcctgggccttgttttaagtgcggcaaagaaggccactggacgggggcatgtccccacccatgagtgccgaagagcccttgcctagtctgccagcagatgggcactggaagtctgactgtcctctcaacagatgggcagacaagcatgctcctcagagccaccatcccttcaacaagacaaaaagtgaagaatcacttgcactcccatagctccttggcctagccactgaagactgatgaggccagggcccctgggccccggctcccggcccccactgccatcactgcatcggagcccagggtaactctactagtagcaggtaagctgatctcttttttaattgatagtggggccacctactcagctttgcctgagttctcaggacccactcatccctctcaagtctcagttgtgggggttgacggactcatctcttgtccgcttgccaccagacctcttacttgttccctgtttgatgccattttctcacactctttccttatcatgcctcattgccccacccccattctaggctgagaccttttagccaaagtcaaagcttctatcaccttttcttgcccccttcaaccagagtcccctcctgctcctctccgctagtccggcccctgacccctttccccagtacccacttcctgcctctctcattaacccttccgtagctgctcaccatgaccccatcagaatccagttaaaagactcttccaaatttcccaacgttcctcaataccccatctctctaacccaccaaaagggcctacagcccatcgtaaacaagctctgctcatgcagtcttcttagaccaacacactctccatataacacccctatcctccctgttaaaaagtctgatggctcataccgactcgttcacaacctccaagccatcagtcaagctgtcctccctattcatcccatagtccataacccctatccacttctctctctcgtcgctaccaacaccaccctctacactgcaattgacctgaaggatgccttctttaccatttccctacaccctgattcccaaaacctatttgctttcacctggactgaccctgacaccctccagtcacaacaactcacatggactgtcctccctcagggcttcagggatagccctcatttctttggacaagctctagcccgaaacctcacttccttaaacctgtctcccagtcatcttcaatatgtggacgaccttcttctttgcagcccctctctaaaagactctcaaactcacacggccactgctctcttaaactttctcgctatcaaagggtatagggtctccccctccaaggcccaactctccatctccatgatgacttacttaggaattcaactttcccctggggcccaggctatgactccagccagggcagcattaatagaaaatctacccccaccctcctccaaaagcgaaatcctttccttcccagggctagcaggcttctttagaatatggatttccaactttgccctcctagctcatcccctctatgaagtggccaaaggccctcccaatgaacccctaaacccctcacataacatactccccagcttccacaaactccaaactgctcttgtcactgcgtcagctccgtccttacctgatatctcccaacctttcactctctatactgctgaaagctgaggaatagccctcggtgtcttaggacaacagaaaggaaatcctccttcctttgcccctgtagcttacctctctaaacaactagataacacagtcaaagggtggccagcctgctttaaagcactagaagtggtagccagcttagctctagaaagcaggaaactaactttcagccagaataccaccgtccacagttctcataatctacaagatctcctctcctcccaagcagtaagctcccttcctccttccaggattcaattactccatgccctctttataaaaaatcccaaattcagtcttaccagaagtgcttccctcaacccagcatccttactccccgtatcctcttcccttcctactcattcttccactgatatcctggaccacgtacagccacatttcccaaacatttcctccgagcctctcaccaaccccgatgatcaactattcatagatggctcctcttccaggcccaccagctaccccccagattgctggatatgcagttgtttcccttgaccaagtaattgaagccaggatcctcctcccaaaaagcagaactcatagctctcaccagggccctaaatctttccaaaggcaaacgagtcaacatttatacagactccaaatatgcctatcacattcctcgttcccacgctgctatctggcaaaagagaggactccttactgccaaaggaacccctatcactaatggccaccttatttactaactccttcaggccacacacctcccagctaaagcaggagttatacactgttgaggacatcgaacaggttcagatgaaatctcgaggcaacagaaaggccgatgaggcagcaaaagaagcctccctttcttctgcctctgcccctctccttcctgttatcccagcaatcctacccaagaactctcccaccgagaaagctttgctatacagcaaggagcctcctttcaaggggactggatagtcaaaaatcaaaagctcgtcctcccctaagagcagaccaaagaaattctgacatctcttcaccaatccttccatatcagtgtgcgcccccatacctactccttcaccctatttctcctccccccatctattcacctcactaagagacataacctcaaactgtcctatatgctctgttacttcctcccaaggggccctccactctccctccatccctacacatcccctcagaggaacactcccaggggaggactggcaaatagacttcacccacattcatcccgtcaagaggacaaaatttattcttactcttatagacaccttctctaggtgggtagaagcatttcctacctcttcagaaaaggccgcagaagtctcccaaattcttgtaacagaaatcatccctacatttggtctccctggctccatacaatcagacaatggcccctagcttcatctcccaaatcactcaacaggtttctcagtcccttggcatccagtggcgtctccatatcccatgctggccccagacatccggaaaagtcgaaagggcaaatgggatccttaaggctcagttaaccaaactcactcttgaagtccaaaaaccatggacctcccttttgcccatagcactggagagcattagagccagtccaaaagcaccctccttcctcagtccatttgagttaatatacggacgccctttcctcttacaaaacaggcccccttctaactctcagctaggagaatacctcccaacagtctccctcatgagctatctcctctgccaacaagccgaccaggccctcccaaaaccccacgaaggggtctccaatcccaaatagacttgctctccaattccaaaagactctttaagcagcagtgacacttcaaaaccatcgaggtttagatctcctcactgccgagaaaggcggcctgtgtatctttttagaagaggagtgctgtttctatactaaccagtcaggactagtacaagatgctgctggacgaataaatgaaaaagcttctggccgggtgcagtggctcacgcctgtaatcccagatctttgggaggctgaggcgggcggatcacgaggtcaggagatcgagaccatcttggctaacacggtgaaaccccgtctctactaaaaatagaaaaaattagccgggcgtggtggccggcagctgtactcccagctactcaggaggctgaggcaggagaatggcgtgtggggtgaacccgggaggcggagcttgcagtgagcagagatgatgccactgcactccagcctgggcgacagagcaagactccatctccaaaaaaaaaaaaaaaaaagctgctgaaatcaggcagcgcctttcagattcccggcccaggtgatttcgtaactcctgggcaccctggctactgcccttcctaggccctgccattaccctcttcctccatttagcacttggcccatgtctcttacatctccttacccagtttttacagggccgtgttagagccttcacccatggaacagtacaagacatgatgctactccgagaataccgacagctccaggaacagcagtccctactacccagcctctccccccaaccatcgcccctattcagcaagaagcagccagaggacaacggcgcccctcttctattacctattaaaaggctggaatgttaggaacaagttgcaccagaacccctccccctccccccccgcccccgacccccccccccccaccccaatgcagctgtcccttaccctgaatactctgcagctgcattcctggacccttatctaggcgctacagcaaggtcaccagacttgctttaaccctacgggcagcatgggggaggtcacgagaaacgtggataaacctaagttacaccctcttgtaaattcctatattgtaacctggtcacgagatgatatgtggtaaggttaaccaacaaacaaccccagggtctctctcccccatataaaaccctcattttgtaagctcagggctgcctcctttgactgtggtgaagcagcctggcaggttagtaaacttactctcctgannttgggtctctctctc

SEQ ID NO: 405737 - DNA, 6366 bp, Homo sapiens
gctgcctcctctgactgtggtggagcagctcagcaggataataagcttactcgcctgaccttgggtctctctctcatcctttctcttggctaaccttcattttggtgccaaaacccaggaaggggataggctctggctgggcgtccttagaggattctctctctctctctcctatcatcccttacccagccaacctccccttcccgaacctgctaaagaccctaaggatctcccaaaattctcccattgttggccacctcatccaccatcaaagcctctgagaggggtgagtaagagagacttttgcctattacctggaacccttgaccatctcttcactcccaaaagacccagcgctgggccaagggcttcctctggcctccaggcctctggttcctctgtttcctggacgcctgactccgcagctacctcctctattccatacaaggcctgcaagacaggcgccgccctctctcgtctttgtcgtctgtggtcccttcttcctctaccctcacctcctccattcactatgggagcctctcagtctacccctcccaagaccaccccccttgggtgtctcctccgcaatcgcaaggctctcggcctccgttcagggatccgttctaagaggcttatcttttactgcaatactgcatggcctcaataccaattggacaatggctcccaatggcccgaaaatggcactttcgatttcaatatacttagagacttagacaacttttgccatcgcaatgagaaatggtctgagattccttatattcaggctttcttcattctccgtaaccacccttctctctgccactcctgctctactttccaaatcctactcaccagctcaaaacctgactcatctcccgtcaccccacccacagacccagccgatgactcctcttcctttgaccccgtggattttctccctcctcgacagcatcatgatcctccaccagagcatcatgatcctccaccgtatgtccctgctccggctctacccctctcccccactctctccaaccaacccacttctgactctgagtcctctctgcctcctcccctcacccgctctcgggcccaatgtgctcagcaaccagctcccttgcttcctctccgggaagtagcgggagttgaggggatcgtccatgtccacgtccctttctccttctacgatctcttacagattgaagaacgtctcgggtccttctcctccgatcctgatacttacatcaaagaatttaaatatcttactcaatcttatgaactcacttggcatgatctctactttatcctctcttctaccctccttccagaagagaaggaaagagtgtggctcgcagcacaggcatatgccgatgaccttcatcagcaggatcctactaagcccgtaggagctgctgctgttccctgggaagagccttcctgggaataccaacccacagaacctggccaagtgtactgtagccatatgattacttgcctcattgcaggccttaacaaagctgcccataggctgtaaattttgaaaaacttaaagacatttcccaaaaggcagatgaaaatcctgcccaatctctttcccgccttacagaagctctccaaaaatatacccgcatcgaccctgcctcctgagaaggaactattgttctttctttaaaaaattttatttattttttaattattattatactttaagttttagggtacatgtgcacaatgtgcaggtttgttacatatgtaggaactattgttcttaatacccattttatttcccaatctgcccctgacatccggcacaaacttaaaaaggctgaagatggctctcaaaccccacaacaagacctccttaacctggctttcaaagtctttaataacagggacgagcaaaataaattagataaagcccaaagagatcgtgctaaataccagcttccagcagtggctatctgtcagtctagccatagtacccaagggcacaaaagacctgatagcagcaaacctcctgggccttgttttaagtgcggcaaagaaggccactggacgggggcatgtccccacccatgagtgccgaagagcccttgcctagtctgccagcagatgggcactggaagtctgactgtcctctcaacagatgggcagacaagcatgctcctcagagccaccatcccttcaacaagacaaaaagtgaagaatcacttgcactcccatagctccttggcctagccactgaagactgatgaggccagggcccctgggccccggctcccggcccccactgccatcactgcatcggagcccagggtaactctactagtagcaggtaagctgatctcttttttaattgatagtggggccacctactcagctttgcctgagttctcaggacccactcatccctctcaagtctcagttgtgggggttgacggactcatctcttgtccgcttgccaccagacctcttacttgttccctgtttgatgccattttctcacactctttccttatcatgcctcattgccccacccccattctaggctgagaccttttagccaaagtcaaagcttctatcaccttttcttgcccccttcaaccagagtcccctcctgctcctctccgctagtccggcccctgacccctttccccagtacccacttcctgcctctctcattaacccttccgtagctgctcaccatgaccccatcagaatccagttaaaagactcttccaaatttcccaacgttcctcaataccccatctctctaacccaccaaaagggcctacagcccatcgtaaacaagctctgctcatgcagtcttcttagaccaacacactctccatataacacccctatcctccctgttaaaaagtctgatggctcataccgactcgttcacaacctccaagccatcagtcaagctgtcctccctattcatcccatagtccataacccctatccacttctctctctcgtcgctaccaacaccaccctctacactgcaattgacctgaaggatgccttctttaccatttccctacaccctgattcccaaaacctatttgctttcacctggactgaccctgacaccctccagtcacaacaactcacatggactgtcctccctcagggcttcagggatagccctcatttctttggacaagctctagcccgaaacctcacttccttaaacctgtctcccagtcatcttcaatatgtggacgaccttcttctttgcagcccctctctaaaagactctcaaactcacacggccactgctctcttaaactttctcgctatcaaagggtatagggtctccccctccaaggcccaactctccatctccatgatgacttacttaggaattcaactttcccctggggcccaggctatgactccagccagggcagcattaatagaaaatctacccccaccctcctccaaaagcgaaatcctttccttcccagggctagcaggcttctttagaatatggatttccaactttgccctcctagctcatcccctctatgaagtggccaaaggccctcccaatgaacccctaaacccctcacataacatactccccagcttccacaaactccaaactgctcttgtcactgcgtcagctccgtccttacctgatatctcccaacctttcactctctatactgctgaaagctgaggaatagccctcggtgtcttaggacaacagaaaggaaatcctccttcctttgcccctgtagcttacctctctaaacaactagataacacagtcaaagggtggccagcctgctttaaagcactagaagtggtagccagcttagctctagaaagcaggaaactaactttcagccagaataccaccgtccacagttctcataatctacaagatctcctctcctcccaagcagtaagctcccttcctccttccaggattcaattactccatgccctctttataaaaaatcccaaattcagtcttaccagaagtgcttccctcaacccagcatccttactccccgtatcctcttcccttcctactcattcttccactgatatcctggaccacgtacagccacatttcccaaacatttcctccgagcctctcaccaaccccgatgatcaactattcatagatggctcctcttccaggcccaccagctaccccccagattgctggatatgcagttgtttcccttgaccaagtaattgaagccaggatcctcctcccaaaaagcagaactcatagctctcaccagggccctaaatctttccaaaggcaaacgagtcaacatttatacagactccaaatatgcctatcacattcctcgttcccacgctgctatctggcaaaagagaggactccttactgccaaaggaacccctatcactaatggccaccttatttactaactccttcaggccacacacctcccagctaaagcaggagttatacactgttgaggacatcgaacaggttcagatgaaatctcgaggcaacagaaaggccgatgaggcagcaaaagaagcctccctttcttctgcctctgcccctctccttcctgttatcccagcaatcctacccaagaactctcccaccgagaaagctttgctatacagcaaggagcctcctttcaaggggactggatagtcaaaaatcaaaagctcgtcctcccctaagagcagaccaaagaaattctgacatctcttcaccaatccttccatatcagtgtgcgcccccatacctactccttcaccctatttctcctccccccatctattcacctcactaagagacataacctcaaactgtcctatatgctctgttacttcctcccaaggggccctccactctccctccatccctacacatcccctcagaggaacactcccaggggaggactggcaaatagacttcacccacattcatcccgtcaagaggacaaaatttattcttactcttatagacaccttctctaggtgggtagaagcatttcctacctcttcagaaaaggccgcagaagtctcccaaattcttgtaacagaaatcatccctacatttggtctccctggctccatacaatcagacaatggcccctagcttcatctcccaaatcactcaacaggtttctcagtcccttggcatccagtggcgtctccatatcccatgctggccccagacatccggaaaagtcgaaagggcaaatgggatccttaaggctcagttaaccaaactcactcttgaagtccaaaaaccatggacctcccttttgcccatagcactggagagcattagagccagtccaaaagcaccctccttcctcagtccatttgagttaatatacggacgccctttcctcttacaaaacaggcccccttctaactctcagctaggagaatacctcccaacagtctccctcatgagctatctcctctgccaacaagccgaccaggccctcccaaaaccccacgaaggggtctccaatcccaaatagacttgctctccaattccaaaagactctttaagcagcagtgacacttcaaaaccatcgaggtttagatctcctcactgccgagaaaggcggcctgtgtatctttttagaagaggagtgctgtttctatactaaccagtcaggactagtacaagatgctgctggacgaataaatgaaaaagcttctggccgggtgcagtggctcacgcctgtaatcccagatctttgggaggctgaggcgggcggatcacgaggtcaggagatcgagaccatcttggctaacacggtgaaaccccgtctctactaaaaatagaaaaaattagccgggcgtggtggccggcagctgtactcccagctactcaggaggctgaggcaggagaatggcgtgtggggtgaacccgggaggcggagcttgcagtgagcagagatgatgccactgcactccagcctgggcgacagagcaagactccatctccaaaaaaaaaaaaaaaaaagctgctgaaatcaggcagcgcctttcagattcccggcccaggtgatttcgtaactcctgggcaccctggctactgcccttcctaggccctgccattaccctcttcctccatttagcacttggcccatgtctcttacatctccttacccagtttttacagggccgtgttagagccttcacccatggaacagtacaagacatgatgctactccgagaataccgacagctccaggaacagcagtccctacagaccacatgggtgaaggcccttcctaggccctgccattaccctcttcctccatgtagcacttggcccatgtctcattacatctccttacccagtttttacagccccgtgaatagagccttcaccca

SEQ ID NO: 405738 - DNA, 6212 bp, Homo sapiens
  misc_feature (6212)..(6212): n is a, c, g, or t
gctgcctcctctgactgtggtggagcagctcagcaggataataagcttactcgcctgaccttgggtctctctctcatcctttctcttggctaaccttcattttggtgccaaaacccaggaaggggataggctctggctgggcgtccttagaggattctctctctctctctcctatcatcccttacccagccaacctccccttcccgaacctgctaaagaccctaaggatctcccaaaattctcccattgttggccacctcatccaccatcaaagcctctgagaggggtgagtaagagagacttttgcctattacctggaacccttgaccatctcttcactcccaaaagacccagcgctgggccaagggcttcctctggcctccaggcctctggttcctctgtttcctggacgcctgactccgcagctacctcctctattccatacaaggcctgcaagacaggcgccgccctctctcgtctttgtcgtctgtggtcccttcttcctctaccctcacctcctccattcactatgggagcctctcagtctacccctcccaagaccaccccccttgggtgtctcctccgcaatcgcaaggctctcggcctccgttcagggatccgttctaagaggcttatcttttactgcaatactgcatggcctcaataccaattggacaatggctcccaatggcccgaaaatggcactttcgatttcaatatacttagagacttagacaacttttgccatcgcaatgagaaatggtctgagattccttatattcaggctttcttcattctccgtaaccacccttctctctgccactcctgctctactttccaaatcctactcaccagctcaaaacctgactcatctcccgtcaccccacccacagacccagccgatgactcctcttcctttgaccccgtggattttctccctcctcgacagcatcatgatcctccaccagagcatcatgatcctccaccgtatgtccctgctccggctctacccctctcccccactctctccaaccaacccacttctgactctgagtcctctctgcctcctcccctcacccgctctcgggcccaatgtgctcagcaaccagctcccttgcttcctctccgggaagtagcgggagttgaggggatcgtccatgtccacgtccctttctccttctacgatctcttacagattgaagaacgtctcgggtccttctcctccgatcctgatacttacatcaaagaatttaaatatcttactcaatcttatgaactcacttggcatgatctctactttatcctctcttctaccctccttccagaagagaaggaaagagtgtggctcgcagcacaggcatatgccgatgaccttcatcagcaggatcctactaagcccgtaggagctgctgctgttccctgggaagagccttcctgggaataccaacccacagaacctggccaagtgtactgtagccatatgattacttgcctcattgcaggccttaacaaagctgcccataggctgtaaattttgaaaaacttaaagacatttcccaaaaggcagatgaaaatcctgcccaatctctttcccgccttacagaagctctccaaaaatatacccgcatcgaccctgcctcctgagaaggaactattgttctttctttaaaaaattttatttattttttaattattattatactttaagttttagggtacatgtgcacaatgtgcaggtttgttacatatgtaggaactattgttcttaatacccattttatttcccaatctgcccctgacatccggcacaaacttaaaaaggctgaagatggctctcaaaccccacaacaagacctccttaacctggctttcaaagtctttaataacagggacgagcaaaataaattagataaagcccaaagagatcgtgctaaataccagcttccagcagtggctatctgtcagtctagccatagtacccaagggcacaaaagacctgatagcagcaaacctcctgggccttgttttaagtgcggcaaagaaggccactggacgggggcatgtccccacccatgagtgccgaagagcccttgcctagtctgccagcagatgggcactggaagtctgactgtcctctcaacagatgggcagacaagcatgctcctcagagccaccatcccttcaacaagacaaaaagtgaagaatcacttgcactcccatagctccttggcctagccactgaagactgatgaggccagggcccctgggccccggctcccggcccccactgccatcactgcatcggagcccagggtaactctactagtagcaggtaagctgatctcttttttaattgatagtggggccacctactcagctttgcctgagttctcaggacccactcatccctctcaagtctcagttgtgggggttgacggactcatctcttgtccgcttgccaccagacctcttacttgttccctgtttgatgccattttctcacactctttccttatcatgcctcattgccccacccccattctaggctgagaccttttagccaaagtcaaagcttctatcaccttttcttgcccccttcaaccagagtcccctcctgctcctctccgctagtccggcccctgacccctttccccagtacccacttcctgcctctctcattaacccttccgtagctgctcaccatgaccccatcagaatccagttaaaagactcttccaaatttcccaacgttcctcaataccccatctctctaacccaccaaaagggcctacagcccatcgtaaacaagctctgctcatgcagtcttcttagaccaacacactctccatataacacccctatcctccctgttaaaaagtctgatggctcataccgactcgttcacaacctccaagccatcagtcaagctgtcctccctattcatcccatagtccataacccctatccacttctctctctcgtcgctaccaacaccaccctctacactgcaattgacctgaaggatgccttctttaccatttccctacaccctgattcccaaaacctatttgctttcacctggactgaccctgacaccctccagtcacaacaactcacatggactgtcctccctcagggcttcagggatagccctcatttctttggacaagctctagcccgaaacctcacttccttaaacctgtctcccagtcatcttcaatatgtggacgaccttcttctttgcagcccctctctaaaagactctcaaactcacacggccactgctctcttaaactttctcgctatcaaagggtatagggtctccccctccaaggcccaactctccatctccatgatgacttacttaggaattcaactttcccctggggcccaggctatgactccagccagggcagcattaatagaaaatctacccccaccctcctccaaaagcgaaatcctttccttcccagggctagcaggcttctttagaatatggatttccaactttgccctcctagctcatcccctctatgaagtggccaaaggccctcccaatgaacccctaaacccctcacataacatactccccagcttccacaaactccaaactgctcttgtcactgcgtcagctccgtccttacctgatatctcccaacctttcactctctatactgctgaaagctgaggaatagccctcggtgtcttaggacaacagaaaggaaatcctccttcctttgcccctgtagcttacctctctaaacaactagataacacagtcaaagggtggccagcctgctttaaagcactagaagtggtagccagcttagctctagaaagcaggaaactaactttcagccagaataccaccgtccacagttctcataatctacaagatctcctctcctcccaagcagtaagctcccttcctccttccaggattcaattactccatgccctctttataaaaaatcccaaattcagtcttaccagaagtgcttccctcaacccagcatccttactccccgtatcctcttcccttcctactcattcttccactgatatcctggaccacgtacagccacatttcccaaacatttcctccgagcctctcaccaaccccgatgatcaactattcatagatggctcctcttccaggcccaccagctaccccccagattgctggatatgcagttgtttcccttgaccaagtaattgaagccaggatcctcctcccaaaaagcagaactcatagctctcaccagggccctaaatctttccaaaggcaaacgagtcaacatttatacagactccaaatatgcctatcacattcctcgttcccacgctgctatctggcaaaagagaggactccttactgccaaaggaacccctatcactaatggccaccttatttactaactccttcaggccacacacctcccagctaaagcaggagttatacactgttgaggacatcgaacaggttcagatgaaatctcgaggcaacagaaaggccgatgaggcagcaaaagaagcctccctttcttctgcctctgcccctctccttcctgttatcccagcaatcctacccaagaactctcccaccgagaaagctttgctatacagcaaggagcctcctttcaaggggactggatagtcaaaaatcaaaagctcgtcctcccctaagagcagaccaaagaaattctgacatctcttcaccaatccttccatatcagtgtgcgcccccatacctactccttcaccctatttctcctccccccatctattcacctcactaagagacataacctcaaactgtcctatatgctctgttacttcctcccaaggggccctccactctccctccatccctacacatcccctcagaggaacactcccaggggaggactggcaaatagacttcacccacattcatcccgtcaagaggacaaaatttattcttactcttatagacaccttctctaggtgggtagaagcatttcctacctcttcagaaaaggccgcagaagtctcccaaattcttgtaacagaaatcatccctacatttggtctccctggctccatacaatcagacaatggcccctagcttcatctcccaaatcactcaacaggtttctcagtcccttggcatccagtggcgtctccatatcccatgctggccccagacatccggaaaagtcgaaagggcaaatgggatccttaaggctcagttaaccaaactcactcttgaagtccaaaaaccatggacctcccttttgcccatagcactggagagcattagagccagtccaaaagcaccctccttcctcagtccatttgagttaatatacggacgccctttcctcttacaaaacaggcccccttctaactctcagctaggagaatacctcccaacagtctccctcatgagctatctcctctgccaacaagccgaccaggccctcccaaaaccccacgaaggggtctccaatcccaaatagacttgctctccaattccaaaagactctttaagcagcagtgacacttcaaaaccatcgaggtttagatctcctcactgccgagaaaggcggcctgtgtatctttttagaagaggagtgctgtttctatactaaccagtcaggactagtacaagatgctgctggacgaataaatgaaaaagcttctggccgggtgcagtggctcacgcctgtaatcccagatctttgggaggctgaggcgggcggatcacgaggtcaggagatcgagaccatcttggctaacacggtgaaaccccgtctctactaaaaatagaaaaaattagccgggcgtggtggccggcagctgtactcccagctactcaggaggctgaggcaggagaatggcgtgtggggtgaacccgggaggcggagcttgcagtgagcagagatgatgccactgcactccagcctgggcgacagagcaagactccatctccaaaaaaaaaaaaaaaaaagctgctgaaatcaggcagcgcctttcagattcccggcccaggtgatttcgtaactcctgggcaccctggctactgcccttcctaggccctgccattaccctcttcctccatttagcacttggcccatgtctcttacatctccttacccagtttttacagggccgtgttagagccttcacccatggaacagtacaacctgccgtgggggatgcgctctagn

SEQ ID NO: 405739 - DNA, 6608 bp, Homo sapiens
  misc_feature (4836)..(4837): n is a, c, g, or t
gctgcctcctctgactgtggtggagcagctcagcaggataataagcttactcgcctgaccttgggtctctctctcatcctttctcttggctaaccttcattttggtgccaaaacccaggaaggggataggctctggctgggcgtccttagaggattctctctctctctctcctatcatcccttacccagccaacctccccttcccgaacctgctaaagaccctaaggatctcccaaaattctcccattgttggccacctcatccaccatcaaagcctctgagagggatgggcagacaagcatgctcctcagagccaccatcccttcaacaagacaaaaagtgaagaatcacttgcactcccatagctccttggcctagccactgaagactgatgaggccagggcccctgggccccggctcccggcccccactgccatcactgcatcggagcccagggtaactctactagtagcaggtaagctgatctcttttttaattgatagtggggccacctactcagctttgcctgagttctcaggacccactcatccctctcaagtctcagttgtgggggttgacggactcatctcttgtccgcttgccaccagacctcttacttgttccctgtttgatgccattttctcacactctttccttatcatgcctcattgccccacccccattctaggctgagaccttttagccaaagtcaaagcttctatcaccttttcttgcccccttcaaccagagtcccctcctgctcctctccgctagtccggcccctgacccctttccccagtacccacttcctgcctctctcattaacccttccgtagctgctcaccatgaccccatcagaatccagttaaaagactcttccaaatttcccaacgttcctcaataccccatctctctaacccaccaaaagggcctacagcccatcgtaaacaagctctgctcatgcagtcttcttagaccaacacactctccatataacacccctatcctccctgttaaaaagtctgatggctcataccgactcgttcacaacctccaagccatcagtcaagctgtcctccctattcatcccatagtccataacccctatccacttctctctctcgtcgctaccaacaccaccctctacactgcaattgacctgaaggatgccttctttaccatttccctacaccctgattcccaaaacctatttgctttcacctggactgaccctgacaccctccagtcacaacaactcacatggactgtcctccctcagggcttcagggatagccctcatttctttggacaagctctagcccgaaacctcacttccttaaacctgtctcccagtcatcttcaatatgtggacgaccttcttctttgcagcccctctctaaaagactctcaaactcacacggccactgctctcttaaactttctcgctatcaaagggtatagggtctccccctccaaggcccaactctccatctccatgatgacttacttaggaattcaactttcccctggggcccaggctatgactccagccagggcagcattaatagaaaatctacccccaccctcctccaaaagcgaaatcctttccttcccagggctagcaggcttctttagaatatggatttccaactttgccctcctagctcatcccctctatgaagtggccaaaggccctcccaatgaacccctaaacccctcacataacatactccccagcttccacaaactccaaactgctcttgtcactgcgtcagctccgtccttacctgatatctcccaacctttcactctctatactgctgaaagctgaggaatagccctcggtgtcttaggacaacagaaaggaaatcctccttcctttgcccctgtagcttacctctctaaacaactagataacacagtcaaagggtggccagcctgctttaaagcactagaagtggtagccagcttagctctagaaagcaggaaactaactttcagccagaataccaccgtccacagttctcataatctacaagatctcctctcctcccaagcagtaagctcccttcctccttccaggattcaattactccatgccctctttataaaaaatcccaaattcagtcttaccagaagtgcttccctcaacccagcatccttactccccgtatcctcttcccttcctactcattcttccactgatatcctggaccacgtacagccacatttcccaaacatttcctccgagcctctcaccaaccccgatgatcaactattcatagatggctcctcttccaggcccaccagctaccccccagattgctggatatgcagttgtttcccttgaccaagtaattgaagccaggatcctcctcccaaaaagcagaactcatagctctcaccagggccctaaatctttccaaaggcaaacgagtcaacatttatacagactccaaatatgcctatcacattcctcgttcccacgctgctatctggcaaaagagaggactccttactgccaaaggaacccctatcactaatggccaccttatttactaactccttcaggccacacacctcccagctaaagcaggagttatacactgttgaggacatcgaacaggttcagatgaaatctcgaggcaacagaaaggccgatgaggcagcaaaagaagcctccctttcttctgcctctgcccctctccttcctgttatcccagcaatcctacccaagaactctcccaccgagaaagctttgctatacagcaaggagcctcctttcaaggggactggatagtcaaaaatcaaaagctcgtcctcccctaagagcagaccaaagaaattctgacatctcttcaccaatccttccatatcagtgtgcgcccccatacctactccttcaccctatttctcctccccccatctattcacctcactaagagacataacctcaaactgtcctatatgctctgttacttcctcccaaggggccctccactctccctccatccctacacatcccctcagaggaacactcccaggggaggactggcaaatagacttcacccacattcatcccgtcaagaggacaaaatttattcttactcttatagacaccttctctaggtgggtagaagcatttcctacctcttcagaaaaggccgcagaagtctcccaaattcttgtaacagaaatcatccctacatttggtctccctggctccatacaatcagacaatggcccctagcttcatctcccaaatcactcaacaggtttctcagtcccttggcatccagtggcgtctccatatcccatgctggccccagacatccggaaaagtcgaaagggcaaatgggatccttaaggctcagttaaccaaactcactcttgaagtccaaaaaccatggacctcccttttgcccatagcactggagagcattagagccagtccaaaagcaccctccttcctcagtccatttgagttaatatacggacgccctttcctcttacaaaacaggcccccttctaactctcagctaggagaatacctcccaacagtctccctcatgagctatctcctctgccaacaagccgaccaggccctcccaaaaccccacgaaggggtctccaatcccaaatagacttgctctccaattccaaaagactctttaagcagcagtgacacttcaaaaccatcgaggtttagatctcctcactgccgagaaaggcggcctgtgtatctttttagaagaggagtgctgtttctatactaaccagtcaggactagtacaagatgctgctggacgaataaatgaaaaagcttctggccgggtgcagtggctcacgcctgtaatcccagatctttgggaggctgaggcgggcggatcacgaggtcaggagatcgagaccatcttggctaacacggtgaaaccccgtctctactaaaaatagaaaaaattagccgggcgtggtggccggcagctgtactcccagctactcaggaggctgaggcaggagaatggcgtgtggggtgaacccgggaggcggagcttgcagtgagcagagatgatgccactgcactccagcctgggcgacagagcaagactccatctccaaaaaaaaaaaaaaaaaagctgctgaaatcaggcagcgcctttcagattcccggcccaggtgatttcgtaactcctgggcaccctggctactgcccttcctaggccctgccattaccctcttcctccatttagcacttggcccatgtctcttacatctccttacccagtttttacagggccgtgttagagccttcacccatggaacagtacaagacatgatgctactccgagaataccgacagctccaggaacagcagtccctactacccagcctctccccccaaccatcgcccctattcagcaagaagcagccagaggacaacggcgcccctcttctattacctattaaaaggctggaatgttaggaacaagttgcaccagaacccctccccaccccaatgcagctgtcccttaccctgaatactctgcagctgcattcctggacccttatctaggcgctacagcaaggtcaccagacttgctttaaccctacgggcagcatgggggaggtcacgagaaacgtggataaacctaagttacaccctcttgtaaattcctatattgtaacctggtcacgagatgatatgtggtaaggttaaccaacaaacaaccccagggtctctctcccccatataaaaccctcattttgtaagctcagggctgcctcctttgactgtggtgaagcagcctggcaggttagtaaacttactctcctgannttgggtctctctctcgtcctttctctcggctaaccttacagcgccctcatccattctccaattataatgtgtttacacctttcctcctgcatgtctcacattttaccttgtcatcctcttacttgtgtatgtgtctatgcctcccagcatttgacagtacctgaaggtcaaagcctatctgctgtttacccttacaattctattcactcggcacgcactaggcacagaataaatgccattcatccctacttttacttcagggtacattttagagatctaagatttggtgtatctttcccattatccattcttattgcctcaaggctctcctcttataaatctagtggtatgcattactttgggggtaaggacaaatttatccagaacagagaagatttagttcagtctttagttttaaaataagcatttttaagtaatagcagagacaaaagtctgaaagccaacatagttttaatttaaaagaaatttgattttgctacagctttttggccaggagtaagtgaggatgctgtttcgaaagctggtcttgcatcttaagcagtacggtgtgggtcttaggggctggagtgtatcttgcaggaaacacagagtaggcaagaatgtgaggtggtgtaagactagtttgtctggttcaaaaagtaaaaaagaagactgaaaaaagtaggaaatctaacccaaagcaatcaatctttgagaagagcccagcacacttcccttccaattgatttgtcctacacccctccatgagcctaagcattagagcagaaatgactgagggtagcatccaagccactgggccaaggggcactggtacgatgaggataccgtgtcccacaattccagggtagtctgggaaaaacaaagcagagttcctgagaagaatgcagtagtggctgacagaaccagaaagggtgttgtagtgatatgtggccatgacatcagaagactaaaatgaggctatggatattccctagcaaatgtcttgggaacagaggccaaagccgaaagctcaagaattaatggaatgactacacctcaacgaaggttatagattagtgaggactgatgagtacaaaccagactcacacatccatcctcatcctcactccccacccccaggctacaatattacatatatgtcccctactcctgagggatggaaaagaggatgggtaggataagttcaaactgctttaatggctaacaaaattcacctttattcctttttatttttagttgacatgtaaaaattgtacatatttattggctacagagtgatattttgatacaagtataaagtgtgtaatgatcaaatcagagtaattagcacatcaatcacctcaaatagttatcacttatttgtactgggaacactcgaaatccttttctagctttgaaaaaatatacaataaattattgttaactgtattcaccacatagcactatagaacagtagaacagaatttattcctcctatattgctgtaatttgtatctgttaattaacctctccctagcctcccctccccctacccttcccaatctctcataaccacaattctactctctagatctatgagctcattttttaagtccctgcatttgagtgagaagatgaagtatttatctttctgcgcatgacttgctttgcttaacataatatcctccagattcatccacgttggtgcaaatggaaggattccatactttattttatgggtgattattgttccattgtgtgtataccatat

SEQ ID NO: 405740 - DNA, 8374 bp, Homo sapiens
  misc_feature (6602)..(6603): n is a, c, g, or t
gctgcctcctctgactgtggtggagcagctcagcaggataataagcttactcgcctgaccttgggtctctctctcatcctttctcttggctaaccttcattttggtgccaaaacccaggaaggggataggctctggctgggcgtccttagaggattctctctctctctctcctatcatcccttacccagccaacctccccttcccgaacctgctaaagaccctaaggatctcccaaaattctcccattgttggccacctcatccaccatcaaagcctctgagaggggtgagtaagagagacttttgcctattacctggaacccttgaccatctcttcactcccaaaagacccagcgctgggccaagggcttcctctggcctccaggcctctggttcctctgtttcctggacgcctgactccgcagctacctcctctattccatacaaggcctgcaagacaggcgccgccctctctcgtctttgtcgtctgtggtcccttcttcctctaccctcacctcctccattcactatgggagcctctcagtctacccctcccaagaccaccccccttgggtgtctcctccgcaatcgcaaggctctcggcctccgttcagggatccgttctaagaggcttatcttttactgcaatactgcatggcctcaataccaattggacaatggctcccaatggcccgaaaatggcactttcgatttcaatatacttagagacttagacaacttttgccatcgcaatgagaaatggtctgagattccttatattcaggctttcttcattctccgtaaccacccttctctctgccactcctgctctactttccaaatcctactcaccagctcaaaacctgactcatctcccgtcaccccacccacagacccagccgatgactcctcttcctttgaccccgtggattttctccctcctcgacagcatcatgatcctccaccagagcatcatgatcctccaccgtatgtccctgctccggctctacccctctcccccactctctccaaccaacccacttctgactctgagtcctctctgcctcctcccctcacccgctctcgggcccaatgtgctcagcaaccagctcccttgcttcctctccgggaagtagcgggagttgaggggatcgtccatgtccacgtccctttctccttctacgatctcttacagattgaagaacgtctcgggtccttctcctccgatcctgatacttacatcaaagaatttaaatatcttactcaatcttatgaactcacttggcatgatctctactttatcctctcttctaccctccttccagaagagaaggaaagagtgtggctcgcagcacaggcatatgccgatgaccttcatcagcaggatcctactaagcccgtaggagctgctgctgttccctgggaagagccttcctgggaataccaacccacagaacctggccaagtgtactgtagccatatgattacttgcctcattgcaggccttaacaaagctgcccataggctgtaaattttgaaaaacttaaagacatttcccaaaaggcagatgaaaatcctgcccaatctctttcccgccttacagaagctctccaaaaatatacccgcatcgaccctgcctcctgagaaggaactattgttctttctttaaaaaattttatttattttttaattattattatactttaagttttagggtacatgtgcacaatgtgcaggtttgttacatatgtaggaactattgttcttaatacccattttatttcccaatctgcccctgacatccggcacaaacttaaaaaggctgaagatggctctcaaaccccacaacaagacctccttaacctggctttcaaagtctttaataacagggacgagcaaaataaattagataaagcccaaagagatcgtgctaaataccagcttccagcagtggctatctgtcagtctagccatagtacccaagggcacaaaagacctgatagcagcaaacctcctgggccttgttttaagtgcggcaaagaaggccactggacgggggcatgtccccacccatgagtgccgaagagcccttgcctagtctgccagcagatgggcactggaagtctgactgtcctctcaacagatgggcagacaagcatgctcctcagagccaccatcccttcaacaagacaaaaagtgaagaatcacttgcactcccatagctccttggcctagccactgaagagctgatctcttttttaattgatagtggggccacctactcagctttgcctgagttctcaggacccactcatccctctcaagtctcagttgtgggggttgacggactcatctcttgtccgcttgccaccagacctcttacttgttccctgtttgatgccattttctcacactctttccttatcatgcctcattgccccacccccattctaggctgagaccttttagccaaagtcaaagcttctatcaccttttcttgcccccttcaaccagagtcccctcctgctcctctccgctagtccggcccctgacccctttccccagtacccacttcctgcctctctcattaacccttccgtagctgctcaccatgaccccatcagaatccagttaaaagactcttccaaatttcccaacgttcctcaataccccatctctctaacccaccaaaagggcctacagcccatcgtaaacaagctctgctcatgcagtcttcttagaccaacacactctccatataacacccctatcctccctgttaaaaagtctgatggctcataccgactcgttcacaacctccaagccatcagtcaagctgtcctccctattcatcccatagtccataacccctatccacttctctctctcgtcgctaccaacaccaccctctacactgcaattgacctgaaggatgccttctttaccatttccctacaccctgattcccaaaacctatttgctttcacctggactgaccctgacaccctccagtcacaacaactcacatggactgtcctccctcagggcttcagggatagccctcatttctttggacaagctctagcccgaaacctcacttccttaaacctgtctcccagtcatcttcaatatgtggacgaccttcttctttgcagcccctctctaaaagactctcaaactcacacggccactgctctcttaaactttctcgctatcaaagggtatagggtctccccctccaaggcccaactctccatctccatgatgacttacttaggaattcaactttcccctggggcccaggctatgactccagccagggcagcattaatagaaaatctacccccaccctcctccaaaagcgaaatcctttccttcccagggctagcaggcttctttagaatatggatttccaactttgccctcctagctcatcccctctatgaagtggccaaaggccctcccaatgaacccctaaacccctcacataacatactccccagcttccacaaactccaaactgctcttgtcactgcgtcagctccgtccttacctgatatctcccaacctttcactctctatactgctgaaagctgaggaatagccctcggtgtcttaggacaacagaaaggaaatcctccttcctttgcccctgtagcttacctctctaaacaactagataacacagtcaaagggtggccagcctgctttaaagcactagaagtggtagccagcttagctctagaaagcaggaaactaactttcagccagaataccaccgtccacagttctcataatctacaagatctcctctcctcccaagcagtaagctcccttcctccttccaggattcaattactccatgccctctttataaaaaatcccaaattcagtcttaccagaagtgcttccctcaacccagcatccttactccccgtatcctcttcccttcctactcattcttccactgatatcctggaccacgtacagccacatttcccaaacatttcctccgagcctctcaccaaccccgatgatcaactattcatagatggctcctcttccaggcccaccagctaccccccagattgctggatatgcagttgtttcccttgaccaagtaattgaagccaggatcctcctcccaaaaagcagaactcatagctctcaccagggccctaaatctttccaaaggcaaacgagtcaacatttatacagactccaaatatgcctatcacattcctcgttcccacgctgctatctggcaaaagagaggactccttactgccaaaggaacccctatcactaatggccaccttatttactaactccttcaggccacacacctcccagctaaagcaggagttatacactgttgaggacatcgaacaggttcagatgaaatctcgaggcaacagaaaggccgatgaggcagcaaaagaagcctccctttcttctgcctctgcccctctccttcctgttatcccagcaatcctacccaagaactctcccaccgagaaagctttgctatacagcaaggagcctcctttcaaggggactggatagtcaaaaatcaaaagctcgtcctcccctaagagcagaccaaagaaattctgacatctcttcaccaatccttccatatcagtgtgcgcccccatacctactccttcaccctatttctcctccccccatctattcacctcactaagagacataacctcaaactgtcctatatgctctgttacttcctcccaaggggccctccactctccctccatccctacacatcccctcagaggaacactcccaggggaggactggcaaatagacttcacccacattcatcccgtcaagaggacaaaatttattcttactcttatagacaccttctctaggtgggtagaagcatttcctacctcttcagaaaaggccgcagaagtctcccaaattcttgtaacagaaatcatccctacatttggtctccctggctccatacaatcagacaatggcccctagcttcatctcccaaatcactcaacaggtttctcagtcccttggcatccagtggcgtctccatatcccatgctggccccagacatccggaaaagtcgaaagggcaaatgggatccttaaggctcagttaaccaaactcactcttgaagtccaaaaaccatggacctcccttttgcccatagcactggagagcattagagccagtccaaaagcaccctccttcctcagtccatttgagttaatatacggacgccctttcctcttacaaaacaggcccccttctaactctcagctaggagaatacctcccaacagtctccctcatgagctatctcctctgccaacaagccgaccaggccctcccaaaaccccacgaaggggtctccaatcccaaatagacttgctctccaattccaaaagactctttaagcagcagtgacacttcaaaaccatcgaggtttagatctcctcactgccgagaaaggcggcctgtgtatctttttagaagaggagtgctgtttctatactaaccagtcaggactagtacaagatgctgctggacgaataaatgaaaaagcttctggccgggtgcagtggctcacgcctgtaatcccagatctttgggaggctgaggcgggcggatcacgaggtcaggagatcgagaccatcttggctaacacggtgaaaccccgtctctactaaaaatagaaaaaattagccgggcgtggtggccggcagctgtactcccagctactcaggaggctgaggcaggagaatggcgtgtggggtgaacccgggaggcggagcttgcagtgagcagagatgatgccactgcactccagcctgggcgacagagcaagactccatctccaaaaaaaaaaaaaaaaaagctgctgaaatcaggcagcgcctttcagattcccggcccaggtgatttcgtaactcctgggcaccctggctactgcccttcctaggccctgccattaccctcttcctccatttagcacttggcccatgtctcttacatctccttacccagtttttacagggccgtgttagagccttcacccatggaacagtacaagacatgatgctactccgagaataccgacagctccaggaacagcagtccctactacccagcctctccccccaaccatcgcccctattcagcaagaagcagccagaggacaacggcgcccctcttctattacctattaaaaggctggaatgttaggaacaagttgcaccagaacccctccccaccccaatgcagctgtcccttaccctgaatactctgcagctgcattcctggacccttatctaggcgctacagcaaggtcaccagacttgctttaaccctacgggcagcatgggggaggtcacgagaaacgtggataaacctaagttacaccctcttgtaaattcctatattgtaacctggtcacgagatgatatgtggtaaggttaaccaacaaacaaccccagggtctctctcccccatataaaaccctcattttgtaagctcagggctgcctcctttgactgtggtgaagcagcctggcaggttagtaaacttactctcctgannttgggtctctctctcgtcctttctctcggctaaccttacagcgccctcatccattctccaattataatgtgtttacacctttcctcctgcatgtctcacattttaccttgtcatcctcttacttgtgtatgtgtctatgcctcccagcatttgacagtacctgaaggtcaaagcctatctgctgtttacccttacaattctattcactcggcacgcactaggcacagaataaatgccattcatccctacttttacttcagggtacattttagagatctaagatttggtgtatctttcccattatccattcttattgcctcaaggctctcctcttataaatctagtggtatgcattactttgggggtaaggacaaatttatccagaacagagaagatttagttcagtctttagttttaaaataagcatttttaagtaatagcagagacaaaagtctgaaagccaacatagttttaatttaaaagaaatttgattttgctacagctttttggccaggagtaagtgaggatgctgtttcgaaagctggtcttgcatcttaagcagtacggtgtgggtcttaggggctggagtgtatcttgcaggaaacacagagtaggcaagaatgtgaggtggtgtaagactagtttgtctggttcaaaaagtaaaaaagaagactgaaaaaagtaggaaatctaacccaaagcaatcaatctttgagaagagcccagcacacttcccttccaattgatttgtcctacacccctccatgagcctaagcattagagcagaaatgactgagggtagcatccaagccactgggccaaggggcactggtacgatgaggataccgtgtcccacaattccagggtagtctgggaaaaacaaagcagagttcctgagaagaatgcagtagtggctgacagaaccagaaagggtgttgtagtgatatgtggccatgacatcagaagactaaaatgaggctatggatattccctagcaaatgtcttgggaacagaggccaaagccgaaagctcaagaattaatggaatgactacacctcaacgaaggttatagattagtgaggactgatgagtacaaaccagactcacacatccatcctcatcctcactccccacccccaggctacaatattacatatatgtcccctactcctgagggatggaaaagaggatgggtaggataagttcaaactgctttaatggctaacaaaattcacctttattcctttttatttttagttgacatgtaaaaattgtacatatttattggctacagagtgatattttgatacaagtataaagtgtgtaatgatcaaatcagagtaattagcacatcaatcacctcaaatagttatcacttatttgtactgggaacactcgaaatccttttctagctttgaaaaaatatacaataaattattgttaactgtattcaccacatagcactatagaacagtagaacagaatttattcctcctatattgctgtaatttgtatctgttaattaacctctccctagcctcccctccccctacccttcccaatctctcataaccacaattctactctctagatctatgagctcattttttaagtccctgcatttgagtgagaagatgaagtatttatctttctgcgcatgacttgctttgcttaacataatatcctccagattcatccacgttggtgcaaatggaaggattccatactttattttatgggtgattattgttccattgtgtgtataccatat

SEQ ID NO: 405741 - DNA, 8256 bp, Homo sapiens
  misc_feature (6484)..(6485): n is a, c, g, or t
gctgcctcctctgactgtggtggagcagctcagcaggataataagcttactcgcctgaccttgggtctctctctcatcctttctcttggctaaccttcattttggtgccaaaacccaggaaggggataggctctggctgggcgtccttagaggattctctctctctctctcctatcatcccttacccagccaacctccccttcccgaacctgctaaagaccctaaggatctcccaaaattctcccattgttggccacctcatccaccatcaaagcctctgagaggggtgagtaagagagacttttgcctattacctggaacccttgaccatctcttcactcccaaaagacccagcgctgggccaagggcttcctctggcctccaggcctctggttcctctgtttcctggacgcctgactccgcagctacctcctctattccatacaaggcctgcaagacaggcgccgccctctctcgtctttgtcgtctgtggtcccttcttcctctaccctcacctcctccattcactatgggagcctctcagtctacccctcccaagaccaccccccttgggtgtctcctccgcaatcgcaaggctctcggcctccgttcagggatccgttctaagaggcttatcttttactgcaatactgcatggcctcaataccaattggacaatggctcccaatggcccgaaaatggcactttcgatttcaatatacttagagacttagacaacttttgccatcgcaatgagaaatggtctgagattccttatattcaggctttcttcattctccgtaaccacccttctctctgccactcctgctctactttccaaatcctactcaccagctcaaaacctgactcatctcccgtcaccccacccacagacccagccgatgactcctcttcctttgaccccgtggattttctccctcctcgacagcatcatgatcctccaccagagcatcatgatcctccaccgtatgtccctgctccggctctacccctctcccccactctctccaaccaacccacttctgactctgagtcctctctgcctcctcccctcacccgctctcgggcccaatgtgctcagcaaccagctcccttgcttcctctccgggaagtagcgggagttgaggggatcgtccatgtccacgtccctttctccttctacgatctcttacagattgaagaacgtctcgggtccttctcctccgatcctgatacttacatcaaagaatttaaatatcttactcaatcttatgaactcacttggcatgatctctactttatcctctcttctaccctccttccagaagagaaggaaagagtgtggctcgcagcacaggcatatgccgatgaccttcatcagcaggatcctactaagcccgtaggagctgctgctgttccctgggaagagccttcctgggaataccaacccacagaacctggccaagtgtactgtagccatatgattacttgcctcattgcaggccttaacaaagctgcccataggctgtaaattttgaaaaacttaaagacatttcccaaaaggcagatgaaaatcctgcccaatctctttcccgccttacagaagctctccaaaaatatacccgcatcgaccctgcctcctgagaaggaactattgttctttctttaaaaaattttatttattttttaattattattatactttaagttttagggtacatgtgcacaatgtgcaggtttgttacatatgtaggaactattgttcttaatacccattttatttcccaatctgcccctgacatccggcacaaacttaaaaaggctgaagatggctctcaaaccccacaacaagacctccttaacctggctttcaaagtctttaataacagggacgagcaaaataaattagataaagcccaaagagatcgtgctaaataccagcttccagcagtggctatctgtcagtctagccatagtacccaagggcacaaaagacctgatagcagcaaacctcctgggccttgttttaagtgcggcaaagaaggccactggacgggggcatgtccccacccatgagtgccgaagagcccttgcctagtctgccagcagatgggcactggaagtctgactgtcctctcaacagatgggcagacaagcatgctcctcagagccaccatcccttcaacaagacaaaaagtgaagaatcacttgcactcccatagctccttggcctagccactgaagactgatgaggccagggcccctgggccccggctcccggcccattttctcacactctttccttatcatgcctcattgccccacccccattctaggctgagaccttttagccaaagtcaaagcttctatcaccttttcttgcccccttcaaccagagtcccctcctgctcctctccgctagtccggcccctgacccctttccccagtacccacttcctgcctctctcattaacccttccgtagctgctcaccatgaccccatcagaatccagttaaaagactcttccaaatttcccaacgttcctcaataccccatctctctaacccaccaaaagggcctacagcccatcgtaaacaagctctgctcatgcagtcttcttagaccaacacactctccatataacacccctatcctccctgttaaaaagtctgatggctcataccgactcgttcacaacctccaagccatcagtcaagctgtcctccctattcatcccatagtccataacccctatccacttctctctctcgtcgctaccaacaccaccctctacactgcaattgacctgaaggatgccttctttaccatttccctacaccctgattcccaaaacctatttgctttcacctggactgaccctgacaccctccagtcacaacaactcacatggactgtcctccctcagggcttcagggatagccctcatttctttggacaagctctagcccgaaacctcacttccttaaacctgtctcccagtcatcttcaatatgtggacgaccttcttctttgcagcccctctctaaaagactctcaaactcacacggccactgctctcttaaactttctcgctatcaaagggtatagggtctccccctccaaggcccaactctccatctccatgatgacttacttaggaattcaactttcccctggggcccaggctatgactccagccagggcagcattaatagaaaatctacccccaccctcctccaaaagcgaaatcctttccttcccagggctagcaggcttctttagaatatggatttccaactttgccctcctagctcatcccctctatgaagtggccaaaggccctcccaatgaacccctaaacccctcacataacatactccccagcttccacaaactccaaactgctcttgtcactgcgtcagctccgtccttacctgatatctcccaacctttcactctctatactgctgaaagctgaggaatagccctcggtgtcttaggacaacagaaaggaaatcctccttcctttgcccctgtagcttacctctctaaacaactagataacacagtcaaagggtggccagcctgctttaaagcactagaagtggtagccagcttagctctagaaagcaggaaactaactttcagccagaataccaccgtccacagttctcataatctacaagatctcctctcctcccaagcagtaagctcccttcctccttccaggattcaattactccatgccctctttataaaaaatcccaaattcagtcttaccagaagtgcttccctcaacccagcatccttactccccgtatcctcttcccttcctactcattcttccactgatatcctggaccacgtacagccacatttcccaaacatttcctccgagcctctcaccaaccccgatgatcaactattcatagatggctcctcttccaggcccaccagctaccccccagattgctggatatgcagttgtttcccttgaccaagtaattgaagccaggatcctcctcccaaaaagcagaactcatagctctcaccagggccctaaatctttccaaaggcaaacgagtcaacatttatacagactccaaatatgcctatcacattcctcgttcccacgctgctatctggcaaaagagaggactccttactgccaaaggaacccctatcactaatggccaccttatttactaactccttcaggccacacacctcccagctaaagcaggagttatacactgttgaggacatcgaacaggttcagatgaaatctcgaggcaacagaaaggccgatgaggcagcaaaagaagcctccctttcttctgcctctgcccctctccttcctgttatcccagcaatcctacccaagaactctcccaccgagaaagctttgctatacagcaaggagcctcctttcaaggggactggatagtcaaaaatcaaaagctcgtcctcccctaagagcagaccaaagaaattctgacatctcttcaccaatccttccatatcagtgtgcgcccccatacctactccttcaccctatttctcctccccccatctattcacctcactaagagacataacctcaaactgtcctatatgctctgttacttcctcccaaggggccctccactctccctccatccctacacatcccctcagaggaacactcccaggggaggactggcaaatagacttcacccacattcatcccgtcaagaggacaaaatttattcttactcttatagacaccttctctaggtgggtagaagcatttcctacctcttcagaaaaggccgcagaagtctcccaaattcttgtaacagaaatcatccctacatttggtctccctggctccatacaatcagacaatggcccctagcttcatctcccaaatcactcaacaggtttctcagtcccttggcatccagtggcgtctccatatcccatgctggccccagacatccggaaaagtcgaaagggcaaatgggatccttaaggctcagttaaccaaactcactcttgaagtccaaaaaccatggacctcccttttgcccatagcactggagagcattagagccagtccaaaagcaccctccttcctcagtccatttgagttaatatacggacgccctttcctcttacaaaacaggcccccttctaactctcagctaggagaatacctcccaacagtctccctcatgagctatctcctctgccaacaagccgaccaggccctcccaaaaccccacgaaggggtctccaatcccaaatagacttgctctccaattccaaaagactctttaagcagcagtgacacttcaaaaccatcgaggtttagatctcctcactgccgagaaaggcggcctgtgtatctttttagaagaggagtgctgtttctatactaaccagtcaggactagtacaagatgctgctggacgaataaatgaaaaagcttctggccgggtgcagtggctcacgcctgtaatcccagatctttgggaggctgaggcgggcggatcacgaggtcaggagatcgagaccatcttggctaacacggtgaaaccccgtctctactaaaaatagaaaaaattagccgggcgtggtggccggcagctgtactcccagctactcaggaggctgaggcaggagaatggcgtgtggggtgaacccgggaggcggagcttgcagtgagcagagatgatgccactgcactccagcctgggcgacagagcaagactccatctccaaaaaaaaaaaaaaaaaagctgctgaaatcaggcagcgcctttcagattcccggcccaggtgatttcgtaactcctgggcaccctggctactgcccttcctaggccctgccattaccctcttcctccatttagcacttggcccatgtctcttacatctccttacccagtttttacagggccgtgttagagccttcacccatggaacagtacaagacatgatgctactccgagaataccgacagctccaggaacagcagtccctactacccagcctctccccccaaccatcgcccctattcagcaagaagcagccagaggacaacggcgcccctcttctattacctattaaaaggctggaatgttaggaacaagttgcaccagaacccctccccaccccaatgcagctgtcccttaccctgaatactctgcagctgcattcctggacccttatctaggcgctacagcaaggtcaccagacttgctttaaccctacgggcagcatgggggaggtcacgagaaacgtggataaacctaagttacaccctcttgtaaattcctatattgtaacctggtcacgagatgatatgtggtaaggttaaccaacaaacaaccccagggtctctctcccccatataaaaccctcattttgtaagctcagggctgcctcctttgactgtggtgaagcagcctggcaggttagtaaacttactctcctgannttgggtctctctctcgtcctttctctcggctaaccttacagcgccctcatccattctccaattataatgtgtttacacctttcctcctgcatgtctcacattttaccttgtcatcctcttacttgtgtatgtgtctatgcctcccagcatttgacagtacctgaaggtcaaagcctatctgctgtttacccttacaattctattcactcggcacgcactaggcacagaataaatgccattcatccctacttttacttcagggtacattttagagatctaagatttggtgtatctttcccattatccattcttattgcctcaaggctctcctcttataaatctagtggtatgcattactttgggggtaaggacaaatttatccagaacagagaagatttagttcagtctttagttttaaaataagcatttttaagtaatagcagagacaaaagtctgaaagccaacatagttttaatttaaaagaaatttgattttgctacagctttttggccaggagtaagtgaggatgctgtttcgaaagctggtcttgcatcttaagcagtacggtgtgggtcttaggggctggagtgtatcttgcaggaaacacagagtaggcaagaatgtgaggtggtgtaagactagtttgtctggttcaaaaagtaaaaaagaagactgaaaaaagtaggaaatctaacccaaagcaatcaatctttgagaagagcccagcacacttcccttccaattgatttgtcctacacccctccatgagcctaagcattagagcagaaatgactgagggtagcatccaagccactgggccaaggggcactggtacgatgaggataccgtgtcccacaattccagggtagtctgggaaaaacaaagcagagttcctgagaagaatgcagtagtggctgacagaaccagaaagggtgttgtagtgatatgtggccatgacatcagaagactaaaatgaggctatggatattccctagcaaatgtcttgggaacagaggccaaagccgaaagctcaagaattaatggaatgactacacctcaacgaaggttatagattagtgaggactgatgagtacaaaccagactcacacatccatcctcatcctcactccccacccccaggctacaatattacatatatgtcccctactcctgagggatggaaaagaggatgggtaggataagttcaaactgctttaatggctaacaaaattcacctttattcctttttatttttagttgacatgtaaaaattgtacatatttattggctacagagtgatattttgatacaagtataaagtgtgtaatgatcaaatcagagtaattagcacatcaatcacctcaaatagttatcacttatttgtactgggaacactcgaaatccttttctagctttgaaaaaatatacaataaattattgttaactgtattcaccacatagcactatagaacagtagaacagaatttattcctcctatattgctgtaatttgtatctgttaattaacctctccctagcctcccctccccctacccttcccaatctctcataaccacaattctactctctagatctatgagctcattttttaagtccctgcatttgagtgagaagatgaagtatttatctttctgcgcatgacttgctttgcttaacataatatcctccagattcatccacgttggtgcaaatggaaggattccatactttattttatgggtgattattgttccattgtgtgtataccatat

SEQ ID NO: 405742 - DNA, 5066 bp, Homo sapiens
  misc_feature (3294)..(3295): n is a, c, g, or t
ttccggttacggcactgcttcggatgcacgcacctgtaggcagcaggaaccaccatccgctttttatgtcgtagggctagcaggcttctttagaatatggatttccaactttgccctcctagctcatcccctctatgaagtggccaaaggccctcccaatgaacccctaaacccctcacataacatactccccagcttccacaaactccaaactgctcttgtcactgcgtcagctccgtccttacctgatatctcccaacctttcactctctatactgctgaaagctgaggaatagccctcggtgtcttaggacaacagaaaggaaatcctccttcctttgcccctgtagcttacctctctaaacaactagataacacagtcaaagggtggccagcctgctttaaagcactagaagtggtagccagcttagctctagaaagcaggaaactaactttcagccagaataccaccgtccacagttctcataatctacaagatctcctctcctcccaagcagtaagctcccttcctccttccaggattcaattactccatgccctctttataaaaaatcccaaattcagtcttaccagaagtgcttccctcaacccagcatccttactccccgtatcctcttcccttcctactcattcttccactgatatcctggaccacgtacagccacatttcccaaacatttcctccgagcctctcaccaaccccgatgatcaactattcatagatggctcctcttccaggcccaccagctaccccccagattgctggatatgcagttgtttcccttgaccaagtaattgaagccaggatcctcctcccaaaaagcagaactcatagctctcaccagggccctaaatctttccaaaggcaaacgagtcaacatttatacagactccaaatatgcctatcacattcctcgttcccacgctgctatctggcaaaagagaggactccttactgccaaaggaacccctatcactaatggccaccttatttactaactccttcaggccacacacctcccagctaaagcaggagttatacactgttgaggacatcgaacaggttcagatgaaatctcgaggcaacagaaaggccgatgaggcagcaaaagaagcctccctttcttctgcctctgcccctctccttcctgttatcccagcaatcctacccaagaactctcccaccgagaaagctttgctatacagcaaggagcctcctttcaaggggactggatagtcaaaaatcaaaagctcgtcctcccctaagagcagaccaaagaaattctgacatctcttcaccaatccttccatatcagtgtgcgcccccatacctactccttcaccctatttctcctccccccatctattcacctcactaagagacataacctcaaactgtcctatatgctctgttacttcctcccaaggggccctccactctccctccatccctacacatcccctcagaggaacactcccaggggaggactggcaaatagacttcacccacattcatcccgtcaagaggacaaaatttattcttactcttatagacaccttctctaggtgggtagaagcatttcctacctcttcagaaaaggccgcagaagtctcccaaattcttgtaacagaaatcatccctacatttggtctccctggctccatacaatcagacaatggcccctagcttcatctcccaaatcactcaacaggtttctcagtcccttggcatccagtggcgtctccatatcccatgctggccccagacatccggaaaagtcgaaagggcaaatgggatccttaaggctcagttaaccaaactcactcttgaagtccaaaaaccatggacctcccttttgcccatagcactggagagcattagagccagtccaaaagcaccctccttcctcagtccatttgagttaatatacggacgccctttcctcttacaaaacaggcccccttctaactctcagctaggagaatacctcccaacagtctccctcatgagctatctcctctgccaacaagccgaccaggccctcccaaaaccccacgaaggggtctccaatcccaaatagacttgctctccaattccaaaagactctttaagcagcagtgacacttcaaaaccatcgaggtttagatctcctcactgccgagaaaggcggcctgtgtatctttttagaagaggagtgctgtttctatactaaccagtcaggactagtacaagatgctgctggacgaataaatgaaaaagcttctggccgggtgcagtggctcacgcctgtaatcccagatctttgggaggctgaggcgggcggatcacgaggtcaggagatcgagaccatcttggctaacacggtgaaaccccgtctctactaaaaatagaaaaaattagccgggcgtggtggccggcagctgtactcccagctactcaggaggctgaggcaggagaatggcgtgtggggtgaacccgggaggcggagcttgcagtgagcagagatgatgccactgcactccagcctgggcgacagagcaagactccatctccaaaaaaaaaaaaaaaaaagctgctgaaatcaggcagcgcctttcagattcccggcccaggtgatttcgtaactcctgggcaccctggctactgcccttcctaggccctgccattaccctcttcctccatttagcacttggcccatgtctcttacatctccttacccagtttttacagggccgtgttagagccttcacccatggaacagtacaagacatgatgctactccgagaataccgacagctccaggaacagcagtccctactacccagcctctccccccaaccatcgcccctattcagcaagaagcagccagaggacaacggcgcccctcttctattacctattaaaaggctggaatgttaggaacaagttgcaccagaacccctccccaccccaatgcagctgtcccttaccctgaatactctgcagctgcattcctggacccttatctaggcgctacagcaaggtcaccagacttgctttaaccctacgggcagcatgggggaggtcacgagaaacgtggataaacctaagttacaccctcttgtaaattcctatattgtaacctggtcacgagatgatatgtggtaaggttaaccaacaaacaaccccagggtctctctcccccatataaaaccctcattttgtaagctcagggctgcctcctttgactgtggtgaagcagcctggcaggttagtaaacttactctcctgannttgggtctctctctcgtcctttctctcggctaaccttacagcgccctcatccattctccaattataatgtgtttacacctttcctcctgcatgtctcacattttaccttgtcatcctcttacttgtgtatgtgtctatgcctcccagcatttgacagtacctgaaggtcaaagcctatctgctgtttacccttacaattctattcactcggcacgcactaggcacagaataaatgccattcatccctacttttacttcagggtacattttagagatctaagatttggtgtatctttcccattatccattcttattgcctcaaggctctcctcttataaatctagtggtatgcattactttgggggtaaggacaaatttatccagaacagagaagatttagttcagtctttagttttaaaataagcatttttaagtaatagcagagacaaaagtctgaaagccaacatagttttaatttaaaagaaatttgattttgctacagctttttggccaggagtaagtgaggatgctgtttcgaaagctggtcttgcatcttaagcagtacggtgtgggtcttaggggctggagtgtatcttgcaggaaacacagagtaggcaagaatgtgaggtggtgtaagactagtttgtctggttcaaaaagtaaaaaagaagactgaaaaaagtaggaaatctaacccaaagcaatcaatctttgagaagagcccagcacacttcccttccaattgatttgtcctacacccctccatgagcctaagcattagagcagaaatgactgagggtagcatccaagccactgggccaaggggcactggtacgatgaggataccgtgtcccacaattccagggtagtctgggaaaaacaaagcagagttcctgagaagaatgcagtagtggctgacagaaccagaaagggtgttgtagtgatatgtggccatgacatcagaagactaaaatgaggctatggatattccctagcaaatgtcttgggaacagaggccaaagccgaaagctcaagaattaatggaatgactacacctcaacgaaggttatagattagtgaggactgatgagtacaaaccagactcacacatccatcctcatcctcactccccacccccaggctacaatattacatatatgtcccctactcctgagggatggaaaagaggatgggtaggataagttcaaactgctttaatggctaacaaaattcacctttattcctttttatttttagttgacatgtaaaaattgtacatatttattggctacagagtgatattttgatacaagtataaagtgtgtaatgatcaaatcagagtaattagcacatcaatcacctcaaatagttatcacttatttgtactgggaacactcgaaatccttttctagctttgaaaaaatatacaataaattattgttaactgtattcaccacatagcactatagaacagtagaacagaatttattcctcctatattgctgtaatttgtatctgttaattaacctctccctagcctcccctccccctacccttcccaatctctcataaccacaattctactctctagatctatgagctcattttttaagtccctgcatttgagtgagaagatgaagtatttatctttctgcgcatgacttgctttgcttaacataatatcctccagattcatccacgttggtgcaaatggaaggattccatactttattttatgggtgattattgttccattgtgtgtataccatat

SEQ ID NO: 405743 - DNA, 2728 bp, Homo sapiens
gctgcctcctctgactgtggtggagcagctcagcaggataataagcttactcgcctgaccttgggtctctctctcatcctttctcttggctaaccttcattttggtgccaaaacccaggaaggggataggctctggctgggcgtccttagaggattctctctctctctctcctatcatcccttacccagccaacctccccttcccgaacctgctaaagaccctaaggatctcccaaaattctcccattgttggccacctcatccaccatcaaagcctctgagaggggtgagtaagagagacttttgcctattacctggaacccttgaccatctcttcactcccaaaagacccagcgctgggccaagggcttcctctggcctccaggcctctggttcctctgtttcctggacgcctgactccgcagctacctcctctattccatacaaggcctgcaagacaggcgccgccctctctcgtctttgtcgtctgtggtcccttcttcctctaccctcacctcctccattcactatgggagcctctcagtctacccctcccaagaccaccccccttgggtgtctcctccgcaatcgcaaggctctcggcctccgttcagggatccgttctaagaggcttatcttttactgcaatactgcatggcctcaataccaattggacaatggctcccaatggcccgaaaatggcactttcgatttcaatatacttagagacttagacaacttttgccatcgcaatgagaaatggtctgagattccttatattcaggctttcttcattctccgtaaccacccttctctctgccactcctgctctactttccaaatcctactcaccagctcaaaacctgactcatctcccgtcaccccacccacagacccagccgatgactcctcttcctttgaccccgtggattttctccctcctcgacagcatcatgatcctccaccagagcatcatgatcctccaccgtatgtccctgctccggctctacccctctcccccactctctccaaccaacccacttctgactctgagtcctctctgcctcctcccctcacccgctctcgggcccaatgtgctcagcaaccagctcccttgcttcctctccgggaagtagcgggagttgaggggatcgtccatgtccacgtccctttctccttctacgatctcttacagattgaagaacgtctcgggtccttctcctccgatcctgatacttacatcaaagaatttaaatatcttactcaatcttatgaactcacttggcatgatctctactttatcctctcttctaccctccttccagaagagaaggaaagagtgtggctcgcagcacaggcatatgccgatgaccttcatcagcaggatcctactaagcccgtaggagctgctgctgttccctgggaagagccttcctgggaataccaacccacagaacctggccaagtgtactgtagccatatgattacttgcctcattgcaggccttaacaaagctgcccataggctgtaaattttgaaaaacttaaagacatttcccaaaaggcagatgaaaatcctgcccaatctctttcccgccttacagaagctctccaaaaatatacccgcatcgaccctgcctcctgagaaggaactattgttctttctttaaaaaattttatttattttttaattattattatactttaagttttagggtacatgtgcacaatgtgcaggtttgttacatatgtaggaactattgttcttaatacccattttatttcccaatctgcccctgacatccggcacaaacttaaaaaggctgaagatggctctcaaaccccacaacaagacctccttaacctggctttcaaagtctttaataacagggacgagcaaaataaattagataaagcccaaagagatcgtgctaaataccagcttccagcagtggctatctgtcagtctagccatagtacccaagggcacaaaagacctgatagcagcaaacctcctgggccttgttttaagtgcggcaaagaaggccactggacgggggcatgtccccacccatgagtgccgaagagcccttgcctagtctgccagcagatgggcactggaagtctgactgtcctctcaacagatgggcagacaagcatgctcctcagagccaccatcccttcaacaagacaaaaagtgaagaatcacttgcactcccatagctccttggcctagccactgaagactgatgaggccagggcccctgggccccggctcccggcccccactgccatcactgcatcggagcccagggtaactctactagtagcaggtaagctgatctcttttttaattgatagtggggccacctactcagctttgcctgagttctcaggacccactcatccctctcaagtctcagttgtgggggttgacggactcatctcttgtccgcttgccaccagacctcttacttgttccctgtttgatgccattttctcacactctttccttatcatgcctcattgccccacccccattctaggctgagaccttttagccaaagtcaaagcttctatcaccttttcttgcccccttcaaccagagtcccctcctgctcctctccgctagtccggcccctgacccctttccccagtacccacttccagactctattccgacaccctcccacatggaggaaacgcaacagaaatccaatctaactgct

SEQ ID NO: 405744 - DNA, 4690 bp, Homo sapiens
  misc_feature (2918)..(2919): n is a, c, g, or t
gctgcctcctctgactgtggtggagcagctcagcaggataataagcttactcgcctgaccttgggtctctctctcatcctttctcttggctaaccttcattttggtgccaaaacccaggaaggggataggctctggctgggcgtccttagaggattctctctctctctctcctatcatcccttacccagccaacctccccttcccgaacctgctaaagaccctaaggatctcccaaaattctcccattgttggccacctcatccaccatcaaagcctctgagaggggtgagtaagagagacttttgcctattacctggaacccttgaccatctcttcactcccaaaagacccagcgctgggccaagggcttcctctggcctccaggcctctggttcctctgtttcctggacgcctgactccgcagctacctcctctattccatacaaggcctgcaagacaggcgccgccctctctcgtctttgtcgtctgtggtcccttcttcctctaccctcacctcctccattcactatgggagcctctcagtctacccctcccaagaccaccccccttgggtgtctcctccgcaatcgcaaggctctcggcctccgttcagggatccgttctaagaggcttatcttttactgcaatactgcatggcctcaataccaattggacaatggctcccaatggcccgaaaatggcactttcgatttcaatatacttagagacttagacaacttttgccatcgcaatgagaaatggtctgagattccttatattcaggctttcttcattctccgtaaccacccttctctctgccactcctgctctactttccaaatcctactcaccagctcaaaacctgactcatctcccgtcaccccacccacagacccagccgatgactcctcttcctttgaccccgtggattttctccctcctcgacagcatcatgatcctccaccagagcatcatgatcctccaccgtatgtccctgctccggctctacccctctcccccactctctccaaccaacccacttctgactctgagtcctctctgcctcctcccctcacccgctctcgggcccaatgtgctcagcaaccagctcccttgcttcctctccgggaagtagcgggagttgaggggatcgtccatgtccacgtccctttctccttctacgatctcttacagattgaagaacgtctcgggtccttctcctccgatcctgatacttacatcaaagaatttaaatatcttactcaatcttatgaactcacttggcatgatctctactttatcctctcttctaccctccttccagaagagaaggaaagagtgtggctcgcagcacaggcatatgccgatgaccttcatcagcaggatcctactaagcccgtaggagctgctgctgttccctgggaagagccttcctgggaataccaacccacagaacctggccaagtgtactgtagccatatgattacttgcctcattgcaggccttaacaaagctgcccataggctgtaaattttgaaaaacttaaagacatttcccaaaaggcagatgaaaatcctgcccaatctctttcccgccttacagaagctctccaaaaatatacccgcatcgaccctgcctcctgagaaggaactattgttctttctttaaaaaattttatttattttttaattattattatactttaagttttagggtacatgtgcacaatgtgcaggtttgttacatatgtaggaactattgttcttaatacccattttatttcccaatctgcccctgacatccggcacaaacttaaaaaggctgaagatggctctcaaaccccacaacaagacctccttaacctggctttcaaagtctttaataacagggacgagcaaaataaattagataaagcccaaagagatcgtgctaaataccagcttccagcagtggctatctgtcagtctagccatagtacccaagggcacaaaagacctgatagcagcaaacctcctgggccttgttttaagtgcggcaaagaaggccactggacgggggcatgtccccacccatgagtgccgaagagcccttgcctagtctgccagcagatgggcactggaagtctgactgtcctctcaacagatgggcagacaagcatgctcctcagagccaccatcccttcaacaagacaaaaagtgaagaatcacttgcactcccatagctccttggcctagccactgaagactgatgaggccagggcccctgggccccggctcccggcccccactgccatcactgcatcggagcccagggtaactctactagtagcaggtaatttttacagggccgtgttagagccttcacccatggaacagtacaagacatgatgctactccgagaataccgacagctccaggaacagcagtccctactacccagcctctccccccaaccatcgcccctattcagcaagaagcagccagaggacaacggcgcccctcttctattacctattaaaaggctggaatgttaggaacaagttgcaccagaacccctccccctccccccccgcccccgacccccccccccccaccccaatgcagctgtcccttaccctgaatactctgcagctgcattcctggacccttatctaggcgctacagcaaggtcaccagacttgctttaaccctacgggcagcatgggggaggtcacgagaaacgtggataaacctaagttacaccctcttgtaaattcctatattgtaacctggtcacgagatgatatgtggtaaggttaaccaacaaacaaccccagggtctctctcccccatataaaaccctcattttgtaagctcagggctgcctcctttgactgtggtgaagcagcctggcaggttagtaaacttactctcctgannttgggtctctctctcgtcctttctctcggctaaccttacagcgccctcatccattctccaattataatgtgtttacacctttcctcctgcatgtctcacattttaccttgtcatcctcttacttgtgtatgtgtctatgcctcccagcatttgacagtacctgaaggtcaaagcctatctgctgtttacccttacaattctattcactcggcacgcactaggcacagaataaatgccattcatccctacttttacttcagggtacattttagagatctaagatttggtgtatctttcccattatccattcttattgcctcaaggctctcctcttataaatctagtggtatgcattactttgggggtaaggacaaatttatccagaacagagaagatttagttcagtctttagttttaaaataagcatttttaagtaatagcagagacaaaagtctgaaagccaacatagttttaatttaaaagaaatttgattttgctacagctttttggccaggagtaagtgaggatgctgtttcgaaagctggtcttgcatcttaagcagtacggtgtgggtcttaggggctggagtgtatcttgcaggaaacacagagtaggcaagaatgtgaggtggtgtaagactagtttgtctggttcaaaaagtaaaaaagaagactgaaaaaagtaggaaatctaacccaaagcaatcaatctttgagaagagcccagcacacttcccttccaattgatttgtcctacacccctccatgagcctaagcattagagcagaaatgactgagggtagcatccaagccactgggccaaggggcactggtacgatgaggataccgtgtcccacaattccagggtagtctgggaaaaacaaagcagagttcctgagaagaatgcagtagtggctgacagaaccagaaagggtgttgtagtgatatgtggccatgacatcagaagactaaaatgaggctatggatattccctagcaaatgtcttgggaacagaggccaaagccgaaagctcaagaattaatggaatgactacacctcaacgaaggttatagattagtgaggactgatgagtacaaaccagactcacacatccatcctcatcctcactccccacccccaggctacaatattacatatatgtcccctactcctgagggatggaaaagaggatgggtaggataagttcaaactgctttaatggctaacaaaattcacctttattcctttttatttttagttgacatgtaaaaattgtacatatttattggctacagagtgatattttgatacaagtataaagtgtgtaatgatcaaatcagagtaattagcacatcaatcacctcaaatagttatcacttatttgtactgggaacactcgaaatccttttctagctttgaaaaaatatacaataaattattgttaactgtattcaccacatagcactatagaacagtagaacagaatttattcctcctatattgctgtaatttgtatctgttaattaacctctccctagcctcccctccccctacccttcccaatctctcataaccacaattctactctctagatctatgagctcattttttaagtccctgcatttgagtgagaagatgaagtatttatctttctgcgcatgacttgctttgcttaacataatatcctccagattcatccacgttggtgcaaatggaaggattccatactttattttatgggtgattattgttccattgtgtgtataccatat

SEQ ID NO: 405745 - DNA, 2609 bp, Homo sapiens
  misc_feature (837)..(838): n is a, c, g, or t
gctgcctcctctgactgtggtggagcagctcagcaggataataagcttactcgcctgaccttgggtctctctctcatcctttctcttggctaaccttcattttggtgccaaaacccaggaaggggataggctctggctgggcgtccttagaggattctctctctctctctcctatcatcccttacccagccaacctccccttcccgaacctgctaaagaccctaaggatctcccaaaattctcccattgttggccacctcatccaccatcaaagcctctgagagggtttttacagggccgtgttagagccttcacccatggaacagtacaagacatgatgctactccgagaataccgacagctccaggaacagcagtccctactacccagcctctccccccaaccatcgcccctattcagcaagaagcagccagaggacaacggcgcccctcttctattacctattaaaaggctggaatgttaggaacaagttgcaccagaacccctccccaccccaatgcagctgtcccttaccctgaatactctgcagctgcattcctggacccttatctaggcgctacagcaaggtcaccagacttgctttaaccctacgggcagcatgggggaggtcacgagaaacgtggataaacctaagttacaccctcttgtaaattcctatattgtaacctggtcacgagatgatatgtggtaaggttaaccaacaaacaaccccagggtctctctcccccatataaaaccctcattttgtaagctcagggctgcctcctttgactgtggtgaagcagcctggcaggttagtaaacttactctcctgannttgggtctctctctcgtcctttctctcggctaaccttacagcgccctcatccattctccaattataatgtgtttacacctttcctcctgcatgtctcacattttaccttgtcatcctcttacttgtgtatgtgtctatgcctcccagcatttgacagtacctgaaggtcaaagcctatctgctgtttacccttacaattctattcactcggcacgcactaggcacagaataaatgccattcatccctacttttacttcagggtacattttagagatctaagatttggtgtatctttcccattatccattcttattgcctcaaggctctcctcttataaatctagtggtatgcattactttgggggtaaggacaaatttatccagaacagagaagatttagttcagtctttagttttaaaataagcatttttaagtaatagcagagacaaaagtctgaaagccaacatagttttaatttaaaagaaatttgattttgctacagctttttggccaggagtaagtgaggatgctgtttcgaaagctggtcttgcatcttaagcagtacggtgtgggtcttaggggctggagtgtatcttgcaggaaacacagagtaggcaagaatgtgaggtggtgtaagactagtttgtctggttcaaaaagtaaaaaagaagactgaaaaaagtaggaaatctaacccaaagcaatcaatctttgagaagagcccagcacacttcccttccaattgatttgtcctacacccctccatgagcctaagcattagagcagaaatgactgagggtagcatccaagccactgggccaaggggcactggtacgatgaggataccgtgtcccacaattccagggtagtctgggaaaaacaaagcagagttcctgagaagaatgcagtagtggctgacagaaccagaaagggtgttgtagtgatatgtggccatgacatcagaagactaaaatgaggctatggatattccctagcaaatgtcttgggaacagaggccaaagccgaaagctcaagaattaatggaatgactacacctcaacgaaggttatagattagtgaggactgatgagtacaaaccagactcacacatccatcctcatcctcactccccacccccaggctacaatattacatatatgtcccctactcctgagggatggaaaagaggatgggtaggataagttcaaactgctttaatggctaacaaaattcacctttattcctttttatttttagttgacatgtaaaaattgtacatatttattggctacagagtgatattttgatacaagtataaagtgtgtaatgatcaaatcagagtaattagcacatcaatcacctcaaatagttatcacttatttgtactgggaacactcgaaatccttttctagctttgaaaaaatatacaataaattattgttaactgtattcaccacatagcactatagaacagtagaacagaatttattcctcctatattgctgtaatttgtatctgttaattaacctctccctagcctcccctccccctacccttcccaatctctcataaccacaattctactctctagatctatgagctcattttttaagtccctgcatttgagtgagaagatgaagtatttatctttctgcgcatgacttgctttgcttaacataatatcctccagattcatccacgttggtgcaaatggaaggattccatactttattttatgggtgattattgttccattgtgtgtataccatat

SEQ ID NO: 405746 - DNA, 2833 bp, Homo sapiens
  misc_feature (1061)..(1062): n is a, c, g, or t
gctgcctcctctgactgtggtggagcagctcagcaggataataagcttactcgcctgaccttgggtctctctctcatcctttctcttggctaaccttcattttggtgccaaaacccaggaaggggataggctctggctgggcgtccttagaggattctctctctctctctcctatcatcccttacccagccaacctccccttcccgaacctgctaaagaccctaaggatctcccaaaattctcccattgttggccacctcatccaccatcaaagcctctgagagggatgggcagacaagcatgctcctcagagccaccatcccttcaacaagacaaaaagtgaagaatcacttgcactcccatagctccttggcctagccactgaagactgatgaggccagggcccctgggccccggctcccggcccccactgccatcactgcatcggagcccagggtaactctactagtagcaggtaatttttacagggccgtgttagagccttcacccatggaacagtacaagacatgatgctactccgagaataccgacagctccaggaacagcagtccctactacccagcctctccccccaaccatcgcccctattcagcaagaagcagccagaggacaacggcgcccctcttctattacctattaaaaggctggaatgttaggaacaagttgcaccagaacccctccccctccccccccgcccccgacccccccccccccaccccaatgcagctgtcccttaccctgaatactctgcagctgcattcctggacccttatctaggcgctacagcaaggtcaccagacttgctttaaccctacgggcagcatgggggaggtcacgagaaacgtggataaacctaagttacaccctcttgtaaattcctatattgtaacctggtcacgagatgatatgtggtaaggttaaccaacaaacaaccccagggtctctctcccccatataaaaccctcattttgtaagctcagggctgcctcctttgactgtggtgaagcagcctggcaggttagtaaacttactctcctgannttgggtctctctctcgtcctttctctcggctaaccttacagcgccctcatccattctccaattataatgtgtttacacctttcctcctgcatgtctcacattttaccttgtcatcctcttacttgtgtatgtgtctatgcctcccagcatttgacagtacctgaaggtcaaagcctatctgctgtttacccttacaattctattcactcggcacgcactaggcacagaataaatgccattcatccctacttttacttcagggtacattttagagatctaagatttggtgtatctttcccattatccattcttattgcctcaaggctctcctcttataaatctagtggtatgcattactttgggggtaaggacaaatttatccagaacagagaagatttagttcagtctttagttttaaaataagcatttttaagtaatagcagagacaaaagtctgaaagccaacatagttttaatttaaaagaaatttgattttgctacagctttttggccaggagtaagtgaggatgctgtttcgaaagctggtcttgcatcttaagcagtacggtgtgggtcttaggggctggagtgtatcttgcaggaaacacagagtaggcaagaatgtgaggtggtgtaagactagtttgtctggttcaaaaagtaaaaaagaagactgaaaaaagtaggaaatctaacccaaagcaatcaatctttgagaagagcccagcacacttcccttccaattgatttgtcctacacccctccatgagcctaagcattagagcagaaatgactgagggtagcatccaagccactgggccaaggggcactggtacgatgaggataccgtgtcccacaattccagggtagtctgggaaaaacaaagcagagttcctgagaagaatgcagtagtggctgacagaaccagaaagggtgttgtagtgatatgtggccatgacatcagaagactaaaatgaggctatggatattccctagcaaatgtcttgggaacagaggccaaagccgaaagctcaagaattaatggaatgactacacctcaacgaaggttatagattagtgaggactgatgagtacaaaccagactcacacatccatcctcatcctcactccccacccccaggctacaatattacatatatgtcccctactcctgagggatggaaaagaggatgggtaggataagttcaaactgctttaatggctaacaaaattcacctttattcctttttatttttagttgacatgtaaaaattgtacatatttattggctacagagtgatattttgatacaagtataaagtgtgtaatgatcaaatcagagtaattagcacatcaatcacctcaaatagttatcacttatttgtactgggaacactcgaaatccttttctagctttgaaaaaatatacaataaattattgttaactgtattcaccacatagcactatagaacagtagaacagaatttattcctcctatattgctgtaatttgtatctgttaattaacctctccctagcctcccctccccctacccttcccaatctctcataaccacaattctactctctagatctatgagctcattttttaagtccctgcatttgagtgagaagatgaagtatttatctttctgcgcatgacttgctttgcttaacataatatcctccagattcatccacgttggtgcaaatggaaggattccatactttattttatgggtgattattgttccattgtgtgtataccatat

SEQ ID NO: 405747 - DNA, 2628 bp, Homo sapiens
gctgcctcctctgactgtggtggagcagctcagcaggataataagcttactcgcctgaccttgggtctctctctcatcctttctcttggctaaccttcattttggtgccaaaacccaggaaggggataggctctggctgggcgtccttagaggattctctctctctctctcctatcatcccttacccagccaacctccccttcccgaacctgctaaagaccctaaggatctcccaaaattctcccattgttggccacctcatccaccatcaaagcctctgagaggggtgagtaagagagacttttgcctattacctggaacccttgaccatctcttcactcccaaaagacccagcgctgggccaagggcttcctctggcctccaggcctctggttcctctgtttcctggacgcctgactccgcagctacctcctctattccatacaaggcctgcaagacaggcgccgccctctctcgtctttgtcgtctgtggtcccttcttcctctaccctcacctcctccattcactatgggagcctctcagtctacccctcccaagaccaccccccttgggtgtctcctccgcaatcgcaaggctctcggcctccgttcagggatccgttctaagaggcttatcttttactgcaatactgcatggcctcaataccaattggacaatggctcccaatggcccgaaaatggcactttcgatttcaatatacttagagacttagacaacttttgccatcgcaatgagaaatggtctgagattccttatattcaggctttcttcattctccgtaaccacccttctctctgccactcctgctctactttccaaatcctactcaccagctcaaaacctgactcatctcccgtcaccccacccacagacccagccgatgactcctcttcctttgaccccgtggattttctccctcctcgacagcatcatgatcctccaccagagcatcatgatcctccaccgtatgtccctgctccggctctacccctctcccccactctctccaaccaacccacttctgactctgagtcctctctgcctcctcccctcacccgctctcgggcccaatgtgctcagcaaccagctcccttgcttcctctccgggaagtagcgggagttgaggggatcgtccatgtccacgtccctttctccttctacgatctcttacagattgaagaacgtctcgggtccttctcctccgatcctgatacttacatcaaagaatttaaatatcttactcaatcttatgaactcacttggcatgatctctactttatcctctcttctaccctccttccagaagagaaggaaagagtgtggctcgcagcacaggcatatgccgatgaccttcatcagcaggatcctactaagcccgtaggagctgctgctgttccctgggaagagccttcctgggaataccaacccacagaacctggccaagtgtactgtagccatatgattacttgcctcattgcaggccttaacaaagctgcccataggctgtaaattttgaaaaacttaaagacatttcccaaaaggcagatgaaaatcctgcccaatctctttcccgccttacagaagctctccaaaaatatacccgcatcgaccctgcctcctgagaaggaactattgttctttctttaaaaaattttatttattttttaattattattatactttaagttttagggtacatgtgcacaatgtgcaggtttgttacatatgtaggaactattgttcttaatacccattttatttcccaatctgcccctgacatccggcacaaacttaaaaaggctgaagatggctctcaaaccccacaacaagacctccttaacctggctttcaaagtctttaataacagggacgagcaaaataaattagataaagcccaaagagatcgtgctaaataccagcttccagcagtggctatctgtcagtctagccatagtacccaagggcacaaaagacctgatagcagcaaacctcctgggccttgttttaagtgcggcaaagaaggccactggacgggggcatgtccccacccatgagtgccgaagagcccttgcctagtctgccagcagatgggcactggaagtctgactgtcctctcaacagatgggcagacaagcatgctcctcagagccaccatcccttcaacaagacaaaaagtgaagaatcacttgcactcccatagctccttggcctagccactgaagactgatgaggccagggcccctgggccccggctcccggcccccactgccatcactgcatcggagcccagggtaactctactagtagcaggtaagctgatctcttttttaattgatagtggggccacctactcagctttgcctgagttctcaggacccactcatccctctcaagtctcagttgtgggggttgacggactcatctcttgtccgcttgccaccagacctcttacttgttccctgtttgatgccattttctcacactctttccttatcatgcctcattgccccacagagagagcgtcccccacagagagagcgtcccccacagagagagcgtcccccacagagagagcgtcaccccacagagagagcgtcccccacaga

SEQ ID NO: 405748 - DNA, 2538 bp, Homo sapiens
  misc_feature (2496)..(2496): n is a, c, g, or t
  misc_feature (2524)..(2524): n is a, c, g, or t
gctgcctcctctgactgtggtggagcagctcagcaggataataagcttactcgcctgaccttgggtctctctctcatcctttctcttggctaaccttcattttggtgccaaaacccaggaaggggataggctctggctgggcgtccttagaggattctctctctctctctcctatcatcccttacccagccaacctccccttcccgaacctgctaaagaccctaaggatctcccaaaattctcccattgttggccacctcatccaccatcaaagcctctgagaggggtgagtaagagagacttttgcctattacctggaacccttgaccatctcttcactcccaaaagacccagcgctgggccaagggcttcctctggcctccaggcctctggttcctctgtttcctggacgcctgactccgcagctacctcctctattccatacaaggcctgcaagacaggcgccgccctctctcgtctttgtcgtctgtggtcccttcttcctctaccctcacctcctccattcactatgggagcctctcagtctacccctcccaagaccaccccccttgggtgtctcctccgcaatcgcaaggctctcggcctccgttcagggatccgttctaagaggcttatcttttactgcaatactgcatggcctcaataccaattggacaatggctcccaatggcccgaaaatggcactttcgatttcaatatacttagagacttagacaacttttgccatcgcaatgagaaatggtctgagattccttatattcaggctttcttcattctccgtaaccacccttctctctgccactcctgctctactttccaaatcctactcaccagctcaaaacctgactcatctcccgtcaccccacccacagacccagccgatgactcctcttcctttgaccccgtggattttctccctcctcgacagcatcatgatcctccaccagagcatcatgatcctccaccgtatgtccctgctccggctctacccctctcccccactctctccaaccaacccacttctgactctgagtcctctctgcctcctcccctcacccgctctcgggcccaatgtgctcagcaaccagctcccttgcttcctctccgggaagtagcgggagttgaggggatcgtccatgtccacgtccctttctccttctacgatctcttacagattgaagaacgtctcgggtccttctcctccgatcctgatacttacatcaaagaatttaaatatcttactcaatcttatgaactcacttggcatgatctctactttatcctctcttctaccctccttccagaagagaaggaaagagtgtggctcgcagcacaggcatatgccgatgaccttcatcagcaggatcctactaagcccgtaggagctgctgctgttccctgggaagagccttcctgggaataccaacccacagaacctggccaagtgtactgtagccatatgattacttgcctcattgcaggccttaacaaagctgcccataggctgtaaattttgaaaaacttaaagacatttcccaaaaggcagatgaaaatcctgcccaatctctttcccgccttacagaagctctccaaaaatatacccgcatcgaccctgcctcctgagaaggaactattgttctttctttaaaaaattttatttattttttaattattattatactttaagttttagggtacatgtgcacaatgtgcaggtttgttacatatgtaggaactattgttcttaatacccattttatttcccaatctgcccctgacatccggcacaaacttaaaaaggctgaagatggctctcaaaccccacaacaagacctccttaacctggctttcaaagtctttaataacagggacgagcaaaataaattagataaagcccaaagagatcgtgctaaataccagcttccagcagtggctatctgtcagtctagccatagtacccaagggcacaaaagacctgatagcagcaaacctcctgggccttgttttaagtgcggcaaagaaggccactggacgggggcatgtccccacccatgagtgccgaagagcccttgcctagtctgccagcagatgggcactggaagtctgactgtcctctcaacagatgggcagacaagcatgctcctcagagccaccatcccttcaacaagacaaaaagtgaagaatcacttgcactcccatagctccttggcctagccactgaagactgatgaggccagggcccctgggccccggctcccggcccccactgccatcactgcatcggagcccagggtaactctactagtagcaggtaagctgatctcttttttaattgatagtggggccacctactcagctttgcctgagttctcaggacccactcatccctctcaagtctcagttgtgggggttgacggactcatctcttgtccgcttgccaccagacctcttacttgttccctgtttgatgccctnacgccatcactctggatttatcaggatnaaatgggaccggcc

SEQ ID NO: 405749 - DNA, 2344 bp, Homo sapiens
gctgcctcctctgactgtggtggagcagctcagcaggataataagcttactcgcctgaccttgggtctctctctcatcctttctcttggctaaccttcattttggtgccaaaacccaggaaggggataggctctggctgggcgtccttagaggattctctctctctctctcctatcatcccttacccagccaacctccccttcccgaacctgctaaagaccctaaggatctcccaaaattctcccattgttggccacctcatccaccatcaaagcctctgagaggggtgagtaagagagacttttgcctattacctggaacccttgaccatctcttcactcccaaaagacccagcgctgggccaagggcttcctctggcctccaggcctctggttcctctgtttcctggacgcctgactccgcagctacctcctctattccatacaaggcctgcaagacaggcgccgccctctctcgtctttgtcgtctgtggtcccttcttcctctaccctcacctcctccattcactatgggagcctctcagtctacccctcccaagaccaccccccttgggtgtctcctccgcaatcgcaaggctctcggcctccgttcagggatccgttctaagaggcttatcttttactgcaatactgcatggcctcaataccaattggacaatggctcccaatggcccgaaaatggcactttcgatttcaatatacttagagacttagacaacttttgccatcgcaatgagaaatggtctgagattccttatattcaggctttcttcattctccgtaaccacccttctctctgccactcctgctctactttccaaatcctactcaccagctcaaaacctgactcatctcccgtcaccccacccacagacccagccgatgactcctcttcctttgaccccgtggattttctccctcctcgacagcatcatgatcctccaccagagcatcatgatcctccaccgtatgtccctgctccggctctacccctctcccccactctctccaaccaacccacttctgactctgagtcctctctgcctcctcccctcacccgctctcgggcccaatgtgctcagcaaccagctcccttgcttcctctccgggaagtagcgggagttgaggggatcgtccatgtccacgtccctttctccttctacgatctcttacagattgaagaacgtctcgggtccttctcctccgatcctgatacttacatcaaagaatttaaatatcttactcaatcttatgaactcacttggcatgatctctactttatcctctcttctaccctccttccagaagagaaggaaagagtgtggctcgcagcacaggcatatgccgatgaccttcatcagcaggatcctactaagcccgtaggagctgctgctgttccctgggaagagccttcctgggaataccaacccacagaacctggccaagtgtactgtagccatatgattacttgcctcattgcaggccttaacaaagctgcccataggctgtaaattttgaaaaacttaaagacatttcccaaaaggcagatgaaaatcctgcccaatctctttcccgccttacagaagctctccaaaaatatacccgcatcgaccctgcctcctgagaaggaactattgttctttctttaaaaaattttatttattttttaattattattatactttaagttttagggtacatgtgcacaatgtgcaggtttgttacatatgtaggaactattgttcttaatacccattttatttcccaatctgcccctgacatccggcacaaacttaaaaaggctgaagatggctctcaaaccccacaacaagacctccttaacctggctttcaaagtctttaataacagggacgagcaaaataaattagataaagcccaaagagatcgtgctaaataccagcttccagcagtggctatctgtcagtctagccatagtacccaagggcacaaaagacctgatagcagcaaacctcctgggccttgttttaagtgcggcaaagaaggccactggacgggggcatgtccccacccatgagtgccgaagagcccttgcctagtctgccagcagatgggcactggaagtctgactgtcctctcaacagatgggcagacaagcatgctcctcagagccaccatcccttcaacaagacaaaaagtgaagaatcacttgcactcccatagctccttggcctagccactgaagactgatgaggccagggcccctgggccccggctcccggcccagacccttcttgcgccaccaccccctcgctagcacccccgatcccatcagagagagctga

SEQ ID NO: 405750 - DNA, 924 bp, Homo sapiens
gctgcctcctctgactgtggtggagcagctcagcaggataataagcttactcgcctgaccttgggtctctctctcatcctttctcttggctaaccttcattttggtgccaaaacccaggaaggggataggctctggctgggcgtccttagaggattctctctctctctctcctatcatcccttacccagccaacctccccttcccgaacctgctaaagaccctaaggatctcccaaaattctcccattgttggccacctcatccaccatcaaagcctctgagaggggtgagtaagagagacttttgcctattacctggaacccttgaccatctcttcactcccaaaagacccagcgctgggccaagggcttcctctggcctccaggcctctggttcctctgtttcctggacgcctgactccgcagctacctcctctattccatacaaggcctgcaagacaggcgccgccctctctcgtctttgtcgtctgtggtcccttcttcctctaccctcacctcctccattcactatgggagcctctcagtctacccctcccaagaccaccccccttgggtgtctcctccgcaatcgcaaggctctcggcctccgttcagggatccgttctaagaggcttatcttttactgcaatactgcatggcctcaataccaattggacaatggctcccaatggcccgaaaatggcactttcgatttcaatatacttagagacttagacaacttttgccatcgcaatgagaaatggtctgagattccttatattcaggctttcttcattctccgtaaccacccttctctctgccactcctgctctactttccaaatcctactcaccagctcaaaacctgactcatctcccgtcaccccacccacagacccagccgcgtagtcagatcggaccgagcc

SEQ ID NO: 405751 - DNA, 6080 bp, Homo sapiens
gctgcctcctctgactgtggtggagcagctcagcaggataataagcttactcgcctgaccttgggtctctctctcatcctttctcttggctaaccttcattttggtgccaaaacccaggaaggggataggctctggctgggcgtccttagaggattctctctctctctctcctatcatcccttacccagccaacctccccttcccgaacctgctaaagaccctaaggatctcccaaaattctcccattgttggccacctcatccaccatcaaagcctctgagaggggtgagtaagagagacttttgcctattacctggaacccttgaccatctcttcactcccaaaagacccagcgctgggccaagggcttcctctggcctccaggcctctggttcctctgtttcctggacgcctgactccgcagctacctcctctattccatacaaggcctgcaagacaggcgccgccctctctcgtctttgtcgtctgtggtcccttcttcctctaccctcacctcctccattcactatgggagcctctcagtctacccctcccaagaccaccccccttgggtgtctcctccgcaatcgcaaggctctcggcctccgttcagggatccgttctaagaggcttatcttttactgcaatactgcatggcctcaataccaattggacaatggctcccaatggcccgaaaatggcactttcgatttcaatatacttagagacttagacaacttttgccatcgcaatgagaaatggtctgagattccttatattcaggctttcttcattctccgtaaccacccttctctctgccactcctgctctactttccaaatcctactcaccagctcaaaacctgactcatctcccgtcaccccacccacagacccagccgatgactcctcttcctttgaccccgtggattttctccctcctcgacagcatcatgatcctccaccagagcatcatgatcctccaccgtatgtccctgctccggctctacccctctcccccactctctccaaccaacccacttctgactctgagtcctctctgcctcctcccctcacccgctctcgggcccaatgtgctcagcaaccagctcccttgcttcctctccgggaagtagcgggagttgaggggatcgtccatgtccacgtccctttctccttctacgatctcttacagattgaagaacgtctcgggtccttctcctccgatcctgatacttacatcaaagaatttaaatatcttactcaatcttatgaactcacttggcatgatctctactttatcctctcttctaccctccttccagaagagaaggaaagagtgtggctcgcagcacaggcatatgccgatgaccttcatcagcaggatcctactaagcccgtaggagctgctgctgttccctgggaagagccttcctgggaataccaacccacagaacctggccaagtgtactgtagccatatgattacttgcctcattgcaggccttaacaaagctgcccataggctgtaaattttgaaaaacttaaagacatttcccaaaaggcagatgaaaatcctgcccaatctctttcccgccttacagaagctctccaaaaatatacccgcatcgaccctgcctcctgagaaggaactattgttctttctttaaaaaattttatttattttttaattattattatactttaagttttagggtacatgtgcacaatgtgcaggtttgttacatatgtaggaactattgttcttaatacccattttatttcccaatctgcccctgacatccggcacaaacttaaaaaggctgaagatggctctcaaaccccacaacaagacctccttaacctggctttcaaagtctttaataacagggacgagcaaaataaattagataaagcccaaagagatcgtgctaaataccagcttccagcagtggctatctgtcagtctagccatagtacccaagggcacaaaagacctgatagcagcaaacctcctgggccttgttttaagtgcggcaaagaaggccactggacgggggcatgtccccacccatgagtgccgaagagcccttgcctagtctgccagcagatgggcactggaagtctgactgtcctctcaacagatgggcagacaagcatgctcctcagagccaccatcccttcaacaagacaaaaagtgaagaatcacttgcactcccatagctccttggcctagccactgaagactgatgaggccagggcccctgggccccggctcccggcccccactgccatcactgcatcggagcccagggtaactctactagtagcaggtaagctgatctcttttttaattgatagtggggccacctactcagctttgcctgagttctcaggacccactcatccctctcaagtctcagttgtgggggttgacggactcatctcttgtccgcttgccaccagacctcttacttgttccctgtttgatgccattttctcacactctttccttatcatgcctcattgccccacccccattctaggctgagaccttttagccaaagtcaaagcttctatcaccttttcttgcccccttcaaccagagtcccctcctgctcctctccgctagtccggcccctgacccctttccccagtacccacttcctgcctctctcattaacccttccgtagctgctcaccatgaccccatcagaatccagttaaaagactcttccaaatttcccaacgttcctcaataccccatctctctaacccaccaaaagggcctacagcccatcgtaaacaagctctgctcatgcagtcttcttagaccaacacactctccatataacacccctatcctccctgttaaaaagtctgatggctcataccgactcgttcacaacctccaagccatcagtcaagctgtcctccctattcatcccatagtccataacccctatccacttctctctctcgtcgctaccaacaccaccctctacactgcaattgacctgaaggatgccttctttaccatttccctacaccctgattcccaaaacctatttgctttcacctggactgaccctgacaccctccagtcacaacaactcacatggactgtcctccctcagggcttcagggatagccctcatttctttggacaagctctagcccgaaacctcacttccttaaacctgtctcccagtcatcttcaatatgtggacgaccttcttctttgcagcccctctctaaaagactctcaaactcacacggccactgctctcttaaactttctcgctatcaaagggtatagggtctccccctccaaggcccaactctccatctccatgatgacttacttaggaattcaactttcccctggggcccaggctatgactccagccagggcagcattaatagaaaatctacccccaccctcctccaaaagcgaaatcctttccttcccagggctagcaggcttctttagaatatggatttccaactttgccctcctagctcatcccctctatgaagtggccaaaggccctcccaatgaacccctaaacccctcacataacatactccccagcttccacaaactccaaactgctcttgtcactgcgtcagctccgtccttacctgatatctcccaacctttcactctctatactgctgaaagctgaggaatagccctcggtgtcttaggacaacagaaaggaaatcctccttcctttgcccctgtagcttacctctctaaacaactagataacacagtcaaagggtggccagcctgctttaaagcactagaagtggtagccagcttagctctagaaagcaggaaactaactttcagccagaataccaccgtccacagttctcataatctacaagatctcctctcctcccaagcagtaagctcccttcctccttccaggattcaattactccatgccctctttataaaaaatcccaaattcagtcttaccagaagtgcttccctcaacccagcatccttactccccgtatcctcttcccttcctactcattcttccactgatatcctggaccacgtacagccacatttcccaaacatttcctccgagcctctcaccaaccccgatgatcaactattcatagatggctcctcttccaggcccaccagctaccccccagattgctggatatgcagttgtttcccttgaccaagtaattgaagccaggatcctcctcccaaaaagcagaactcatagctctcaccagggccctaaatctttccaaaggcaaacgagtcaacatttatacagactccaaatatgcctatcacattcctcgttcccacgctgctatctggcaaaagagaggactccttactgccaaaggaacccctatcactaatggccaccttatttactaactccttcaggccacacacctcccagctaaagcaggagttatacactgttgaggacatcgaacaggttcagatgaaatctcgaggcaacagaaaggccgatgaggcagcaaaagaagcctccctttcttctgcctctgcccctctccttcctgttatcccagcaatcctacccaagaactctcccaccgagaaagctttgctatacagcaaggagcctcctttcaaggggactggatagtcaaaaatcaaaagctcgtcctcccctaagagcagaccaaagaaattctgacatctcttcaccaatccttccatatcagtgtgcgcccccatacctactccttcaccctatttctcctccccccatctattcacctcactaagagacataacctcaaactgtcctatatgctctgttacttcctcccaaggggccctccactctccctccatccctacacatcccctcagaggaacactcccaggggaggactggcaaatagacttcacccacattcatcccgtcaagaggacaaaatttattcttactcttatagacaccttctctaggtgggtagaagcatttcctacctcttcagaaaaggccgcagaagtctcccaaattcttgtaacagaaatcatccctacatttggtctccctggctccatacaatcagacaatggcccctagcttcatctcccaaatcactcaacaggtttctcagtcccttggcatccagtggcgtctccatatcccatgctggccccagacatccggaaaagtcgaaagggcaaatgggatccttaaggctcagttaaccaaactcactcttgaagtccaaaaaccatggacctcccttttgcccatagcactggagagcattagagccagtccaaaagcaccctccttcctcagtccatttgagttaatatacggacgccctttcctcttacaaaacaggcccccttctaactctcagctaggagaatacctcccaacagtctccctcatgagctatctcctctgccaacaagccgaccaggccctcccaaaaccccacgaaggggtctccaatcccaaatagacttgctctccaattccaaaagactctttaagcagcagtgacacttcaaaaccatcgaggtttagatctcctcactgccgagaaaggcggcctgtgtatctttttagaagaggagtgctgtttctatactaaccagtcaggactagtacaagatgctgctggacgaataaatgaaaaagcttctggccgggtgcagtggctcacgcctgtaatcccagatctttgggaggctgaggcgggcggatcacgaggtcaggagatcgagaccatcttggctaacacggtgaaaccccgtctctactaaaaatagaaaaaattagccgggcgtggtggccggcagctgtactcccagctactcaggaggctgaggcaggagaatggcgtgtggggtgaacccgggaggcggagcttgcagtgagcagagatgatgccactgcactccagcctgggcgacagagcaagactccatctccaaaaaaaaaaaactcttgggggggcccggtccccaattttcccctttgggaggcccttttccttttattggcgccggttttactaacctgtgtaactgggaaaact

SEQ ID NO: 405752 - DNA, 6164 bp, Homo sapiens
  misc_feature (4392)..(4393): n is a, c, g, or t
cggcccacggcgggtgtactccacccgcggtgtacgctgatctcttttttaattgatagtggggccacctactcagctttgcctgagttctcaggacccactcatccctctcaagtctcagttgtgggggttgacggactcatctcttgtccgcttgccaccagacctcttacttgttccctgtttgatgccattttctcacactctttccttatcatgcctcattgccccacccccattctaggctgagaccttttagccaaagtcaaagcttctatcaccttttcttgcccccttcaaccagagtcccctcctgctcctctccgctagtccggcccctgacccctttccccagtacccacttcctgcctctctcattaacccttccgtagctgctcaccatgaccccatcagaatccagttaaaagactcttccaaatttcccaacgttcctcaataccccatctctctaacccaccaaaagggcctacagcccatcgtaaacaagctctgctcatgcagtcttcttagaccaacacactctccatataacacccctatcctccctgttaaaaagtctgatggctcataccgactcgttcacaacctccaagccatcagtcaagctgtcctccctattcatcccatagtccataacccctatccacttctctctctcgtcgctaccaacaccaccctctacactgcaattgacctgaaggatgccttctttaccatttccctacaccctgattcccaaaacctatttgctttcacctggactgaccctgacaccctccagtcacaacaactcacatggactgtcctccctcagggcttcagggatagccctcatttctttggacaagctctagcccgaaacctcacttccttaaacctgtctcccagtcatcttcaatatgtggacgaccttcttctttgcagcccctctctaaaagactctcaaactcacacggccactgctctcttaaactttctcgctatcaaagggtatagggtctccccctccaaggcccaactctccatctccatgatgacttacttaggaattcaactttcccctggggcccaggctatgactccagccagggcagcattaatagaaaatctacccccaccctcctccaaaagcgaaatcctttccttcccagggctagcaggcttctttagaatatggatttccaactttgccctcctagctcatcccctctatgaagtggccaaaggccctcccaatgaacccctaaacccctcacataacatactccccagcttccacaaactccaaactgctcttgtcactgcgtcagctccgtccttacctgatatctcccaacctttcactctctatactgctgaaagctgaggaatagccctcggtgtcttaggacaacagaaaggaaatcctccttcctttgcccctgtagcttacctctctaaacaactagataacacagtcaaagggtggccagcctgctttaaagcactagaagtggtagccagcttagctctagaaagcaggaaactaactttcagccagaataccaccgtccacagttctcataatctacaagatctcctctcctcccaagcagtaagctcccttcctccttccaggattcaattactccatgccctctttataaaaaatcccaaattcagtcttaccagaagtgcttccctcaacccagcatccttactccccgtatcctcttcccttcctactcattcttccactgatatcctggaccacgtacagccacatttcccaaacatttcctccgagcctctcaccaaccccgatgatcaactattcatagatggctcctcttccaggcccaccagctaccccccagattgctggatatgcagttgtttcccttgaccaagtaattgaagccaggatcctcctcccaaaaagcagaactcatagctctcaccagggccctaaatctttccaaaggcaaacgagtcaacatttatacagactccaaatatgcctatcacattcctcgttcccacgctgctatctggcaaaagagaggactccttactgccaaaggaacccctatcactaatggccaccttatttactaactccttcaggccacacacctcccagctaaagcaggagttatacactgttgaggacatcgaacaggttcagatgaaatctcgaggcaacagaaaggccgatgaggcagcaaaagaagcctccctttcttctgcctctgcccctctccttcctgttatcccagcaatcctacccaagaactctcccaccgagaaagctttgctatacagcaaggagcctcctttcaaggggactggatagtcaaaaatcaaaagctcgtcctcccctaagagcagaccaaagaaattctgacatctcttcaccaatccttccatatcagtgtgcgcccccatacctactccttcaccctatttctcctccccccatctattcacctcactaagagacataacctcaaactgtcctatatgctctgttacttcctcccaaggggccctccactctccctccatccctacacatcccctcagaggaacactcccaggggaggactggcaaatagacttcacccacattcatcccgtcaagaggacaaaatttattcttactcttatagacaccttctctaggtgggtagaagcatttcctacctcttcagaaaaggccgcagaagtctcccaaattcttgtaacagaaatcatccctacatttggtctccctggctccatacaatcagacaatggcccctagcttcatctcccaaatcactcaacaggtttctcagtcccttggcatccagtggcgtctccatatcccatgctggccccagacatccggaaaagtcgaaagggcaaatgggatccttaaggctcagttaaccaaactcactcttgaagtccaaaaaccatggacctcccttttgcccatagcactggagagcattagagccagtccaaaagcaccctccttcctcagtccatttgagttaatatacggacgccctttcctcttacaaaacaggcccccttctaactctcagctaggagaatacctcccaacagtctccctcatgagctatctcctctgccaacaagccgaccaggccctcccaaaaccccacgaaggggtctccaatcccaaatagacttgctctccaattccaaaagactctttaagcagcagtgacacttcaaaaccatcgaggtttagatctcctcactgccgagaaaggcggcctgtgtatctttttagaagaggagtgctgtttctatactaaccagtcaggactagtacaagatgctgctggacgaataaatgaaaaagcttctggccgggtgcagtggctcacgcctgtaatcccagatctttgggaggctgaggcgggcggatcacgaggtcaggagatcgagaccatcttggctaacacggtgaaaccccgtctctactaaaaatagaaaaaattagccgggcgtggtggccggcagctgtactcccagctactcaggaggctgaggcaggagaatggcgtgtggggtgaacccgggaggcggagcttgcagtgagcagagatgatgccactgcactccagcctgggcgacagagcaagactccatctccaaaaaaaaaaaaaaaaaagctgctgaaatcaggcagcgcctttcagattcccggcccaggtgatttcgtaactcctgggcaccctggctactgcccttcctaggccctgccattaccctcttcctccatttagcacttggcccatgtctcttacatctccttacccagtttttacagggccgtgttagagccttcacccatggaacagtacaagacatgatgctactccgagaataccgacagctccaggaacagcagtccctactacccagcctctccccccaaccatcgcccctattcagcaagaagcagccagaggacaacggcgcccctcttctattacctattaaaaggctggaatgttaggaacaagttgcaccagaacccctccccaccccaatgcagctgtcccttaccctgaatactctgcagctgcattcctggacccttatctaggcgctacagcaaggtcaccagacttgctttaaccctacgggcagcatgggggaggtcacgagaaacgtggataaacctaagttacaccctcttgtaaattcctatattgtaacctggtcacgagatgatatgtggtaaggttaaccaacaaacaaccccagggtctctctcccccatataaaaccctcattttgtaagctcagggctgcctcctttgactgtggtgaagcagcctggcaggttagtaaacttactctcctgannttgggtctctctctcgtcctttctctcggctaaccttacagcgccctcatccattctccaattataatgtgtttacacctttcctcctgcatgtctcacattttaccttgtcatcctcttacttgtgtatgtgtctatgcctcccagcatttgacagtacctgaaggtcaaagcctatctgctgtttacccttacaattctattcactcggcacgcactaggcacagaataaatgccattcatccctacttttacttcagggtacattttagagatctaagatttggtgtatctttcccattatccattcttattgcctcaaggctctcctcttataaatctagtggtatgcattactttgggggtaaggacaaatttatccagaacagagaagatttagttcagtctttagttttaaaataagcatttttaagtaatagcagagacaaaagtctgaaagccaacatagttttaatttaaaagaaatttgattttgctacagctttttggccaggagtaagtgaggatgctgtttcgaaagctggtcttgcatcttaagcagtacggtgtgggtcttaggggctggagtgtatcttgcaggaaacacagagtaggcaagaatgtgaggtggtgtaagactagtttgtctggttcaaaaagtaaaaaagaagactgaaaaaagtaggaaatctaacccaaagcaatcaatctttgagaagagcccagcacacttcccttccaattgatttgtcctacacccctccatgagcctaagcattagagcagaaatgactgagggtagcatccaagccactgggccaaggggcactggtacgatgaggataccgtgtcccacaattccagggtagtctgggaaaaacaaagcagagttcctgagaagaatgcagtagtggctgacagaaccagaaagggtgttgtagtgatatgtggccatgacatcagaagactaaaatgaggctatggatattccctagcaaatgtcttgggaacagaggccaaagccgaaagctcaagaattaatggaatgactacacctcaacgaaggttatagattagtgaggactgatgagtacaaaccagactcacacatccatcctcatcctcactccccacccccaggctacaatattacatatatgtcccctactcctgagggatggaaaagaggatgggtaggataagttcaaactgctttaatggctaacaaaattcacctttattcctttttatttttagttgacatgtaaaaattgtacatatttattggctacagagtgatattttgatacaagtataaagtgtgtaatgatcaaatcagagtaattagcacatcaatcacctcaaatagttatcacttatttgtactgggaacactcgaaatccttttctagctttgaaaaaatatacaataaattattgttaactgtattcaccacatagcactatagaacagtagaacagaatttattcctcctatattgctgtaatttgtatctgttaattaacctctccctagcctcccctccccctacccttcccaatctctcataaccacaattctactctctagatctatgagctcattttttaagtccctgcatttgagtgagaagatgaagtatttatctttctgcgcatgacttgctttgcttaacataatatcctccagattcatccacgttggtgcaaatggaaggattccatactttattttatgggtgattattgttccattgtgtgtataccatat

SEQ ID NO: 405753 - DNA, 2803 bp, Homo sapiens
  misc_feature (2767)..(2767): n is a, c, g, or t
  misc_feature (2797)..(2797): n is a, c, g, or t
gctgcctcctctgactgtggtggagcagctcagcaggataataagcttactcgcctgaccttgggtctctctctcatcctttctcttggctaaccttcattttggtgccaaaacccaggaaggggataggctctggctgggcgtccttagaggattctctctctctctctcctatcatcccttacccagccaacctccccttcccgaacctgctaaagaccctaaggatctcccaaaattctcccattgttggccacctcatccaccatcaaagcctctgagaggggtgagtaagagagacttttgcctattacctggaacccttgaccatctcttcactcccaaaagacccagcgctgggccaagggcttcctctggcctccaggcctctggttcctctgtttcctggacgcctgactccgcagctacctcctctattccatacaaggcctgcaagacaggcgccgccctctctcgtctttgtcgtctgtggtcccttcttcctctaccctcacctcctccattcactatgggagcctctcagtctacccctcccaagaccaccccccttgggtgtctcctccgcaatcgcaaggctctcggcctccgttcagggatccgttctaagaggcttatcttttactgcaatactgcatggcctcaataccaattggacaatggctcccaatggcccgaaaatggcactttcgatttcaatatacttagagacttagacaacttttgccatcgcaatgagaaatggtctgagattccttatattcaggctttcttcattctccgtaaccacccttctctctgccactcctgctctactttccaaatcctactcaccagctcaaaacctgactcatctcccgtcaccccacccacagacccagccgatgactcctcttcctttgaccccgtggattttctccctcctcgacagcatcatgatcctccaccagagcatcatgatcctccaccgtatgtccctgctccggctctacccctctcccccactctctccaaccaacccacttctgactctgagtcctctctgcctcctcccctcacccgctctcgggcccaatgtgctcagcaaccagctcccttgcttcctctccgggaagtagcgggagttgaggggatcgtccatgtccacgtccctttctccttctacgatctcttacagattgaagaacgtctcgggtccttctcctccgatcctgatacttacatcaaagaatttaaatatcttactcaatcttatgaactcacttggcatgatctctactttatcctctcttctaccctccttccagaagagaaggaaagagtgtggctcgcagcacaggcatatgccgatgaccttcatcagcaggatcctactaagcccgtaggagctgctgctgttccctgggaagagccttcctgggaataccaacccacagaacctggccaagtgtactgtagccatatgattacttgcctcattgcaggccttaacaaagctgcccataggctgtaaattttgaaaaacttaaagacatttcccaaaaggcagatgaaaatcctgcccaatctctttcccgccttacagaagctctccaaaaatatacccgcatcgaccctgcctcctgagaaggaactattgttctttctttaaaaaattttatttattttttaattattattatactttaagttttagggtacatgtgcacaatgtgcaggtttgttacatatgtaggaactattgttcttaatacccattttatttcccaatctgcccctgacatccggcacaaacttaaaaaggctgaagatggctctcaaaccccacaacaagacctccttaacctggctttcaaagtctttaataacagggacgagcaaaataaattagataaagcccaaagagatcgtgctaaataccagcttccagcagtggctatctgtcagtctagccatagtacccaagggcacaaaagacctgatagcagcaaacctcctgggccttgttttaagtgcggcaaagaaggccactggacgggggcatgtccccacccatgagtgccgaagagcccttgcctagtctgccagcagatgggcactggaagtctgactgtcctctcaacagatgggcagacaagcatgctcctcagagccaccatcccttcaacaagacaaaaagtgaagaatcacttgcactcccatagctccttggcctagccactgaagactgatgaggccagggcccctgggccccggctcccggcccccactgccatcactgcatcggagcccagggtaactctactagtagcaggtaagctgatctcttttttaattgatagtggggccacctactcagctttgcctgagttctcaggacccactcatccctctcaagtctcagttgtgggggttgacggactcatctcttgtccgcttgccaccagacctcttacttgttccctgtttgatgccattttctcacactctttccttatcatgcctcattgccccacccccattctaggctgagaccttttagccaaagtcaaagcttctatcaccttttcttgcccccttcaaccagagtcccctcctgctcctctccgctagtccggcccctgacccctttccccagtacccacttcctgcctctctcattaacccttccgtagctgctcaccatgaccccatcagaatccagttaaaagactcttccaaatttcccaacgttcctcaataccccaancagagagagctcgggatcctctagatcacncagcac

SEQ ID NO: 405754 - DNA, 2700 bp, Homo sapiens
gctgcctcctctgactgtggtggagcagctcagcaggataataagcttactcgcctgaccttgggtctctctctcatcctttctcttggctaaccttcattttggtgccaaaacccaggaaggggataggctctggctgggcgtccttagaggattctctctctctctctcctatcatcccttacccagccaacctccccttcccgaacctgctaaagaccctaaggatctcccaaaattctcccattgttggccacctcatccaccatcaaagcctctgagaggggtgagtaagagagacttttgcctattacctggaacccttgaccatctcttcactcccaaaagacccagcgctgggccaagggcttcctctggcctccaggcctctggttcctctgtttcctggacgcctgactccgcagctacctcctctattccatacaaggcctgcaagacaggcgccgccctctctcgtctttgtcgtctgtggtcccttcttcctctaccctcacctcctccattcactatgggagcctctcagtctacccctcccaagaccaccccccttgggtgtctcctccgcaatcgcaaggctctcggcctccgttcagggatccgttctaagaggcttatcttttactgcaatactgcatggcctcaataccaattggacaatggctcccaatggcccgaaaatggcactttcgatttcaatatacttagagacttagacaacttttgccatcgcaatgagaaatggtctgagattccttatattcaggctttcttcattctccgtaaccacccttctctctgccactcctgctctactttccaaatcctactcaccagctcaaaacctgactcatctcccgtcaccccacccacagacccagccgatgactcctcttcctttgaccccgtggattttctccctcctcgacagcatcatgatcctccaccagagcatcatgatcctccaccgtatgtccctgctccggctctacccctctcccccactctctccaaccaacccacttctgactctgagtcctctctgcctcctcccctcacccgctctcgggcccaatgtgctcagcaaccagctcccttgcttcctctccgggaagtagcgggagttgaggggatcgtccatgtccacgtccctttctccttctacgatctcttacagattgaagaacgtctcgggtccttctcctccgatcctgatacttacatcaaagaatttaaatatcttactcaatcttatgaactcacttggcatgatctctactttatcctctcttctaccctccttccagaagagaaggaaagagtgtggctcgcagcacaggcatatgccgatgaccttcatcagcaggatcctactaagcccgtaggagctgctgctgttccctgggaagagccttcctgggaataccaacccacagaacctggccaagtgtactgtagccatatgattacttgcctcattgcaggccttaacaaagctgcccataggctgtaaattttgaaaaacttaaagacatttcccaaaaggcagatgaaaatcctgcccaatctctttcccgccttacagaagctctccaaaaatatacccgcatcgaccctgcctcctgagaaggaactattgttctttctttaaaaaattttatttattttttaattattattatactttaagttttagggtacatgtgcacaatgtgcaggtttgttacatatgtaggaactattgttcttaatacccattttatttcccaatctgcccctgacatccggcacaaacttaaaaaggctgaagatggctctcaaaccccacaacaagacctccttaacctggctttcaaagtctttaataacagggacgagcaaaataaattagataaagcccaaagagatcgtgctaaataccagcttccagcagtggctatctgtcagtctagccatagtacccaagggcacaaaagacctgatagcagcaaacctcctgggccttgttttaagtgcggcaaagaaggccactggacgggggcatgtccccacccatgagtgccgaagagcccttgcctagtctgccagcagatgggcactggaagtctgactgtcctctcaacagatgggcagacaagcatgctcctcagagccaccatcccttcaacaagacaaaaagtgaagaatcacttgcactcccatagctccttggcctagccactgaagactgatgaggccagggcccctgggccccggctcccggcccccactgccatcactgcatcggagcccagggtaactctactagtagcaggtaagctgatctcttttttaattgatagtggggccacctactcagctttgcctgagttctcaggacccactcatccctctcaagtctcagttgtgggggttgacggactcatctcttgtccgcttgccaccagacctcttacttgttccctgtttgatgccattttctcacactctttccttatcatgcctcattgccccacccccattctaggctgagaccttttagccaaagtcaaagcttctatcaccttttcttgcccccttcaaccagagtcccctcctgctcctctccgctagtccggcccgtaaggtttctcccaggtacggacttctctgcacgtgcgagtcctatgcgtgaagcctgca

SEQ ID NO: 405755 - DNA, 2642 bp, Homo sapiens
  misc_feature (2606)..(2606): n is a, c, g, or t
  misc_feature (2636)..(2636): n is a, c, g, or t
gctgcctcctctgactgtggtggagcagctcagcaggataataagcttactcgcctgaccttgggtctctctctcatcctttctcttggctaaccttcattttggtgccaaaacccaggaaggggataggctctggctgggcgtccttagaggattctctctctctctctcctatcatcccttacccagccaacctccccttcccgaacctgctaaagaccctaaggatctcccaaaattctcccattgttggccacctcatccaccatcaaagcctctgagaggggtgagtaagagagacttttgcctattacctggaacccttgaccatctcttcactcccaaaagacccagcgctgggccaagggcttcctctggcctccaggcctctggttcctctgtttcctggacgcctgactccgcagctacctcctctattccatacaaggcctgcaagacaggcgccgccctctctcgtctttgtcgtctgtggtcccttcttcctctaccctcacctcctccattcactatgggagcctctcagtctacccctcccaagaccaccccccttgggtgtctcctccgcaatcgcaaggctctcggcctccgttcagggatccgttctaagaggcttatcttttactgcaatactgcatggcctcaataccaattggacaatggctcccaatggcccgaaaatggcactttcgatttcaatatacttagagacttagacaacttttgccatcgcaatgagaaatggtctgagattccttatattcaggctttcttcattctccgtaaccacccttctctctgccactcctgctctactttccaaatcctactcaccagctcaaaacctgactcatctcccgtcaccccacccacagacccagccgatgactcctcttcctttgaccccgtggattttctccctcctcgacagcatcatgatcctccaccagagcatcatgatcctccaccgtatgtccctgctccggctctacccctctcccccactctctccaaccaacccacttctgactctgagtcctctctgcctcctcccctcacccgctctcgggcccaatgtgctcagcaaccagctcccttgcttcctctccgggaagtagcgggagttgaggggatcgtccatgtccacgtccctttctccttctacgatctcttacagattgaagaacgtctcgggtccttctcctccgatcctgatacttacatcaaagaatttaaatatcttactcaatcttatgaactcacttggcatgatctctactttatcctctcttctaccctccttccagaagagaaggaaagagtgtggctcgcagcacaggcatatgccgatgaccttcatcagcaggatcctactaagcccgtaggagctgctgctgttccctgggaagagccttcctgggaataccaacccacagaacctggccaagtgtactgtagccatatgattacttgcctcattgcaggccttaacaaagctgcccataggctgtaaattttgaaaaacttaaagacatttcccaaaaggcagatgaaaatcctgcccaatctctttcccgccttacagaagctctccaaaaatatacccgcatcgaccctgcctcctgagaaggaactattgttctttctttaaaaaattttatttattttttaattattattatactttaagttttagggtacatgtgcacaatgtgcaggtttgttacatatgtaggaactattgttcttaatacccattttatttcccaatctgcccctgacatccggcacaaacttaaaaaggctgaagatggctctcaaaccccacaacaagacctccttaacctggctttcaaagtctttaataacagggacgagcaaaataaattagataaagcccaaagagatcgtgctaaataccagcttccagcagtggctatctgtcagtctagccatagtacccaagggcacaaaagacctgatagcagcaaacctcctgggccttgttttaagtgcggcaaagaaggccactggacgggggcatgtccccacccatgagtgccgaagagcccttgcctagtctgccagcagatgggcactggaagtctgactgtcctctcaacagatgggcagacaagcatgctcctcagagccaccatcccttcaacaagacaaaaagtgaagaatcacttgcactcccatagctccttggcctagccactgaagactgatgaggccagggcccctgggccccggctcccggcccccactgccatcactgcatcggagcccagggtaactctactagtagcaggtaagctgatctcttttttaattgatagtggggccacctactcagctttgcctgagttctcaggacccactcatccctctcaagtctcagttgtgggggttgacggactcatctcttgtccgcttgccaccagacctcttacttgttccctgtttgatgccattttctcacactctttccttatcatgcctcattgccccacccccattctaggctgagaccttttagccaaagtcaaagcttctatcaccttttcttgcccccttcaaccaancagagagagctcgggatcctctagatcacncagcac

SEQ ID NO: 405756 - DNA, 2490 bp, Homo sapiens
gctgcctcctctgactgtggtggagcagctcagcaggataataagcttactcgcctgaccttgggtctctctctcatcctttctcttggctaaccttcattttggtgccaaaacccaggaaggggataggctctggctgggcgtccttagaggattctctctctctctctcctatcatcccttacccagccaacctccccttcccgaacctgctaaagaccctaaggatctcccaaaattctcccattgttggccacctcatccaccatcaaagcctctgagaggggtgagtaagagagacttttgcctattacctggaacccttgaccatctcttcactcccaaaagacccagcgctgggccaagggcttcctctggcctccaggcctctggttcctctgtttcctggacgcctgactccgcagctacctcctctattccatacaaggcctgcaagacaggcgccgccctctctcgtctttgtcgtctgtggtcccttcttcctctaccctcacctcctccattcactatgggagcctctcagtctacccctcccaagaccaccccccttgggtgtctcctccgcaatcgcaaggctctcggcctccgttcagggatccgttctaagaggcttatcttttactgcaatactgcatggcctcaataccaattggacaatggctcccaatggcccgaaaatggcactttcgatttcaatatacttagagacttagacaacttttgccatcgcaatgagaaatggtctgagattccttatattcaggctttcttcattctccgtaaccacccttctctctgccactcctgctctactttccaaatcctactcaccagctcaaaacctgactcatctcccgtcaccccacccacagacccagccgatgactcctcttcctttgaccccgtggattttctccctcctcgacagcatcatgatcctccaccagagcatcatgatcctccaccgtatgtccctgctccggctctacccctctcccccactctctccaaccaacccacttctgactctgagtcctctctgcctcctcccctcacccgctctcgggcccaatgtgctcagcaaccagctcccttgcttcctctccgggaagtagcgggagttgaggggatcgtccatgtccacgtccctttctccttctacgatctcttacagattgaagaacgtctcgggtccttctcctccgatcctgatacttacatcaaagaatttaaatatcttactcaatcttatgaactcacttggcatgatctctactttatcctctcttctaccctccttccagaagagaaggaaagagtgtggctcgcagcacaggcatatgccgatgaccttcatcagcaggatcctactaagcccgtaggagctgctgctgttccctgggaagagccttcctgggaataccaacccacagaacctggccaagtgtactgtagccatatgattacttgcctcattgcaggccttaacaaagctgcccataggctgtaaattttgaaaaacttaaagacatttcccaaaaggcagatgaaaatcctgcccaatctctttcccgccttacagaagctctccaaaaatatacccgcatcgaccctgcctcctgagaaggaactattgttctttctttaaaaaattttatttattttttaattattattatactttaagttttagggtacatgtgcacaatgtgcaggtttgttacatatgtaggaactattgttcttaatacccattttatttcccaatctgcccctgacatccggcacaaacttaaaaaggctgaagatggctctcaaaccccacaacaagacctccttaacctggctttcaaagtctttaataacagggacgagcaaaataaattagataaagcccaaagagatcgtgctaaataccagcttccagcagtggctatctgtcagtctagccatagtacccaagggcacaaaagacctgatagcagcaaacctcctgggccttgttttaagtgcggcaaagaaggccactggacgggggcatgtccccacccatgagtgccgaagagcccttgcctagtctgccagcagatgggcactggaagtctgactgtcctctcaacagatgggcagacaagcatgctcctcagagccaccatcccttcaacaagacaaaaagtgaagaatcacttgcactcccatagctccttggcctagccactgaagactgatgaggccagggcccctgggccccggctcccggcccccactgccatcactgcatcggagcccagggtaactctactagtagcaggtaagctgatctcttttttaattgatagtggggccacctactcagctttgcctgagttctcaggacccactcatccctctcaagtctcagttgtgggggttcgaacgctgttaaactacgcgcagcgacagcgctatcacgggcccactggtctcctg

SEQ ID NO: 405757 - DNA, 2012 bp, Homo sapiens
gctgcctcctctgactgtggtggagcagctcagcaggataataagcttactcgcctgaccttgggtctctctctcatcctttctcttggctaaccttcattttggtgccaaaacccaggaaggggataggctctggctgggcgtccttagaggattctctctctctctctcctatcatcccttacccagccaacctccccttcccgaacctgctaaagaccctaaggatctcccaaaattctcccattgttggccacctcatccaccatcaaagcctctgagaggggtgagtaagagagacttttgcctattacctggaacccttgaccatctcttcactcccaaaagacccagcgctgggccaagggcttcctctggcctccaggcctctggttcctctgtttcctggacgcctgactccgcagctacctcctctattccatacaaggcctgcaagacaggcgccgccctctctcgtctttgtcgtctgtggtcccttcttcctctaccctcacctcctccattcactatgggagcctctcagtctacccctcccaagaccaccccccttgggtgtctcctccgcaatcgcaaggctctcggcctccgttcagggatccgttctaagaggcttatcttttactgcaatactgcatggcctcaataccaattggacaatggctcccaatggcccgaaaatggcactttcgatttcaatatacttagagacttagacaacttttgccatcgcaatgagaaatggtctgagattccttatattcaggctttcttcattctccgtaaccacccttctctctgccactcctgctctactttccaaatcctactcaccagctcaaaacctgactcatctcccgtcaccccacccacagacccagccgatgactcctcttcctttgaccccgtggattttctccctcctcgacagcatcatgatcctccaccagagcatcatgatcctccaccgtatgtccctgctccggctctacccctctcccccactctctccaaccaacccacttctgactctgagtcctctctgcctcctcccctcacccgctctcgggcccaatgtgctcagcaaccagctcccttgcttcctctccgggaagtagcgggagttgaggggatcgtccatgtccacgtccctttctccttctacgatctcttacagattgaagaacgtctcgggtccttctcctccgatcctgatacttacatcaaagaatttaaatatcttactcaatcttatgaactcacttggcatgatctctactttatcctctcttctaccctccttccagaagagaaggaaagagtgtggctcgcagcacaggcatatgccgatgaccttcatcagcaggatcctactaagcccgtaggagctgctgctgttccctgggaagagccttcctgggaataccaacccacagaacctggccaagtgtactgtagccatatgattacttgcctcattgcaggccttaacaaagctgcccataggctgtaaattttgaaaaacttaaagacatttcccaaaaggcagatgaaaatcctgcccaatctctttcccgccttacagaagctctccaaaaatatacccgcatcgaccctgcctcctgagaaggaactattgttctttctttaaaaaattttatttattttttaattattattatactttaagttttagggtacatgtgcacaatgtgcaggtttgttacatatgtaggaactattgttcttaatacccattttatttcccaatctgcccctgacatccggcacaaacttaaaaaggctgaagatggctctcaaaccccacaacaagacctccttaacctggctttcaaagtctttaataacagggacgagcaaaataaattagataaagcccaaagagatcgtgctaaataccagcttccagcagtggctatctctactctctaccctagtctccttttccagctccgagacctgagcaagccagg

SEQ ID NO: 405758 - DNA, 1586 bp, Homo sapiens
  misc_feature (1557)..(1557): n is a, c, g, or t
  misc_feature (1561)..(1561): n is a, c, g, or t
  misc_feature (1563)..(1563): n is a, c, g, or t
  misc_feature (1565)..(1565): n is a, c, g, or t
  misc_feature (1568)..(1568): n is a, c, g, or t
tgatttttcatgtactattttaaaaaaatcagaagcaatgcaaaaatccatgatgaacaaatgatcaacatttgaaatacagacaggatcccaacctgcacttgcatgaccttgtctcgcttgcctcaccctaaacccagccttgacactccaattaaactttatttacaaaacaagggggccggccagtaggatgtagtttgcccatacgacttttttaaagtatcgcattgactactgtttatctcgatgactgaagggttcttttggcatccctgtagcaaatgcgtctcaccctagtcctggtcctgctccaagggtttttgtccaggcacatcgtgacctcacccttcctcccctctccgaggcctctctcagggtccagcgttcaagtcccgggtgttctctggacccgccccttcctctcgccgggtcaggtgccgagggcgagcacgggcggcgcggagagcagtcccggcccgccctccacgactcctcctcctgcgagctgggccactcagcggctctgccgcccagcgcgccggggcccagaccccgccccggccccgcctccgacgcctgccgctccagctccggctccccctatataaatcggcatttgcttcgctccgcccgcagcgccggagtcaaagccggttcccggcccagtcccgtcctgcagcagtctgcctcctctttcaacatgacagatgccgctgtgtccttcgccaaggacttcctggcaggtggagtggccgcagccatctccaagacggcggtagcgcccatcgagcgggtcaagctgctgctgcaggtgcagcatgccagcaagcagatcactgcagataagcaatacaaaggcattatagactgcgtggtccgtattcccaaggagcagggagttctgtccttctggcgcggtaacctggccaatgtcatcagatacttccccacccaggctcttaacttcgccttcaaagataaatacaagcagatcttcctgggtggtgtggacaagagaacccagttttggcgctactttgcagggaatctggcatcgggtggtgccgcaggggccacatccctgtgttttgtgtaccctcttgattttgcccgtacccgtctagcagctgatgtgggtaaagctggagctgaaagggaattccgaggcctcggtgactgcctggttaagatctacaaatctgatgggattaagggcctgtaccaaggctttaacgtgtctgtgcagggtattatcatctaccgagccgcctacttcggtatctatgacactgcaaagggaatgcttccggatcccaagaacactcacatcgtcatcagctggatgatcgcacagactgtcactgctgttgccgggttgacttcctatccatttgacaccgttcgccgccgcatgatgatgcagtcagggcgcaaaggaactgacatcatgtacacaggcacgcttgactgctggcggaagattgctcgtgatgaaggaggcaacttttcaggggctggccccgtcccaagccgggggggtgggggttggtggancagncnanttncggtcccggaaggggata

SEQ ID NO: 405759 - DNA, 1689 bp, Homo sapiens
tgatttttcatgtactattttaaaaaaatcagaagcaatgcaaaaatccatgatgaacaaatgatcaacatttgaaatacagacaggatcccaacctgcacttgcatgaccttgtctcgcttgcctcaccctaaacccagccttgacactccaattaaactttatttacaaaacaagggggccggccagtaggatgtagtttgcccatacgacttttttaaagtatcgcattgactactgtttatctcgatgactgaagggttcttttggcatccctgtagcaaatgcgtctcaccctagtcctggtcctgctccaagggtttttgtccaggcacatcgtgacctcacccttcctcccctctccgaggcctctctcagggtccagcgttcaagtcccgggtgttctctggacccgccccttcctctcgccgggtcaggtgccgagggcgagcacgggcggcgcggagagcagtcccggcccgccctccacgactcctcctcctgcgagctgggccactcagcggctctgccgcccagcgcgccggggcccagaccccgccccggccccgcctccgacgcctgccgctccagctccggctccccctatataaatcggcatttgcttcgctccgcccgcagcgccggagtcaaagccggttcccggcccagtcccgtcctgcagcagtctgcctcctctttcaacatgacagatgccgctgtgtccttcgccaaggacttcctggcaggtggagtggccgcagccatctccaagacggcggtagcgcccatcgagcgggtcaagctgctgctgcaggtgcagcatgccagcaagcagatcactgcagataagcaatacaaaggcattatagactgcgtggtccgtattcccaaggagcagggagttctgtccttctggcgcggtaacctggccaatgtcatcagatacttccccacccaggctcttaacttcgccttcaaagataaatacaagcagatcttcctgggtggtgtggacaagagaacccagttttggcgctactttgcagggaatctggcatcgggtggtgccgcaggggccacatccctgtgttttgtgtaccctcttgattttgcccgtacccgtctagcagctgatgtgggtaaagctggagctgaaagggaattccgaggcctcggtgactgcctggttaagatctacaaatctgatgggattaagggcctgtaccaaggctttaacgtgtctgtgcagggtattatcatctaccgagccgcctacttcggtatctatgacactgcaaagggaatgcttccggatcccaagaacactcacatcgtcatcagctggatgatcgcacagactgtcactgctgttgccgggttgacttcctatccatttgacaccgttcgccgccgcatgatgatgcagtcagggcgcaaaggaactgacatcatgtacacaggcacgcttgactgctggcggaagattgctcgtgatgaaggaggcaaagcttttttcaagggtgcatggtccaatgttctcagaggcatgggtggtgcttttgtggctcggtcctttggtattgcattgcaaacagttcaaacggcaacagggtagcgaaccatttcacggcttctaattttatcccgttaaggggaacttttttgttcgcccacacccatggcttggcc

SEQ ID NO: 405760 - DNA, 1195 bp, Homo sapiens
tgatttttcatgtactattttaaaaaaatcagaagcaatgcaaaaatccatgatgaacaaatgatcaacatttgaaatacagacaggatcccaacctgcacttgcatgaccttgtctcgcttgcctcaccctaaacccagccttgacactccaattaaactttatttacaaaacaagggggccggccagtaggatgtagtttgcccatacgacttttttaaagtatcgcattgactactgtttatctcgatgactgaagggttcttttggcatccctgtagcaaatgcgtctcaccctagtcctggtcctgctccaagggtttttgtccaggcacatcgtgacctcacccttcctcccctctccgaggcctctctcagggtccagcgttcaagtcccgggtgttctctggacccgccccttcctctcgccgggtcaggtgccgagggcgagcacgggcggcgcggagagcagtcccggcccgccctccacgactcctcctcctgcgagctgggccactcagcggctctgccgcccagcgcgccggggcccagaccccgccccggccccgcctccgacgcctgccgctccagctccggctccccctatataaatcggcatttgcttcgctccgcccgcagcgccggagtcaaagccggttcccggcccagtcccgtcctgcagcagtctgcctcctctttcaacatgacagatgccgctgtgtccttcgccaaggacttcctggcaggtggagtggccgcagccatctccaagacggcggtagcgcccatcgagcgggtcaagctgctgctgcaggtgcagcatgccagcaagcagatcactgcagataagcaatacaaaggcattatagactgcgtggtccgtattcccaaggagcagggagttctgtccttctggcgcggtaacctggccaatgtcatcagatacttccccacccaggctcttaacttcgccttcaaagataaatacaagcagatcttcctgggtggtgtggacaagagaacccagttttggcgctactttgcagggaatcacttgccgtagcctcaggctccacattccttgtgcttcgccgacccctcttgcgtttagccccgtcccccgcttagctctttgttgtcggcctaagcctttcacacctatcgggaatttcccggcctcgactgcttcgcttct

SEQ ID NO: 405761 - DNA, 1335 bp, Homo sapiens
tgatttttcatgtactattttaaaaaaatcagaagcaatgcaaaaatccatgatgaacaaatgatcaacatttgaaatacagacaggatcccaacctgcacttgcatgaccttgtctcgcttgcctcaccctaaacccagccttgacactccaattaaactttatttacaaaacaagggggccggccagtaggatgtagtttgcccatacgacttttttaaagtatcgcattgactactgtttatctcgatgactgaagggttcttttggcatccctgtagcaaatgcgtctcaccctagtcctggtcctgctccaagggtttttgtccaggcacatcgtgacctcacccttcctcccctctccgaggcctctctcagggtccagcgttcaagtcccgggtgttctctggacccgccccttcctctcgccgggtcaggtgccgagggcgagcacgggcggcgcggagagcagtcccggcccgccctccacgactcctcctcctgcgagctgggccactcagcggctctgccgcccagcgcgccggggcccagaccccgccccggccccgcctccgacgcctgccgctccagctccggctccccctatataaatcggcatttgcttcgctccgcccgcagcgccggagtcaaagccggttcccggcccagtcccgtcctgcagcagtctgcctcctctttcaacatgacagatgccgctgtgtccttcgccaaggacttcctggcaggtggagtggccgcagccatctccaagacggcggtagcgcccatcgagcgggtcaagctgctgctgcaggtacgtcctgggatccaggagcccaaccaggaagtggggggaagggtcgcacagaaggcgggcgcccgaggggtggcggggagcgaactctaaagacatggccagggaagcggcttaggagaggccagagcggggcgcagaggcagaacagaagtcaaactggtgggaggcgcctttagtgacctgaagtagtgagtctaggaaggggccgggggcagagggcaggaccaggctctcggcatctccgaggcggcggactcggatggagcagtttctgagtgacggcctccccgggcctgggcgtcaagggcgaaggccgaaagccggcgttagaaagaggaacgccagttcttaccgaagacctcaaggtcgcggcaaggagataactgcccgggggaggccatgcgcccgggtccagcggcctcccagcccgcggacgcgctcaaacctcgccgggccggaagccggcgccgggaagcgcgtgtgccttttacgtccgcccccgcgcagccgcggccgct

SEQ ID NO: 405762 - DNA, 320 bp, Homo sapiens
  misc_feature (305)..(305): n is a, c, g, or t
ctcggtacccaagtacccacctgcccaagatcttcctgggtggtgtggacaagagaacccagttttggcgctactttgcagggaatctggcatcgggtggtgccgcaggggccacatccctgtgttttgtgtaccctcttgattttgcccgtacccgtctagcagctgatgtgggtaaagctggagctgaaagggaattccgaggcctcggtgactgcctggttaagatctacaaatctgatgggattaagggcctgtaccaaggctttaacgtgtctgtgcagtgggtactcaaaagtacatcntgcaggtggggggga

SEQ ID NO: 405763 - DNA, 2621 bp, Homo sapiens
tgatttttcatgtactattttaaaaaaatcagaagcaatgcaaaaatccatgatgaacaaatgatcaacatttgaaatacagacaggatcccaacctgcacttgcatgaccttgtctcgcttgcctcaccctaaacccagccttgacactccaattaaactttatttacaaaacaagggggccggccagtaggatgtagtttgcccatacgacttttttaaagtatcgcattgactactgtttatctcgatgactgaagggttcttttggcatccctgtagcaaatgcgtctcaccctagtcctggtcctgctccaagggtttttgtccaggcacatcgtgacctcacccttcctcccctctccgaggcctctctcagggtccagcgttcaagtcccgggtgttctctggacccgccccttcctctcgccgggtcaggtgccgagggcgagcacgggcggcgcggagagcagtcccggcccgccctccacgactcctcctcctgcgagctgggccactcagcggctctgccgcccagcgcgccggggcccagaccccgccccggccccgcctccgacgcctgccgctccagctccggctccccctatataaatcggcatttgcttcgctccgcccgcagcgccggagtcaaagccggttcccggcccagtcccgtcctgcagcagtctgcctcctctttcaacatgacagatgccgctgtgtccttcgccaaggacttcctggcaggtggagtggccgcagccatctccaagacggcggtagcgcccatcgagcgggtcaagctgctgctgcaggtgcagcatgccagcaagcagatcactgcagataagcaatacaaaggcattatagactgcgtggtccgtattcccaaggagcagggagttctgtccttctggcgcggtaacctggccaatgtcatcagatacttccccacccaggctcttaacttcgccttcaaagataaatacaagcagatcttcctgggtggtgtggacaagagaacccagttttggcgctactttgcagggaatctggcatcgggtggtgccgcaggggccacatccctgtgttttgtgtaccctcttgattttgcccgtacccgtctagcagctgatgtgggtaaagctggagctgaaagggaattccgaggcctcggtgactgcctggttaagatctacaaatctgatgggattaagggcctgtaccaaggctttaacgtgtctgtgcagggtattatcatctaccgagccgcctacttcggtatctatgacactgcaaagggaatgcttccggatcccaagaacactcacatcgtcatcagctggatgatcgcacagactgtcactgctgttgccgggttgacttcctatccatttgacaccgttcgccgccgcatgatgatgcagtcagggcgcaaaggaactgacatcatgtacacaggcacgcttgactgctggcggaagattgctcgtgatgaaggaggcaaagcttttttcaagggtgcatggtccaatgttctcagaggcatgggtggtgcttttgtgcttgtcttgtatgatgaaatcaagaagtacacataagttatttcctaggatttttccccctgtgaacaggcatgttgtattatataacatatcttgagcattcttgacagactcctggctgtcagtttctcagtggcaactatttactggttgaaaatgggaagcaataatattcatctgaccagttttctcttaaagccatttccatgatgatgatgatgggactcaattgtattttttatttcagtcactcctgataaataacaaatttggagaaataaaaatatctaaaataaaacaaaaaaaaaaaaaaaaaaaaaaaaatttaaaagaaaaaaaaaaaaaaaaaaaaaaaaatgtgtgtggggggcgcgtggggcccggggaaaaagtttttttacaaaaatctgggtggggggggggggacccaaattgggatgaaaggtgggaaacgggggcacaaaggtgtgttcaaaaagagaccctgtggcgacaacaagagcgtggggtggatctcacccaaaaaaaaaacaacgccgggtggggcaacacagggcgtttgtagacacacaccaaaggagcgctaggggagcaaaggggcgccaacaacaagggggggcctacagcgacggccgagagaataaaaattccgcgcgacgtgggatgggaagaacgatacaacacatgagacaacagacagacgaacgagaaaacagagaggacgacagcaacagacctaacaggaagacaaatgaagaaagaggacagagacgagagaggagagcagagacgaacgaaggacgcaagagagacagaaagaacagaaggagcaagaggcgaagacagaagacacgaaggaaagaggagaacgaacgagaggaggagaagcaatggagagagaaagaagaacggagagaggagagagacggcagagtgaagaagagagggaggagccacgaacgaaggagaaacagacgaaacagagagacagcaacgagacaggagaagagaacagaagcaaagaaagcaaaggcagagagacaacgcccgggcacga

SEQ ID NO: 405764 - DNA, 1958 bp, Homo sapiens
tgatttttcatgtactattttaaaaaaatcagaagcaatgcaaaaatccatgatgaacaaatgatcaacatttgaaatacagacaggatcccaacctgcacttgcatgaccttgtctcgcttgcctcaccctaaacccagccttgacactccaattaaactttatttacaaaacaagggggccggccagtaggatgtagtttgcccatacgacttttttaaagtatcgcattgactactgtttatctcgatgactgaagggttcttttggcatccctgtagcaaatgcgtctcaccctagtcctggtcctgctccaagggtttttgtccaggcacatcgtgacctcacccttcctcccctctccgaggcctctctcagggtccagcgttcaagtcccgggtgttctctggacccgccccttcctctcgccgggtcaggtgccgagggcgagcacgggcggcgcggagagcagtcccggcccgccctccacgactcctcctcctgcgagctgggccactcagcggctctgccgcccagcgcgccggggcccagaccccgccccggccccgcctccgacgcctgccgctccagctccggctccccctatataaatcggcatttgcttcgctccgcccgcagcgccggagtcaaagccggttcccggcccagtcccgtcctgcagcagtctgcctcctctttcaacatgacagatgccgctgtgtccttcgccaaggacttcctggcaggtggagtggccgcagccatctccaagacggcggtagcgcccatcgagcgggtcaagctgctgctgcaggtgcagcatgccagcaagcagatcactgcagataagcaatacaaaggcattatagactgcgtggtccgtattcccaaggagcagggagttctgtccttctggcgcggtaacctggccaatgtcatcagatacttccccacccaggctcttaacttcgccttcaaagataaatacaagcagatcttcctgggtggtgtggacaagagaacccagttttggcgctactttgcagggaatctggcatcgggtggtgccgcaggggccacatccctgtgttttgtgtaccctcttgattttgcccgtacccgtctagcagctgatgtgggtaaagctggagctgaaagggaattccgaggcctcggtgactgcctggttaagatctacaaatctgatgggattaagggcctgtaccaaggctttaacgtgtctgtgcagggtattatcatctaccgagccgcctacttcggtatctatgacactgcaaagggaatgcttccggatcccaagaacactcacatcgtcatcagctggatgatcgcacagactgtcactgctgttgccgggttgacttcctatccatttgacaccgttcgccgccgcatgatgatgcagtcagggcgcaaaggaactgacatcatgtacacaggcacgcttgactgctggcggaagattgctcgtgatgaaggaggcaaagcttttttcaagggtgcatggtccaatgttctcagaggcatgggtggtgcttttgtgcttgtcttgtatgatgaaatcaagaagtacacataagttatttcctaggatttttccccctgtgaacaggcatgttgtattatataacatatcttgagcattcttgacagactcctggctgtcagtttctcagtggcaactatttactggttgaaaatgggaagcaataatattcatctgaccagttttctcttaaagccatttccatgatgatgatgatgggactcaattgtattttttatttcagtcactcctgataaataacaaatttggagaaataaaaatatctaaaataaaaaaagggggcgtctaaaatatcctcgagggcaagttagcgctcacggtcttgtaaagggccctttggggagtaaagaagagggccgtaaaatggaag

SEQ ID NO: 405765 - DNA, 1238 bp, Homo sapiens
tcgacggacgcgtgggtcgacccacgcgtcccggttcccggcccagtcccgtcctgcagcagtctgcctcctctttcaacatgacagatgccgctgtgtccttcgccaaggacttcctggcaggtggagtggccgcagccatctccaagacggcggtagcgcccatcgagcgggtcaagctgctgctgcaggtgcagcatgccagcaagcagatcactgcagataagcaatacaaaggcattatagactgcgtggtccgtattcccaaggagcagggagttctgtccttctggcgcggtaacctggccaatgtcatcagatacttccccacccaggctcttaacttcgccttcaaagataaatacaagcagatcttcctgggtggtgtggacaagagaacccagttttggcgctactttgcagggaatctggcatcgggtggtgccgcaggggccacatccctgtgttttgtgtaccctcttgattttgcccgtacccgtctagcagctgatgtgggtaaagctggagctgaaagggaattccgaggcctcggtgactgcctggttaagatctacaaatctgatgggattaagggcctgtaccaaggctttaacgtgtctgtgcagggtattatcatctaccgagccgcctacttcggtatctatgacactgcaaagggaatgcttccggatcccaagaacactcacatcgtcatcagctggatgatcgcacagactgtcactgctgttgccgggttgacttcctatccatttgacaccgttcgccgccgcatgatgatgcagtcagggcgcaaaggaactgacatcatgtacacaggcacgcttgactgctggcggaagattgctcgtgatgaaggaggcaaagcttttttcaagggtgcatggtccaatgttctcagaggcatgggtggtgcttttgtgcttgtcttgtatgatgaaatcaagaagtacacataagttatttcctaggatttttccccctgtgaacaggcatgttgtattatataacatatcttgagcattcttgacagactcctggctgtcagtttctcagtggcaactatttactggttgaaaatgggaagcaataatattcatctgaccagttttctcttaaagccatttccatgatgatgatgatgggactcaattgtattttttatttcagtcactcctgataaataacaaatttggagaaataaaaatatctaaaataaa

SEQ ID NO: 405766 - DNA, 1792 bp, Homo sapiens
tgatttttcatgtactattttaaaaaaatcagaagcaatgcaaaaatccatgatgaacaaatgatcaacatttgaaatacagacaggatcccaacctgcacttgcatgaccttgtctcgcttgcctcaccctaaacccagccttgacactccaattaaactttatttacaaaacaagggggccggccagtaggatgtagtttgcccatacgacttttttaaagtatcgcattgactactgtttatctcgatgactgaagggttcttttggcatccctgtagcaaatgcgtctcaccctagtcctggtcctgctccaagggtttttgtccaggcacatcgtgacctcacccttcctcccctctccgaggcctctctcagggtccagcgttcaagtcccgggtgttctctggacccgccccttcctctcgccgggtcaggtgccgagggcgagcacgggcggcgcggagagcagtcccggcccgccctccacgactcctcctcctgcgagctgggccactcagcggctctgccgcccagcgcgccggggcccagaccccgccccggccccgcctccgacgcctgccgctccagctccggctccccctatataaatcggcatttgcttcgctccgcccgcagcgccggagtcaaagccggttcccggcccagtcccgtcctgcagcagtctgcctcctctttcaacatgacagatgccgctgtgtccttcgccaaggacttcctggcaggtggagtggccgcagccatctccaagacggcggtagcgcccatcgagcgggtcaagctgctgctgcaggtgcagcatgccagcaagcagatcactgcagataagcaatacaaaggcattatagactgcgtggtccgtattcccaaggagcagggagttctgtccttctggcgcggtaacctggccaatgtcatcagatacttccccacccaggctcttaacttcgccttcaaagataaatacaagcagatcttcctgggtggtgtggacaagagaacccagttttggcgctactttgcagggaatctggcatcgggtggtgccgcaggggccacatccctgtgttttgtgtaccctcttgattttgcccgtacccgtctagcagctgatgtgggtaaagctggagctgaaagggaattccgaggcctcggtgactgcctggttaagatctacaaatctgatgggattaagggcctgtaccaaggctttaacgtgtctgtgcagggtattatcatctaccgagccgcctacttcggtatctatgacactgcaaagggaatgcttccggatcccaagaacactcacatcgtcatcagctggatgatcgcacagactgtcactgctgttgccgggttgacttcctatccatttgacaccgttcgccgccgcatgatgatgcagtcagggcgcaaaggaactgacatcatgtacacaggcacgcttgactgctggcggaagattgctcgtgatgaaggaggcaaagcttttttcaagggtgcatggtccaatgttctcagaggcatttccccctgtgaacaggcatgttgtattatataacatatcttgagcattcttgacagactcctggctgtcagtttctcagtggcaactatttactggttgaaaatgggaagcaataatattcatctgaccagttttctcttaaagccatttccatgatgatgatgatgggactcaattgtattttttatttcagtcactcctgataaataacaaatttggagaaataaaaatatctaaaataaa

SEQ ID NO: 405767 - DNA, 1179 bp, Homo sapiens
tcgacggacgcgtgggtcgacccacgcgtcgccgctgtgtccttcgccaaggacttcctggcaggtggagtggccgcagccatctccaagacggcggtagcgcccatcgagcgggtcaagctgctgctgcaggtgcagcatgccagcaagcagatcactgcagataagcaatacaaaggcattatagactgcgtggtccgtattcccaaggagcagggagttctgtccttctggcgcggtaacctggccaatgtcatcagatacttccccacccaggctcttaacttcgccttcaaagataaatacaagcagatcttcctgggtggtgtggacaagagaacccagttttggcgctactttgcagggaatctggcatcgggtggtgccgcaggggccacatccctgtgttttgtgtaccctcttgattttgcccgtacccgtctagcagctgatgtgggtaaagctggagctgaaagggaattccgaggcctcggtgactgcctggttaagatctacaaatctgatgggattaagggcctgtaccaaggctttaacgtgtctgtgcagggtattatcatctaccgagccgcctacttcggtatctatgacactgcaaagggaatgcttccggatcccaagaacactcacatcgtcatcagctggatgatcgcacagactgtcactgctgttgccgggttgacttcctatccatttgacaccgttcgccgccgcatgatgatgcagtcagggcgcaaaggaactgacatcatgtacacaggcacgcttgactgctggcggaagattgctcgtgatgaaggaggcaaagcttttttcaagggtgcatggtccaatgttctcagaggcatgggtggtgcttttgtgcttgtcttgtatgatgaaatcaagaagtacacataagttatttcctaggatttttccccctgtgaacaggcatgttgtattatataacatatcttgagcattcttgacagactcctggctgtcagtttctcagtggcaactatttactggttgaaaatgggaagcaataatattcatctgaccagttttctcttaaagccatttccatgatgatgatgatgggactcaattgtattttttatttcagtcactcctgataaataacaaatttggagaaataaaaatatctaaaataaa

SEQ ID NO: 405768 - DNA, 1819 bp, Homo sapiens
tgatttttcatgtactattttaaaaaaatcagaagcaatgcaaaaatccatgatgaacaaatgatcaacatttgaaatacagacaggatcccaacctgcacttgcatgaccttgtctcgcttgcctcaccctaaacccagccttgacactccaattaaactttatttacaaaacaagggggccggccagtaggatgtagtttgcccatacgacttttttaaagtatcgcattgactactgtttatctcgatgactgaagggttcttttggcatccctgtagcaaatgcgtctcaccctagtcctggtcctgctccaagggtttttgtccaggcacatcgtgacctcacccttcctcccctctccgaggcctctctcagggtccagcgttcaagtcccgggtgttctctggacccgccccttcctctcgccgggtcaggtgccgagggcgagcacgggcggcgcggagagcagtcccggcccgccctccacgactcctcctcctgcgagctgggccactcagcggctctgccgcccagcgcgccggggcccagaccccgccccggccccgcctccgacgcctgccgctccagctccggctccccctatataaatcggcatttgcttcgctccgcccgcagcgccggagtcaaagccggttcccggcccagtcccgtcctgcagcagtctgcctcctctttcaacatgacagatgccgcagccatctccaagacggcggtagcgcccatcgagcgggtcaagctgctgctgcaggtgcagcatgccagcaagcagatcactgcagataagcaatacaaaggcattatagactgcgtggtccgtattcccaaggagcagggagttctgtccttctggcgcggtaacctggccaatgtcatcagatacttccccacccaggctcttaacttcgccttcaaagataaatacaagcagatcttcctgggtggtgtggacaagagaacccagttttggcgctactttgcagggaatctggcatcgggtggtgccgcaggggccacatccctgtgttttgtgtaccctcttgattttgcccgtacccgtctagcagctgatgtgggtaaagctggagctgaaagggaattccgaggcctcggtgactgcctggttaagatctacaaatctgatgggattaagggcctgtaccaaggctttaacgtgtctgtgcagggtattatcatctaccgagccgcctacttcggtatctatgacactgcaaagggaatgcttccggatcccaagaacactcacatcgtcatcagctggatgatcgcacagactgtcactgctgttgccgggttgacttcctatccatttgacaccgttcgccgccgcatgatgatgcagtcagggcgcaaaggaactgacatcatgtacacaggcacgcttgactgctggcggaagattgctcgtgatgaaggaggcaaagcttttttcaagggtgcatggtccaatgttctcagaggcatgggtggtgcttttgtgcttgtcttgtatgatgaaatcaagaagtacacataagttatttcctaggatttttccccctgtgaacaggcatgttgtattatataacatatcttgagcattcttgacagactcctggctgtcagtttctcagtggcaactatttactggttgaaaatgggaagcaataatattcatctgaccagttttctcttaaagccatttccatgatgatgatgatgggactcaattgtattttttatttcagtcactcctgataaataacaaatttggagaaataaaaatatctaaaataaa

SEQ ID NO: 405769 - DNA, 1086 bp, Homo sapiens
tcaaacggttcccggcagtcgcgcagcacgctttcaatgacagggtgtccgccgatcgagggaggggcttcagacgtccctgacgtcccggggcagagcgaggtaggatactcagcttgcgggcgtccagagcggagtcgcttctggcgaaccggcaatgtcatcagatacttccccacccaggctcttaacttcgccttcaaagataaatacaagcagatcttcctgggtggtgtggacaagagaacccagttttggcgctactttgcagggaatctggcatcgggtggtgccgcaggggccacatccctgtgttttgtgtaccctcttgattttgcccgtacccgtctagcagctgatgtgggtaaagctggagctgaaagggaattccgaggcctcggtgactgcctggttaagatctacaaatctgatgggattaagggcctgtaccaaggctttaacgtgtctgtgcagggtattatcatctaccgagccgcctacttcggtatctatgacactgcaaagggaatgcttccggatcccaagaacactcacatcgtcatcagctggatgatcgcacagactgtcactgctgttgccgggttgacttcctatccatttgacaccgttcgccgccgcatgatgatgcagtcagggcgcaaaggaactgacatcatgtacacaggcacgcttgactgctggcggaagattgctcgtgatgaaggaggcaaagcttttttcaagggtgcatggtccaatgttctcagaggcatgggtggtgcttttgtgcttgtcttgtatgatgaaatcaagaagtacacataagttatttcctaggatttttccccctgtgaacaggcatgttgtattatataacatatcttgagcattcttgacagactcctggctgtcagtttctcagtggcaactatttactggttgaaaatgggaagcaataatattcatctgaccagttttctcttaaagccatttccatgatgatgatgatgggactcaattgtattttttatttcagtcactcctgataaataacaaatttggagaaataaaaatatctaaaataaa

SEQ ID NO: 405770 - DNA, 1889 bp, Homo sapiens
tgatttttcatgtactattttaaaaaaatcagaagcaatgcaaaaatccatgatgaacaaatgatcaacatttgaaatacagacaggatcccaacctgcacttgcatgaccttgtctcgcttgcctcaccctaaacccagccttgacactccaattaaactttatttacaaaacaagggggccggccagtaggatgtagtttgcccatacgacttttttaaagtatcgcattgactactgtttatctcgatgactgaagggttcttttggcatccctgtagcaaatgcgtctcaccctagtcctggtcctgctccaagggtttttgtccaggcacatcgtgacctcacccttcctcccctctccgaggcctctctcagggtccagcgttcaagtcccgggtgttctctggacccgccccttcctctcgccgggtcaggtgccgagggcgagcacgggcggcgcggagagcagtcccggcccgccctccacgactcctcctcctgcgagctgggccactcagcggctctgccgcccagcgcgccggggcccagaccccgccccggccccgcctccgacgcctgccgctccagctccggctccccctatataaatcggcatttgcttcgctccgcccgcagcgccggagtcaaagccggttcccggcccagtcccgtcctgcagcagtctgcctcctctttcaacatgacagatgccgctgtgtccttcgccaaggacttcctggcaggtggagtggccgcagccatctccaagacggcggtagcgcccatcgagcgggtcaagctgctgctgcaggtgcagcatgccagcaagcagatcactgcagataagcaatacaaaggcattatagactgcgtggtccgtattcccaaggagcagggagttctgtccttctggcgcggtaacctggccaatgtcatcagatacttccccacccaggctcttaacttcgccttcaaagataaatacaagcaggctggttgggggaacccaaacggaaatggaaaaaaaacccccccaaagggtttttttgggccgcctttactttttgggcaggggtctggcatcgggtggtgccgcaggggccacatccctgtgttttgtgtaccctcttgattttgcccgtacccgtctagcagctgatgtgggtaaagctggagctgaaagggaattccgaggcctcggtgactgcctggttaagatctacaaatctgatgggattaagggcctgtaccaaggctttaacgtgtctgtgcagggtattatcatctaccgagccgcctacttcggtatctatgacactgcaaagggaatgcttccggatcccaagaacactcacatcgtcatcagctggatgatcgcacagactgtcactgctgttgccgggttgacttcctatccatttgacaccgttcgccgccgcatgatgatgcagtcagggcgcaaaggaactgacatcatgtacacaggcacgcttgactgctggcggaagattgctcgtgatgaaggaggcaaagcttttttcaagggtgcatggtccaatgttctcagaggcatgggtggtgcttttgtgcttgtcttgtatgatgaaatcaagaagtacacataagttatttcctaggatttttccccctgtgaacaggcatgttgtattatataacatatcttgagcattcttgacagactcctggctgtcagtttctcagtggcaactatttactggttgaaaatgggaagcaataatattcatctgaccagttttctcttaaagccatttccatgatgatgatgatgggactcaattgtattttttatttcagtcactcctgataaataacaaatttggagaaataaaaatatctaaaataaa

SEQ ID NO: 405771 - DNA, 1745 bp, Homo sapiens
tgatttttcatgtactattttaaaaaaatcagaagcaatgcaaaaatccatgatgaacaaatgatcaacatttgaaatacagacaggatcccaacctgcacttgcatgaccttgtctcgcttgcctcaccctaaacccagccttgacactccaattaaactttatttacaaaacaagggggccggccagtaggatgtagtttgcccatacgacttttttaaagtatcgcattgactactgtttatctcgatgactgaagggttcttttggcatccctgtagcaaatgcgtctcaccctagtcctggtcctgctccaagggtttttgtccaggcacatcgtgacctcacccttcctcccctctccgaggcctctctcagggtccagcgttcaagtcccgggtgttctctggacccgccccttcctctcgccgggtcaggtgccgagggcgagcacgggcggcgcggagagcagtcccggcccgccctccacgactcctcctcctgcgagctgggccactcagcggctctgccgcccagcgcgccggggcccagaccccgccccggccccgcctccgacgcctgccgctccagctccggctccccctatataaatcggcatttgcttcgctccgcccgcagcgccggagtcaaagccggttcccggcccagtcccgtcctgcagcagtctgcctcctctttcaacatgacagatgccgctgtgtccttcgccaaggacttcctggcaggtggagtggccgcagccatctccaagacggcggtagcgcccatcgagcgggtcaagctgctgctgcaggtgcagcatgccagcaagcagatcactgcagataagcaatacaaaggcattatagactgcgtggtccgtattcccaaggagcagggagttctgtccttctggcgcggtaacctggccaatgtcatcagatacttccccacccaggctcttaacttcgccttcaaagataaatacaagcagatcttcctgggtggtgtggacaagagaacccagttttggcgctactttgcagggaatctggcatcgggtggtgccgcaggggccacatccctgtgttttgtgtaccctcttgattttgcccgtacccgtctagcagctgggtattatcatctaccgagccgcctacttcggtatctatgacactgcaaagggaatgcttccggatcccaagaacactcacatcgtcatcagctggatgatcgcacagactgtcactgctgttgccgggttgacttcctatccatttgacaccgttcgccgccgcatgatgatgcagtcagggcgcaaaggaactgacatcatgtacacaggcacgcttgactgctggcggaagattgctcgtgatgaaggaggcaaagcttttttcaagggtgcatggtccaatgttctcagaggcatgggtggtgcttttgtgcttgtcttgtatgatgaaatcaagaagtacacataagttatttcctaggatttttccccctgtgaacaggcatgttgtattatataacatatcttgagcattcttgacagactcctggctgtcagtttctcagtggcaactatttactggttgaaaatgggaagcaataatattcatctgaccagttttctcttaaagccatttccatgatgatgatgatgggactcaattgtattttttatttcagtcactcctgataaataacaaatttggagaaataaaaatatctaaaataaa

SEQ ID NO: 405772 - DNA, 649 bp, Homo sapiens
  misc_feature (35)..(36): n is a, c, g, or t
cggctgctagaggaccctcataggttcgcaggcgnngggtattatcatctaccgagccgcctacttcggtatctatgacactgcaaagggaatgcttccggatcccaagaacactcacatcgtcatcagctggatgatcgcacagactgtcactgctgttgccgggttgacttcctatccatttgacaccgttcgccgccgcatgatgatgcagtcagggcgcaaaggaactgacatcatgtacacaggcacgcttgactgctggcggaagattgctcgtgatgaaggaggcaaagcttttttcaagggtgcatggtccaatgttctcagaggcatgggtggtgcttttgtgcttgtcttgtatgatgaaatcaagaagtacacataagttatttcctaggatttttccccctgtgaacaggcatgttgtattatataacatatcttgagcattcttgacagactcctggctgtcagtttctcagtggcaactatttactggttgaaaatgggaagcaataatattcatctgaccagttttctcttaaagccatttccatgatgatgatgatgggactcaattgtattttttatttcagtcactcctgataaataacaaatttggagaaataaaaatatctaaaataaa

SEQ ID NO: 405773 - DNA, 686 bp, Homo sapiens
tcataggttcgcaggcaagatcatccaatgcaacccttgtgtacagatgacgtgtttaggggatgtggggaaaggaagtcagtaaaactctgctttttggtaaaagcatctctttcctattcccaggaatgcttccggatcccaagaacactcacatcgtcatcagctggatgatcgcacagactgtcactgctgttgccgggttgacttcctatccatttgacaccgttcgccgccgcatgatgatgcagtcagggcgcaaaggaactgacatcatgtacacaggcacgcttgactgctggcggaagattgctcgtgatgaaggaggcaaagcttttttcaagggtgcatggtccaatgttctcagaggcatgggtggtgcttttgtgcttgtcttgtatgatgaaatcaagaagtacacataagttatttcctaggatttttccccctgtgaacaggcatgttgtattatataacatatcttgagcattcttgacagactcctggctgtcagtttctcagtggcaactatttactggttgaaaatgggaagcaataatattcatctgaccagttttctcttaaagccatttccatgatgatgatgatgggactcaattgtattttttatttcagtcactcctgataaataacaaatttggagaaataaaaatatctaaaataaa

SEQ ID NO: 405774 - DNA, 492 bp, Homo sapiens
  misc_feature (35)..(36): n is a, c, g, or t
cggctgctagaggaccctcataggttcgcaggcgnngccgccgccatgatgatgcagtcaggacgcaaaggaactgacatcatgtacacaggcacgcttgactgctggcggaagattgctcgtgatgaaggaggcaaagcttttttcaagggtgcatggtccaatgttctcagaggcatgggtggtgcttttgtgcttgtcttgtatgatgaaatcaagaagtacacataagttatttcctaggatttttccccctgtgaacaggcatgttgtattatataacatatcttgagcattcttgacagactcctggctgtcagtttctcagtggcaactatttactggttgaaaatgggaagcaataatattcatctgaccagttttctcttaaagccatttccatgatgatgatgatgggactcaattgtattttttatttcagtcactcctgataaataacaaatttggagaaataaaaatatctaaaataaa

SEQ ID NO: 405775 - DNA, 337 bp, Homo sapiens
gcggccgctgccgccgcgtctccgcctgcctccctgcgccgcgcgctctccagtgccggctctagagggcgctcctgggctagcgtgtagggctggcggcggcggcgctcgggtcacctctgggagcggagtgggggcggagcgagacggaagcagctcaggagacttgaggcgtaggctgcggtccccaaggtgaccgcgccctatgtgggactcgccctaatgcctctgaacctgggtttgaggtaatgacctttctcctaggtctgaaggtcacgggtccgctggaggatgccccctctccactcagaggggtggaggcttaatgctactggtg

SEQ ID NO: 405776 - DNA, 1861 bp, Homo sapiens
tgatttttcatgtactattttaaaaaaatcagaagcaatgcaaaaatccatgatgaacaaatgatcaacatttgaaatacagacaggatcccaacctgcacttgcatgaccttgtctcgcttgcctcaccctaaacccagccttgacactccaattaaactttatttacaaaacaagggggccggccagtaggatgtagtttgcccatacgacttttttaaagtatcgcattgactactgtttatctcgatgactgaagggttcttttggcatccctgtagcaaatgcgtctcaccctagtcctggtcctgctccaagggtttttgtccaggcacatcgtgacctcacccttcctcccctctccgaggcctctctcagggtccagcgttcaagtcccgggtgttctctggacccgccccttcctctcgccgggtcaggtgccgagggcgagcacgggcggcgcggagagcagtcccggcccgccctccacgactcctcctcctgcgagctgggccactcagcggctctgccgcccagcgcgccggggcccagaccccgccccggccccgcctccgacgcctgccgctccagctccggctccccctatataaatcggcatttgcttcgctccgcccgcagcgccggagtcaaagccggttcccggcccagtcccgtcctgcagcagtctgcctcctctttcaacatgacagatgccgctgtgtccttcgccaaggacttcctggcaggtggagtggccgcagccatctccaagacggcggtagcgcccatcgagcgggtcaagctgctgctgcaggtgcagcatgccagcaagcagatcactgcagataagcaatacaaaggcattatagactgcgtggtccgtattcccaaggagcagggagttctgtccttctggcgcggtaacctggccaatgtcatcagatacttccccacccaggctcttaacttcgccttcaaagataaatacaagcagatcttcctgggtggtgtggacaagagaacccagttttggcgctactttgcagggaatctggcatcgggtggtgccgcaggggccacatccctgtgttttgtgtaccctcttgattttgcccgtacccgtctagcagctgatgtgggtaaagctggagctgaaagggaattccgaggcctcggtgactgcctggttaagatctacaaatctgatgggattaagggcctgtaccaaggctttaacgtgtctgtgcagggtattatcatctaccgagccgcctacttcggtatctatgacactgcaaagggaatgcttccggatcccaagaacactcacatcgtcatcagctggatgatcgcacagactgtcactgctgttgccgggttgacttcctatccatttgacaccgttcgccgccgcatgatgatgcagtcagggcgcaaaggaactgacatcatgtacacaggcacgcttgactgctggcggaagattgctcgtgatgaaggaggcaaagcttttttcaagggtgcatggtccaatgttctcagaggcatgggtggtgcttttgtgcttgtcttgtatgatgaaatcaagaagtacacataagttatttcctaggatttttccccctgtgaacaggcatgttgtattatataacatatcttgagcattcttgacagactcctggctgtcagtttctcagtggcaactatttactggttgaaaatgggaagcaataatattcatctgaccagttttctcttaaagccatttccatgatgatgatgatgggactcaattgtattttttatttcagtcactcctgataaataacaaatttggagaaataaaaatatctaaaataaa

SEQ ID NO: 405777 - DNA, 1378 bp, Homo sapiens
tgatttttcatgtactattttaaaaaaatcagaagcaatgcaaaaatccatgatgaacaaatgatcaacatttgaaatacagacaggatcccaacctgcacttgcatgaccttgtctcgcttgcctcaccctaaacccagccttgacactccaattaaactttatttacaaaacaagggggccggccagtaggatgtagtttgcccatacgacttttttaaagtatcgcattgactactgtttatctcgatgactgaagggttcttttggcatccctgtagcaaatgcgtctcaccctagtcctggtcctgctccaagggtttttgtccaggcacatcgtgacctcacccttcctcccctctccgaggcctctctcagggtccagcgttcaagtcccgggtgttctctggacccgccccttcctctcgccgggtcaggtgccgagggcgagcacgggcggcgcggagagcagtcccggcccgccctccacgactcctcctcctgcgagctgggccactcagcggctctgccgcccagcgcgccggggcccagaccccgccccggccccgcctccgacgcctgccgctccagctccggctccccctatataaatcggcatttgcttcgctccgcccgcagcgccggagtcaaagccggttcccggcccagtcccgtcctgcagcagtctgcctcctctttcaacatgacagatgccgctgtgtccttcgccaaggacttcctggcaggtggagtggccgcagccatctccaagacggcggtagcgcccatcgagcgggtcaagctgctgctgcaggtgcagcatgccagcaagcagatcactgcagataagcaatacaaaggcattatagactgcgtggtccgtattcccaaggagcagggagttctgtccttctggcgcggtaacctggccaatgtcatcagatacttccccacccaggctcttaacttcgccttcaaagataaatacaagcagatcttcctgggtggtgtggacaagagaacccagttttggcgctactttgcagggaatctggcatcgggtggtgccgcaggggccacatccctgtgttttgtgtaccctcttgattttgcccgtacccgtctagcagctgatgtgggtaaagctggagctgaaagggaattccgaggcctcggtgactgcctggttaagatctacaaatctgatgggattaagggcctgtaccaaggctttaacgtgtctgtgcagggtattatcatctaccgagccgcctacttcggtatctatgacactgcaaagggtggttcgggtcccttccttcatttaaacggtcgcgcccttatgatcatccaggcaaagactgcttatttacggccc

SEQ ID NO: 405778 - DNA, 2641 bp, Homo sapiens
tgatttttcatgtactattttaaaaaaatcagaagcaatgcaaaaatccatgatgaacaaatgatcaacatttgaaatacagacaggatcccaacctgcacttgcatgaccttgtctcgcttgcctcaccctaaacccagccttgacactccaattaaactttatttacaaaacaagggggccggccagtaggatgtagtttgcccatacgacttttttaaagtatcgcattgactactgtttatctcgatgactgaagggttcttttggcatccctgtagcaaatgcgtctcaccctagtcctggtcctgctccaagggtttttgtccaggcacatcgtgacctcacccttcctcccctctccgaggcctctctcagggtccagcgttcaagtcccgggtgttctctggacccgccccttcctctcgccgggtcaggtgccgagggcgagcacgggcggcgcggagagcagtcccggcccgccctccacgactcctcctcctgcgagctgggccactcagcggctctgccgcccagcgcgccggggcccagaccccgccccggccccgcctccgacgcctgccgctccagctccggctccccctatataaatcggcatttgcttcgctccgcccgcagcgccggagtcaaagccggttcccggcccagtcccgtcctgcagcagtctgcctcctctttcaacatgacagatgccgctgtgtccttcgccaaggacttcctggcaggtggagtggccgcagccatctccaagacggcggtagcgcccatcgagcgggtcaagctgctgctgcaggtgcagcatgccagcaagcagatcactgcagataagcaatacaaaggcattatagactgcgtggtccgtattcccaaggagcagggagttctgtccttctggcgcggtaacctggccaatgtcatcagatacttccccacccaggctcttaacttcgccttcaaagataaatacaagcagatcttcctgggtggtgtggacaagagaacccagttttggcgctactttgcagggaatctggcatcgggtggtgccgcaggggccacatccctgtgttttgtgtaccctcttgattttgcccgtacccgtctagcagctgatgtgggtaaagctggagctgaaagggaattccgaggcctcggtgactgcctggttaagatctacaaatctgatgggattaagggcctgtaccaaggctttaacgtgtctgtgcagggtattatcatctaccgagccgcctacttcggtatctatgacactgcaaagggaatgcttccggatcccaagaacactcacatcgtcatcagctggatgatcgcacagactgtcactgctgttgccgggttgacttcctatccatttgacaccgttcgccgccgcatgatgatgcagtcagggcgcaaaggaactgacatcatgtacacaggcacgcttgactgctggcggaagattgctcgtgatgaaggaggcaaagcttttttcaagggtgcatggtccaatgttctcagaggcatgggtggtgcttttgtgcttgtcttgtatgatgaaatcaagaagtacacataagttatttcctaggatttttccccctgtgaacaggcatgttgtattatataacatatcttgagcattcttgacagactcctggctgtcagtttctcagtggcaactatttactggttgaaaatgggaagcaataatattcatctgaccagttttctcttaaagccatttccatgatgatgatgatgggactcaattgtattttttatttcagtcactcctgataaataacaaatttggagaaataaaaatatctaaaataaataaaataaattttgtctgcagtatattttcatataaaaaacaaaaaaaaaaaaaaaaaaaaaaaaaggggggggcgcggccgggattaaaatagtttttttttttttttttttccggtatatttttttttttgtgtgttttaaaacccccgttttttggtaccccgcggtggtgaatcacccttgatatcccggtgacaccagcaacaacttggggtggggttccctggacaaaaggggcttcaggaaacctccgtgatggggagcaacagctggggaaaaagaggagctcctctacaaaagaggcggggccacagagaccttggaagggtccaagaaaaaggtgcccaaaaggggggcccggggaaacttcccccagggtggtaaagtgacacccccggttgagtcgttggacaagtcttatcagatacccacgccctcagaagaagggttttttaaggaccagggtgggagacaacgatagccgagggcccccttggtaccgagggaatatacgtacaccaacactaaagcgagagcagatgtacctcttgaaggggacatgtgtggtgtgccgatttgtgtccccccacaactgcgaccgggaaaaggaacattgcaggaatatgcccgggtggggggaccctgggaggagagtaaagagaggcggccaagacccagagccagtacacacgattttaaaggcgccataggatatcagcaggcagcaggaggaaactgcatgcgacatgtggctggaccacatgcacagtctgacctg

SEQ ID NO: 405779 - DNA, 2090 bp, Homo sapiens
  misc_feature (1864)..(1864): n is a, c, g, or t
tgatttttcatgtactattttaaaaaaatcagaagcaatgcaaaaatccatgatgaacaaatgatcaacatttgaaatacagacaggatcccaacctgcacttgcatgaccttgtctcgcttgcctcaccctaaacccagccttgacactccaattaaactttatttacaaaacaagggggccggccagtaggatgtagtttgcccatacgacttttttaaagtatcgcattgactactgtttatctcgatgactgaagggttcttttggcatccctgtagcaaatgcgtctcaccctagtcctggtcctgctccaagggtttttgtccaggcacatcgtgacctcacccttcctcccctctccgaggcctctctcagggtccagcgttcaagtcccgggtgttctctggacccgccccttcctctcgccgggtcaggtgccgagggcgagcacgggcggcgcggagagcagtcccggcccgccctccacgactcctcctcctgcgagctgggccactcagcggctctgccgcccagcgcgccggggcccagaccccgccccggccccgcctccgacgcctgccgctccagctccggctccccctatataaatcggcatttgcttcgctccgcccgcagcgccggagtcaaagccggttcccggcccagtcccgtcctgcagcagtctgcctcctctttcaacatgacagatgccgctgtgtccttcgccaaggacttcctggcaggtggagtggccgcagccatctccaagacggcggtagcgcccatcgagcgggtcaagctgctgctgcaggtgcagcatgccagcaagcagatcactgcagataagcaatacaaaggcattatagactgcgtggtccgtattcccaaggagcagggagttctgtccttctggcgcggtaacctggccaatgtcatcagatacttccccacccaggctcttaacttcgccttcaaagataaatacaagcagatcttcctgggtggtgtggacaagagaacccagttttggcgctactttgcagggaatctggcatcgggtggtgccgcaggggccacatccctgtgttttgtgtaccctcttgattttgcccgtacccgtctagcagctgatgtgggtaaagctggagctgaaagggaattccgaggcctcggtgactgcctggttaagatctacaaatctgatgggattaagggcctgtaccaaggctttaacgtgtctgtgcagggtattatcatctaccgagccgcctacttcggtatctatgacactgcaaagggaatgcttccggatcccaagaacactcacatcgtcatcagctggatgatcgcacagactgtcactgctgttgccgggttgacttcctatccatttgacaccgttcgccgccgcatgatgatgcagtcagggcgcaaaggaactgacatcatgtacacaggcacgcttgactgctggcggaagattgctcgtgatgaaggaggcaaagcttttttcaagggtgcatggtccaatgttctcagaggcatgggtggtgcttttgtgcttgtcttgtatgatgaaatcaagaagtacacataagttatttcctaggatttttccccctgtgaacaggcatgttgtattatataacatatcttgagcattcttgacagactcctggctgtcagtttctcagtggcaactatttactggttgaaaatgggaagcaataatattcatctgaccagttttctcttaaagccatttccatgatgatgatgatgggactcaattgtattttttatttcagtcactcctgataaataacaaatttggagaaataaaaatatctaaaataaacanacagcacacaacaccttcctattaacaaccaagggggggggcaaaaagatcccgcggagggcccaatttgcaccccgtttctgtgccagggggcctaggggcggatatagagcggccggcgcggttaccccggcggacacgcctggtctttcgagccccctggttctttggcccccagatgccggaaaactgtttgtgaccgtggcggtgtgcgttatactcttct

SEQ ID NO: 405780 - DNA, 1885 bp, Homo sapiens
tgatttttcatgtactattttaaaaaaatcagaagcaatgcaaaaatccatgatgaacaaatgatcaacatttgaaatacagacaggatcccaacctgcacttgcatgaccttgtctcgcttgcctcaccctaaacccagccttgacactccaattaaactttatttacaaaacaagggggccggccagtaggatgtagtttgcccatacgacttttttaaagtatcgcattgactactgtttatctcgatgactgaagggttcttttggcatccctgtagcaaatgcgtctcaccctagtcctggtcctgctccaagggtttttgtccaggcacatcgtgacctcacccttcctcccctctccgaggcctctctcagggtccagcgttcaagtcccgggtgttctctggacccgccccttcctctcgccgggtcaggtgccgagggcgagcacgggcggcgcggagagcagtcccggcccgccctccacgactcctcctcctgcgagctgggccactcagcggctctgccgcccagcgcgccggggcccagaccccgccccggccccgcctccgacgcctgccgctccagctccggctccccctatataaatcggcatttgcttcgctccgcccgcagcgccggagtcaaagccggttcccggcccagtcccgtcctgcagcagtctgcctcctctttcaacatgacagatgccgctgtgtccttcgccaaggacttcctggcaggtggagtggccgcagccatctccaagacggcggtagcgcccatcgagcgggtcaagctgctgctgcaggtgcagcatgccagcaagcagatcactgcagataagcaatacaaaggcattatagactgcgtggtccgtattcccaaggagcagggagttctgtccttctggcgcggtaacctggccaatgtcatcagatacttccccacccaggctcttaacttcgccttcaaagataaatacaagcagatcttcctgggtggtgtggacaagagaacccagttttggcgctactttgcagggaatctggcatcgggtggtgccgcaggggccacatccctgtgttttgtgtaccctcttgattttgcccgtacccgtctagcagctgatgtgggtaaagctggagctgaaagggaattccgaggcctcggtgactgcctggttaagatctacaaatctgatgggattaagggcctgtaccaaggctttaacgtgtctgtgcagggtattatcatctaccgagccgcctacttcggtatctatgacactgcaaagggaatgcttccggatcccaagaacactcacatcgtcatcagctggatgatcgcacagactgtcactgctgttgccgggttgacttcctatccatttgacaccgttcgccgccgcatgatgatgcagtcagggcgcaaaggaactgacatcatgtacacaggcacgcttgactgctggcggaagattgctcgtgatgaaggaggcaaagcttttttcaagggtgcatggtccaatgttctcagaggcatgggtggtgcttttgtgcttgtcttgtatgatgaaatcaagaagtacacataagttatttcctaggatttttccccctgtgaacaggcatgttgtattatataacatatcttgagcattcttgacagactcctggctgtcagtttctcagtggcaactatttactggttgaaaatgggaagcaataatattcatctgaccagttttctcttaaagccatttccatgatgatgatgatgggactcaattgtattttttatttcagtcactcctgataaataacaaatttggagaaataaaaatatctaaaataaacagccaggagtctgtcaagaatgc

SEQ ID NO: 405781 - DNA, 1239 bp, Homo sapiens
  misc_feature (3)..(3): n is a, c, g, or t
  misc_feature (28)..(28): n is a, c, g, or t
atnttcggcacgaggccggtttcccgangttccggttcccggcccagtcccgtcctgcagcagtctgcctcctctttcaacatgacagatgccgctgtgtccttcgccaaggacttcctggcaggtggagtggccgcagccatctccaagacggcggtagcgcccatcgagcgggtcaagctgctgctgcaggtgcagcatgccagcaagcagatcactgcagataagcaatacaaaggcattatagactgcgtggtccgtattcccaaggagcagggagttctgtccttctggcgcggtaacctggccaatgtcatcagatacttccccacccaggctcttaacttcgccttcaaagataaatacaagcagatcttcctgggtggtgtggacaagagaacccagttttggcgctactttgcagggaatctggcatcgggtggtgccgcaggggccacatccctgtgttttgtgtaccctcttgattttgcccgtacccgtctagcagctgatgtgggtaaagctggagctgaaagggaattccgaggcctcggtgactgcctggttaagatctacaaatctgatgggattaagggcctgtaccaaggctttaacgtgtctgtgcagggtattatcatctaccgagccgcctacttcggtatctatgacactgcaaagggaatgcttccggatcccaagaacactcacatcgtcatcagctggatgatcgcacagactgtcactgctgttgccgggttgacttcctatccatttgacaccgttcgccgccgcatgatgatgcagtcagggcgcaaaggaactgacatcatgtacacaggcacgcttgactgctggcggaagattgctcgtgatgaaggaggcaaagcttttttcaagggtgcatggtccaatgttctcagaggcatgggtggtgcttttgtgcttgtcttgtatgatgaaatcaagaagtacacataagttatttcctaggatttttccccctgtgaacaggcatgttgtattatataacatatcttgagcattcttgacagactcctggctgtcagtttctcagtggcaactatttactggttgaaaatgggaagcaataatattcatctgaccagttttctcttaaagccatttccatgatgatgatgatgggactcaattgtattttttatttcagtcactcctgataaataacaaatttggagaaataaaaatatctaaaataaa

SEQ ID NO: 405782 - DNA, 1616 bp, Homo sapiens
tgatttttcatgtactattttaaaaaaatcagaagcaatgcaaaaatccatgatgaacaaatgatcaacatttgaaatacagacaggatcccaacctgcacttgcatgaccttgtctcgcttgcctcaccctaaacccagccttgacactccaattaaactttatttacaaaacaagggggccggccagtaggatgtagtttgcccatacgacttttttaaagtatcgcattgactactgtttatctcgatgactgaagggttcttttggcatccctgtagcaaatgcgtctcaccctagtcctggtcctgctccaagggtttttgtccaggcacatcgtgacctcacccttcctcccctctccgaggcctctctcagggtccagcgttcaagtcccgggtgttctctggacccgccccttcctctcgccgggtcaggtgccgagggcgagcacgggcggcgcggagagcagtcccggcccgccctccacgactcctcctcctgcgagctgggccactcagcggctctgccgcccagcgcgccggggcccagaccccgccccggccccgcctccgacgcctgccgctccagctccggctccccctatataaatcggcatttgcttcgctccgcccgcagcgccggagtcaaagccggttcccggcccagtcccgtcctgcagcagtctgcctcctctttcaacatgacagatgccgctgtgtccttcgccaaggacttcctggcaggtggagtggccgcagccatctccaagacggcggtagcgcccatcgagcgggtcaagctgctgctgcaggtgcagcatgccagcaagcagatcactgcagataagcaatacaaaggcattatagactgcgtggtccgtattcccaaggagcagggagttctgtccttctggcgcggtaacctggccaatgtcatcagatacttccccacccaggctcttaacttcgccttcaaagataaatacaagcagatcttcctgggtggtgtggacaagagaacccagttttggcgctactttgcagggaatctggcatcgggtggtgccgcaggggccacatccctgtgttttgtgtaccctcttgattttgcccgtacccgtctagcagctgatgtgggtaaagctggagctgaaagggaattccgaggcctcggtgactgcctggttaagatctacaaatctgatgggattaagggcctgtaccaaggctttaacgtgtctgtgcagggtattatcatctaccgagccgcctacttcggtatctatgacactgcaaagggaatgcttccggatcccaagaacactcacatcgtcatcagctggatgatcgcacagactgtcactgctgttgccgggttgacttcctatccatttgacaccgttcgccgccgcatgatgatgcagtcagggcgcaaaggaatggatctgttcccggcgctgagggggaaatgccggataagggcaacttttcggggctggccacgccaacgagggggcgcgcggttatacaaaccaaattcgggtccggagagggtataaatatcagaggggtggaagggagaaaaccagggttcatctaaacacgtagtatata

SEQ ID NO: 405783 - DNA, 1157 bp, Homo sapiens
ggcggagcgagacggaagcagctcaggagacttgaggcgtaggctgcggtccccaaggtgaccgcgccctatgtgggactcgccctaatgcctctgaacctgggtttgaggtgcagcatgccagcaagcagatcactgcagataagcaatacaaaggcattatagactgcgtggtccgtattcccaaggagcagggagttctgtccttctggcgcggtaacctggccaatgtcatcagatacttccccacccaggctcttaacttcgccttcaaagataaatacaagcagatcttcctgggtggtgtggacaagagaacccagttttggcgctactttgcagggaatctggcatcgggtggtgccgcaggggccacatccctgtgttttgtgtaccctcttgattttgcccgtacccgtctagcagctgatgtgggtaaagctggagctgaaagggaattccgaggcctcggtgactgcctggttaagatctacaaatctgatgggattaagggcctgtaccaaggctttaacgtgtctgtgcagggtattatcatctaccgagccgcctacttcggtatctatgacactgcaaagggaatgcttccggatcccaagaacactcacatcgtcatcagctggatgatcgcacagactgtcactgctgttgccgggttgacttcctatccatttgacaccgttcgccgccgcatgatgatgcagtcagggcgcaaaggaactgacatcatgtacacaggcacgcttgactgctggcggaagattgctcgtgatgaaggaggcaaagcttttttcaagggtgcatggtccaatgttctcagaggcatgggtggtgcttttgtgcttgtcttgtatgatgaaatcaagaagtacacataagttatttcctaggatttttccccctgtgaacaggcatgttgtattatataacatatcttgagcattcttgacagactcctggctgtcagtttctcagtggcaactatttactggttgaaaatgggaagcaataatattcatctgaccagttttctcttaaagccatttccatgatgatgatgatgggactcaattgtattttttatttcagtcactcctgataaataacaaatttggagaaataaaaatatctaaaataaa

SEQ ID NO: 405784 - DNA, 897 bp, Homo sapiens
tcgacggacgcgtgggtcgacccacgcgtcatcttcctgggtggtgtggacaagagaacccagttttggcgctactttgcagggaatctggcatcgggtggtgccgcaggggccacatccctgtgttttgtgtaccctcttgattttgcccgtacccgtctagcagctgatgtgggtaaagctggagctgaaagggaattccgaggcctcggtgactgcctggttaagatctacaaatctgatgggattaagggcctgtaccaaggctttaacgtgtctgtgcagggtattatcatctaccgagccgcctacttcggtatctatgacactgcaaagggaatgcttccggatcccaagaacactcacatcgtcatcagctggatgatcgcacagactgtcactgctgttgccgggttgacttcctatccatttgacaccgttcgccgccgcatgatgatgcagtcagggcgcaaaggaactgacatcatgtacacaggcacgcttgactgctggcggaagattgctcgtgatgaaggaggcaaagcttttttcaagggtgcatggtccaatgttctcagaggcatgggtggtgcttttgtgcttgtcttgtatgatgaaatcaagaagtacacataagttatttcctaggatttttccccctgtgaacaggcatgttgtattatataacatatcttgagcattcttgacagactcctggctgtcagtttctcagtggcaactatttactggttgaaaatgggaagcaataatattcatctgaccagttttctcttaaagccatttccatgatgatgatgatgggactcaattgtattttttatttcagtcactcctgataaataacaaatttggagaaataaaaatatctaaaataaa

SEQ ID NO: 405785 - DNA, 1542 bp, Homo sapiens
tgatttttcatgtactattttaaaaaaatcagaagcaatgcaaaaatccatgatgaacaaatgatcaacatttgaaatacagacaggatcccaacctgcacttgcatgaccttgtctcgcttgcctcaccctaaacccagccttgacactccaattaaactttatttacaaaacaagggggccggccagtaggatgtagtttgcccatacgacttttttaaagtatcgcattgactactgtttatctcgatgactgaagggttcttttggcatccctgtagcaaatgcgtctcaccctagtcctggtcctgctccaagggtttttgtccaggcacatcgtgacctcacccttcctcccctctccgaggcctctctcagggtccagcgttcaagtcccgggtgttctctggacccgccccttcctctcgccgggtcaggtgccgagggcgagcacgggcggcgcggagagcagtcccggcccgccctccacgactcctcctcctgcgagctgggccactcagcggctctgccgcccagcgcgccggggcccagaccccgccccggccccgcctccgacgcctgccgctccagctccggctccccctatataaatcggcatttgcttcgctccgcccgcagcgccggagtcaaagccggttcccggcccagtcccgtcctgcagcagtctgcctcctctttcaacatgacagatgccgctgtgtccttcgccaaggacttcctggcaggtggagtggccgcagccatctccaagacggcggtagcgcccatcgagcgggtcaagctgctgctgcagatgtgggtaaagctggagctgaaagggaattccgaggcctcggtgactgcctggttaagatctacaaatctgatgggattaagggcctgtaccaaggctttaacgtgtctgtgcagggtattatcatctaccgagccgcctacttcggtatctatgacactgcaaagggaatgcttccggatcccaagaacactcacatcgtcatcagctggatgatcgcacagactgtcactgctgttgccgggttgacttcctatccatttgacaccgttcgccgccgcatgatgatgcagtcagggcgcaaaggaactgacatcatgtacacaggcacgcttgactgctggcggaagattgctcgtgatgaaggaggcaaagcttttttcaagggtgcatggtccaatgttctcagaggcatgggtggtgcttttgtgcttgtcttgtatgatgaaatcaagaagtacacataagttatttcctaggatttttccccctgtgaacaggcatgttgtattatataacatatcttgagcattcttgacagactcctggctgtcagtttctcagtggcaactatttactggttgaaaatgggaagcaataatattcatctgaccagttttctcttaaagccatttccatgatgatgatgatgggactcaattgtattttttatttcagtcactcctgataaataacaaatttggagaaataaaaatatctaaaataaa

SEQ ID NO: 405786 - DNA, 3562 bp, Homo sapiens
ccgaggcgagggagtcccgggatcacagaggagcgggtcccgggttcgagtcgctcttgccctcccgcccgggccccgcgctcactgtccatgccggggaagggcagcggctgcgcccccagctgctgctccaccgcgatctccaagtcaaacttgatgtggtccacgctggcgatgatttcctgcatggcggcggcggcggccccaccggcccggctccccctcggtctcctgcagccttctcgcctttacccgccgccggccccgccgcacacactcctccttcgcttcgcctcgccgccgccgccgccgccgcccgagggatgccgggagcgcccggagcccgcgccggcccttgcgcctgtccaggcactgccaatcgagactccgccgttccgctagtcccagctagccgccagccgaacaccggcctcgccagaaacctgaaaccagccgcgtgagtcggcgacgcggattgcgcctgcgcgcttggggagagggggacccgaggaagagactggttcgccgcggggaccgggcagggctccccgtcggagtgcactgcgccggacacttcaagccctggagggacaggaaagccagaaatggacttcgtgagactcgctcgactgttcgccagggcccgccccatgggactgttcatcctgcaacacctggacccctgtagagccaggtgggcaggaggcagggaggggctgatgcggccaatgtgggcgcccttcagcagctcctcctctcagctgcccctcggccaggagcgtcaggaaaacacgggcagcctgggctctgacccgagccactccaactccacggccacgcaggaagaagacgaggaggaggaggagagttttgggaccctctctgacaaatactcctcccggagactattccgcaaatccgcagcccagttccataacctgcggtttggggaacggagagatgagcaaatggaaccggagcccaaattatggcgaggccggagaaacaccccgtactggtacttcttgcagtgcaaacacctgatcaaggaagggaagctggttgaagccctggacctgtttgagaggcagatgctgaaggaggagcgattgcagcccatggagagcaactacacggtgctgattgggggctgcgggcgggttggctacctgaagaaggccttcaacctctacaaccagatgaaaaagcgggacctggagccctcggacgccacctacacggccctgttcaacgtctgtgccgagtccccctggaaggactcagctctacagagcgccctgaagctccggcagcagctgcaggccaaaaacttcgagctcaacttgaaaacataccacgcgctgctgaagatggctgccaagtgcgcagaccttaggatgtgcctcgatgtgttcaaggaaatcatccacaaagggcacgtggtcacagaggagaccttcagtttcctgctcatgggctgcatccaagacaagaagacaggcttccggtacgccctccaggtgtggcggctgatgctgagtctagggctacagccgagccgggacagctacaacctgctgttggtggcagctcgggactgtggcctaggggacccccaggtggcctcagagctgcttctgaagcccagggaggaggcgactgtgcttcagcccccagtgagcaggcagcggccaaggaggacagcccaggccaaggcaggcaacctcatgtcagccatgctgcatgtggaggccctggagaggcagctgtttctggaaccttctcaggcacttgggcctccagagcctccggaagccagagtgcccggcaaggcccaaccagaggtggatactaaggcagagcccagccacacagcagccctcaccgcagtggccctgaagccacctcccgtggagctggaagtcaacctcctgacccccggggccgttccccctacagtggtctcctttggaacggtgaccaccccagctgaccggctggccttgatagggggcctggagggcttcctgagcaagatggcagagcacaggcagcagcccgacatcaggaccctcacgctactggccgaggtggtggagtccgggagtcctgcagagtccttgctgctggccctcctggatgagcaccaggtagaggccgacctgacattctttaacacgctggtgagaaagaagagcaagctgggagacctggagggggccaaggcgctgttgccggtcctggcaaagaggggcctcgtccccaacctgcagacattctgcaacctggccatcgggtgccacaggccgaaggacggtctacagcttctcacagacatgaagaagtcccaggtgacccccaacactcacatctacagtgccctcatcaacgcggccatcaggaagctgaactacacctatctcatcagcatcttgaaggacatgaagcagaacagggtcccggtgaacgaagtggtcatccgccagctggagtttgcagcccagtaccctcccacctttgaccggtaccaagggaagaacacctacctggagaagattgacggcttccgagcctattacaagcagtggctgacagtgatgcccgcagaggaaaccccgcacccctggcagaagttccggaccaagccccagggggaccaggacaccggcaaggaggctgatgacggatgtgcccttgggggcaggtgatgggagcacagctggaacaatgtgctcggcccccagtgctctgtgggagccccaggacaagtgagctggtgtcacctcctgcctgggggaagagccaggccctgaggaacagccgcagcgtgtcacaggtgttggtgaggacacacactaggcccaaggtgcctgtgctcccagcaggtccaagtgcagctccagccacctttgcgtgtcaccttcacgggacttccagctccagctacctttgtgtgtcacctcacacaccacaagggggctggggcatctggtccctggggcctgggccgccccgccgggttccataggccgatgctctgaaagaagagacgtggggctcgagagatttaaagattttatttttacaaatcacagctgatagacagcgaagccttccccatagagaccgtgctccaactcgggcctggggcactgctcgctgctcccaggaagggggtggcgtgacaggcaggaacctgcgaagtccagagtccagggtggagcgcgccagcctcagccagagcagccacgacagccacagtgtgtgcactcgatgatgcggccctgcaacggaggaggacagtgagacgatgccactgcgccacgctcgcccctgcacactcacatatgtggcaaccctcccacgaaggacctgccaccatgccatatagggacacacctcagaaacccttccttgacagctctggacagggaaaatttggctccctcatgaaggtagaaccagctgctgttgacaccgaggttacatctgtatgtctatttataatatgttctgcaaatccaacacacgtttgccaatcaagaaaaagaaatcggtgtga

SEQ ID NO: 405787 - DNA, 3041 bp, Homo sapiens
ccgaggcgagggagtcccgggatcacagaggagcgggtcccgggttcgagtcgctcttgccctcccgcccgggccccgcgctcactgtccatgccggggaagggcagcggctgcgcccccagctgctgctccaccgcgatctccaagtcaaacttgatgtggtccacgctggcgatgatttcctgcatggcggcggcggcggccccaccggcccggctccccctcggtctcctgcagccttctcgcctttacccgccgccggccccgccgcacacactcctccttcgcttcgcctcgccgccgccgccgccgccgcccgagggatgccgggagcgcccggagcccgcgccggcccttgcgcctgtccaggcactgccaatcgagactccgccgttccgctagtcccagctagccgccagccgaacaccggcctcgccagaaacctgaaaccagccgcgtgagtcggcgacgcggattgcgcctgcgcgcttggggagagggggacccgaggaagagactggttcgccgcggggaccgggcagggctccccgtcggagtgcactgcgccggacacttcaagccctggagggacaggaaagccagaaatggacttcgtgagactcgctcgactgttcgccagggcccgccccatgggactgttcatcctgcaacacctggacccctgtagagccaggtgggcaggaggcagggaggggctgatgcggccaatgtgggcgcccttcagcagctcctcctctcagctgcccctcggccaggagcgtcaggaaaacacgggcagcctgggctctgacccgagccactccaactccacggccacgcaggaagaagacgaggaggaggaggagagttttgggaccctctctgacaaatactcctcccggagactattccgcaaatccgcagcccagttccataacctgcggtttggggaacggagagatgagcaaatggaaccggagcccaaattatggcgaggccggagaaacaccccgtactggtacttcttgcagtgcaaacacctgatcaaggaagggaagctggttgaagccctggacctgtttgagaggcagatgctgaaggaggagcgattgcagcccatggagagcaactacacggtgctgattgggggctgcgggcgggttggctacctgaagaaggccttcaacctctacaaccagatgaaaaagcgggacctggagccctcggacgccacctacacggccctgttcaacgtctgtgccgagtccccctggaaggactcagctctacagagcgccctgaagctccggcagcagctgcaggccaaaaacttcgagctcaacttgaaaacataccacgcgctgctgaagatggctgccaagtgcgcagaccttaggatgtgcctcgatgtgttcaaggaaatcatccacaaagggcacgtggtcacagaggagaccttcagtttcctgctcatgggctgcatccaagacaagaagacagggcttcctgagcaagatggcagagcacaggcagcagcccgacatcaggaccctcacgctactggccgaggtggtggagtccgggagtcctgcagagtccttgctgctggccctcctggatgagcaccaggtagaggccgacctgacattctttaacacgctggtgagaaagaagagcaagctgggagacctggagggggccaaggcgctgttgccggtcctggcaaagaggggcctcgtccccaacctgcagacattctgcaacctggccatcgggtgccacaggccgaaggacggtctacagcttctcacagacatgaagaagtcccaggtgacccccaacactcacatctacagtgccctcatcaacgcggccatcaggaagctgaactacacctatctcatcagcatcttgaaggacatgaagcagaacagggtcccggtgaacgaagtggtcatccgccagctggagtttgcagcccagtaccctcccacctttgaccggtaccaagggaagaacacctacctggagaagattgacggcttccgagcctattacaagcagtggctgacagtgatgcccgcagaggaaaccccgcacccctggcagaagttccggaccaagccccagggggaccaggacaccggcaaggaggctgatgacggatgtgcccttgggggcaggtgatgggagcacagctggaacaatgtgctcggcccccagtgctctgtgggagccccaggacaagtgagctggtgtcacctcctgcctgggggaagagccaggccctgaggaacagccgcagcgtgtcacaggtgttggtgaggacacacactaggcccaaggtgcctgtgctcccagcaggtccaagtgcagctccagccacctttgcgtgtcaccttcacgggacttccagctccagctacctttgtgtgtcacctcacacaccacaagggggctggggcatctggtccctggggcctgggccgccccgccgggttccataggccgatgctctgaaagaagagacgtggggctcgagagatttaaagattttatttttacaaatcacagctgatagacagcgaagccttccccatagagaccgtgctccaactcgggcctggggcactgctcgctgctcccaggaagggggtggcgtgacaggcaggaacctgcgaagtccagagtccagggtggagcgcgccagcctcagccagagcagccacgacagccacagtgtgtgcactcgatgatgcggccctgcaacggaggaggacagtgagacgatgccactgcgccacgctcgcccctgcacactcacatatgtggcaaccctcccacgaaggacctgccaccatgccatatagggacacacctcagaaacccttccttgacagctctggacagggaaaatttggctccctcatgaaggtagaaccagctgctgttgacaccgaggttacatctgtatgtctatttataatatgttctgcaaatccaacacacgtttgccaatcaagaaaaagaaatcggtgtga

SEQ ID NO: 405788 - DNA, 5937 bp, Homo sapiens
ccgaggcgagggagtcccgggatcacagaggagcgggtcccgggttcgagtcgctcttgccctcccgcccgggccccgcgctcactgtccatgccggggaagggcagcggctgcgcccccagctgctgctccaccgcgatctccaagtcaaacttgatgtggtccacgctggcgatgatttcctgcatggcggcggcggcggccccaccggcccggctccccctcggtctcctgcagccttctcgcctttacccgccgccggccccgccgcacacactcctccttcgcttcgcctcgccgccgccgccgccgccgcccgagggatgccgggagcgcccggagcccgcgccggcccttgcgcctgtccaggcactgccaatcgagactccgccgttccgctagtcccagctagccgccagccgaacaccggcctcgccagaaacctgaaaccagccgcgtgagtcggcgacgcggattgcgcctgcgcgcttggggagagggggacccgaggaagagactggttcgccgcggggaccgggcagggctccccgtcggagtgcactgcgccggacacttcaagccctggagggacaggaaagccagaaatggacttcgtgagactcgctcgactgttcgccagggcccgccccatgggactgttcatcctgcaacacctggacccctgtagagccaggtgggcaggaggcagggaggggctgatgcggccaatgtgggcgcccttcagcagctcctcctctcagctgcccctcggccaggagcgtcaggaaaacacgggcagcctgggctctgacccgagccactccaactccacggccacgcaggaagaagacgaggaggaggaggagagttttgggaccctctctgacaaatactcctcccggagactattccgcaaatccgcagcccagttccataacctgcggtttggggaacggagagatgagcaaatggaaccggagcccaaattatggcgaggccggagaaacaccccgtactggtacttcttgcagtgcaaacacctgatcaaggaagggaagctggttgaagccctggacctgtttgagaggcagatgctgaaggaggagcgattgcagcccatggagagcaactacacggtgctgattgggggctgcgggcgggttggctacctgaagaaggccttcaacctctacaaccagatgaaaaagcgggacctggagccctcggacgccacctacacggccctgttcaacgtctgtgccgagtccccctggaaggactcagctctacagagcgccctgaagctccggcagcagctgcaggccaaaaacttcgagctcaacttgaaaacataccacgcgctgctgaagatggctgccaagtgcgcagaccttaggatgtgcctcgatgtgttcaaggaaatcatccacaaagggcacgtggtcacagaggagaccttcagtttcctgctcatgggctgcatccaagacaagaagacaggcttccggtacgccctccaggtgtggcggctgatgctgagtctagggctacagccgagccgggacagctacaacctgctgttggtggcagctcgggactgtggcctaggggacccccaggtggcctcagagctgcttctgaagcccagggaggaggcgactgtgcttcagcccccagtgagcaggcagcggccaaggaggacagcccaggccaaggcaggcaacctcatgtcagccatgctgcatgtggaggccctggagaggcagctgtttctggaaccttctcaggcacttgggcctccagagcctccggaagccagagtgcccggcaaggcccaaccagaggtggatactaaggcagagcccagccacacagcagccctcaccgcagtggccctgaagccacctcccgtggagctggaagtcaacctcctgacccccggggccgttccccctacagtggtctcctttggaacggtgaccaccccagctgaccggctggccttgatagggggcctggagggcttcctgagcaagatggcagagcacaggcagcagcccgacatcaggaccctcacgctactggccgaggtggtggagtccgggagtcctgcagagtccttgctgctggccctcctggatgagcaccaggtagaggccgacctgacattctttaacacgctggtgagaaagaagagcaagctgggagacctggagggggccaaggcgctgttgccggtcctggcaaagaggggcctcgtccccaacctgcagacattctgcaacctggccatcgggtgccacaggccgaaggacggtctacagcttctcacagacatgaagaagtcccaggtgacccccaacactcacatctacagtgccctcatcaacgcggccatcaggaagctgaactacacctatctcatcagcatcttgaaggacatgaagcagaacagggtcccggtgaacgaagtggtcatccgccagctggagtttgcagcccagtaccctcccacctttgaccggtaccaagggaagaacacctacctggagaagattgacggcttccgagcctattacaagcagtggctgacagtgatgcccgcagaggaaaccccgcacccctggcagaagttccggaccaagccccagggggaccaggacaccggcaaggaggctgatgacggatgtgcccttgggggcaggtgatgggagcacagctggaacaatgtgctcggcccccagtgctctgtgggagccccaggacaagtgagctggtgtcacctcctgcctgggggaagagccaggccctgaggaacagccgcagcgtgtcacaggtgttggtgaggacacacactaggcccaaggtgcctgtgctcccagcaggtccaagtgcagctccagccacctttgcgtgtcaccttcacgggacttccagctccagctacctttgtgtgtcacctcacacaccacaagggggctggggcatctggtccctggggcctgggccgccccgccgggttccataggccgatgctctgaaagaagagacgtggggctcgagagatttaaagattttatttttacaaatcacagctgatagacagcgaagccttccccatagagaccgtgctccaactcgggcctggggcactgctcgctgctcccaggaagggggtggcgtgacaggcaggaacctgcgaagtccagagtccagggtggagcgcgccagcctcagccagagcagccacgacagccacagtgtgtgcactcgatgatgcggccctgcaacggaggaggacagtgagacgatgccactgcgccacgctcgcccctgcacactcacatatgtggcaaccctcccacgaaggacctgccaccatgccatatagggacacacctcagaaacccttccttgacagctctggacagggaaaatttggctccctcatgaaggtagaaccagctgctgttgacaccgaggttacatctgtatgtctatttataatatgttctgcaaatccaacacacgtttgccaatcaagaaaaagaaatcggtgtgaatgagtctcgttattctgctaagtgagcatgacagaccctgcgatgagcagacgtggctctgctactgtttggggacttcaggggggcctctgggctggtacactctggtgggggaagagggcaggagactatgcacttgagtcacacccttctggcccagagccccccagaaagaagggtcttgtcccccaggcctggtgcggcccaacacttggccagccagaaagccctagaacagtggcttgtgtttattttactttttcaagttctttttttggaagaacaagaccatagtttaagtaaacaggatcctctggtgaaacccaggtaagtctacagcgggctgttttggccacagggctgaagcagcaccccagcccaccagcccctgacctggactccttgtggaatctgggcactcagaggaagggggcttctgccactctgccacctgtccctgcctccatcagaaaaccaacaccccagtcttccgtcggggaggcggcccttgctcgcccccactgctcagtacccaagtcctcagcatccagccacagctctccattgtcagtctcactgcagcataaaggggactcatgtgaagaggcccctgtgtggagctggggaaaagaaggccaggctggcagatgggcggtggggccaacaactgtgctgaggggctgcactgagcggccactgctgtgactctgcctcgggccacagctgcctttcagaggggcttggaaccggatggagctcagctcctgtccctcagcaccactcctgaggcgcctggcctaggagtggtacttggaacagaaagttctgaaagaagaaacacagtgggctgggcgcagtagctcatgcctgtaatcccggcactttgggaggctgaggcgggtggatcacctgaggtcgggagttcgagaccagcctgagcaacattgagaaaccccgtctctactaaaaatacaaaattagccaggcgtggtggtgcatgcctgtagtcccagctactcaggaggatgaggcaggagaaccgcttgaacccgggaggtggaggttgcagtgagccaagatggcatcactgcactccagcctgggcgacaaagcaagactccgtcttgggggggcgggaaagatagtgatggtaatgttaaagtatcactgtgaggactgaaagggacaggaactcactggttgtccttccctgatgtcaccctgccaccaccttgggattagggctccccaccaccatttcctaagtgaggaaaggggttcagtaatttgcccaaaagtggagttgagattgaccccagacctaacaaacacacagccacacgctgcctcacatggattcctgaatacagggacccactcccacgagggagagccagcaggacatccagggacaaaacgacattccagcccaaccaaataacataagatcccttgcagtcgactaaggcagaattttgagctgaaaacaacaccaagcttgagtgtcagacattaccacttccagcttgcttttgggcacgcggcagatgcagttcgtcccgaagttggtgtcccgtgtctgaatgcaccgcaggcagcacaagttctcatatccttgctttttccattttgcaatcaggtttttgtctgcatagccttctttaatacaatattcatagagttctgtcaaaaagatggggaaagagcatcaggccatggtctaaaaaccttccccacccttgatcaaaaaaagcattcaggccgggtgcagtggctcacacctgtaatcccagcactttgggaggccgaggcaggcggatcacctgaggtcaggagttcaggaccagcccggccaacatggtaaaaccccgtctctactaaaaatacaaaaattactcgggcgtggtagcagctgtaatcccagctacttaggaggctgaggcaggagaatcacttgaacccaggaggcggaggttgtagtgacctgaggtcgtgccactggactccagcctgggtgacagcgaaactccatctcaaaaaaaaaaaggcattcagtattgcaacgggacagtccttggaggaggaacaaaaaaaaaaagtacttaggccaggcaaggtgcctcacacctgtaatcccagcacttttggaagccaacgccagaggatcatttgagttaagaaaccagcctgggccaagggcccatctccacaaaaaatttaaaaattagctgggtgtggtggtgcacacctgtagtcacagctactcaggaggttgaggtgagaggatcccttgagcccagaaggttgaggctgcagtgagccatcattgcaccactgcactccagcctgtggaacagagcaagaccctgtttca

SEQ ID NO: 405789 - DNA, 3338 bp, Homo sapiens
ccgaggcgagggagtcccgggatcacagaggagcgggtcccgggttcgagtcgctcttgccctcccgcccgggccccgcgctcactgtccatgccggggaagggcagcggctgcgcccccagctgctgctccaccgcgatctccaagtcaaacttgatgtggtccacgctggcgatgatttcctgcatggcggcggcggcggccccaccggcccggctccccctcggtctcctgcagccttctcgcctttacccgccgccggccccgccgcacacactcctccttcgcttcgcctcgccgccgccgccgccgccgcccgagggatgccgggagcgcccggagcccgcgccggcccttgcgcctgtccaggcactgccaatcgagactccgccgttccgctagtcccagctagccgccagccgaacaccggcctcgccagaaacctgaaaccagccgcgtgagtcggcgacgcggattgcgcctgcgcgcttggggagagggggacccgaggaagagactggttcgccgcggggaccgggcagggctccccgtcggagtgcactgcgccggacacttcaagccctggagggacaggaaagccagaaatggacttcgtgagactcgctcgactgttcgccagggcccgccccatgggactgttcatcctgcaacacctggacccctgtagagccaggtgggcaggaggcagggaggggctgatgcggccaatgtgggcgcccttcagcagctcctcctctcagctgcccctcggccaggagcgtcaggaaaacacgggcagcctgggctctgacccgagccactccaactccacggccacgcaggaagaagacgaggaggaggaggagagttttgggaccctctctgacaaatactcctcccggagactattccgcaaatccgcagcccagttccataacctgcggtttggggaacggagagatgagcaaatggaaccggagcccaaattatggcgaggccggagaaacaccccgtactggtacttcttgcagtgcaaacacctgatcaaggaagggaagctggttgaagccctggacctgtttgagaggcagatgctgaaggaggagcgattgcagcccatggagagcaactacacggtgctgattgggggctgcgggcgggttggctacctgaagaaggccttcaacctctacaaccagatgaaaaagcgggacctggagccctcggacgccacctacacggccctgttcaacgtctgtgccgagtccccctggaaggactcagctctacagagcgccctgaagctccggcagcagctgcaggccaaaaacttcgagctcaacttgaaaacataccacgcgctgctgaagatggctgccaagtgcgcagaccttaggatgtgcctcgatgtgttcaaggaaatcatccacaaagggcacgtggtcacagaggagaccttcagtttcctgctcatgggctgcatccaagacaagaagacaggcttccggtacgccctccaggtgtggcggctgatgctgagtctagggctacagccgagccgggacagctacaacctgctgttggtggcagctcgggactgtggcctaggggacccccaggtggcctcagagctgcttctgaagcccagggaggaggcgactgtgcttcagcccccagtgagcaggcagcggccaaggaggacagcccaggccaaggcaggcaacctcatgtcagccatgctgcatgtggaggccctggagaggcagctgtttctggaaccttctcaggcacttgggcctccagagcctccggaagccagagtgcccggcaaggcccaaccagaggtggatactaaggcagagcccagccacacagcagccctcaccgcagtggccctgaagccacctcccgtggagctggaagtcaacctcctgacccccggggccgttccccctacagtggtctcctttggaacggtgaccaccccagctgaccggctggccttgatagggggcctggagggcttcctgagcaagatggcagagcacaggcagcagcccgacatcaggaccctcacgctactggccgaggtggtggagtccgggagtcctgcagagtccttgctgctggccctcctggatgagcaccaggtagaggccgacctgacattctttaacacgctggtgagaaagaagagcaagctgggagacctggagggggccaaggcgctgttgccggtcctggcaaagaggggcctcgtccccaacctgcagacattctgcaacctggccatcgggtgccacaggccgaaggacggtctacagcttctcacagacatgaagaagtcccaggtgacccccaacactcacatctacagtgccctcatcaacgcggccatcaggaagctgaactacacctatctcatcagcatcttgaaggacatgaagcagaacagggtcccggtgaacgaagtggtcatccgccagctggagtttgcagcccagtaccctcccacctttgaccggtaccaagggaagaacacctacctggagaagattgacggcttccgagcctattacaagcagtggctgacagtgatgcccgcagaggaaaccccgcacccctggcagaagttccggaccaagccccagggggaccaggacaccggcaaggaggctgatgacggatgtgcccttgggggcaggtgatgggagcacagctggaacaatgtgctcggcccccagtgctctgtgggagccccaggacaagtgagctggtgtcacctcctgcctgggggaagagccaggccctgaggaacagccgcagcgtgtcacaggtgttggtgaggacacacactaggcccaaggtgcctgtgctcccagcaggtccaagtgcagctccagccacctttgcgtgtcaccttcacgggacttccagctccagctacctttgtgtgtcacctcacacaccacaagggggctggggcatctggtccctggggcctgggccgccccgccgggttccatgacagccacagtgtgtgcactcgatgatgcggccctgcaacggaggaggacagtgagacgatgccactgcgccacgctcgcccctgcacactcacatatgtggcaaccctcccacgaaggacctgccaccatgccatatagggacacacctcagaaacccttccttgacagctctggacagggaaaatttggctccctcatgaaggtagaaccagctgctgttgacaccgaggttacatctgtatgtctatttataatatgttctgcaaatccaacacacgtttgccaatcaagaaaaagaaatcggtgtga

SEQ ID NO: 405790 - DNA, 479 bp, Homo sapiens
tttggtacatctgggtgtgtgggctcagttttcagagtcccttcaatgtgtctgagtttggagagctgggctctgatgtgtccatggctctgccttagagcctggcctggtggatgcagtgacggggtcctctccagcctcagcctcctctggggcagctgctcacctgtgcgtccagctgatcccgggccaccactgagcttcttccatctccacagatgaaaaagcgggacctggagccctcggacgccacctacacggccctgttcaacgtctgtgccgagtccccctggaaggactcagctctacagagcgccctgaagctccggcagcagctgcaggccaaaaacttcgagctcaacttgaaaacataccacgcgctgctgaagatggctgccaagtgcgcagaccttaggatgtgcctcgatgtgttcaaggtggggcttcccctgccgtcctgctccccttcatggggctgg

SEQ ID NO: 405791 - DNA, 2672 bp, Homo sapiens
gagaagaaagccagtgcgtctctgggcgcaggggccagtggggctcggaggcacaggcaccccgcgacactccaggttccccgacccacgtccctggcagccccgattatttacagcctcagcagagcacggggcgggggcagaggggcccgcccgggagggctgctacttcttaaaacctctgcgggctgcttagtcacagccccccttgcttgggtgtgtccttcgctcgctccctccctccgtcttaggtcactgttttcaacctcgaataaaaactgcagccaacttccgaggcagcctcattgcccagcggaccccagcctctgccaggttcggtccgccatcctcgtcccgtcctccgccggcccctgccccgcgcccagggatcctccagctcctttcgcccgcgccctccgttcgctccggacaccatggacaagttttggtggcacgcagcctggggactctgcctcgtgccgctgagcctggcgcagatcgatttgaatataacctgccgctttgcaggtgtattccacgtggagaaaaatggtcgctacagcatctctcggacggaggccgctgacctctgcaaggctttcaatagcaccttgcccacaatggcccagatggagaaagctctgagcatcggatttgagacctgcaggtatgggttcatagaagggcacgtggtgattccccggatccaccccaactccatctgtgcagcaaacaacacaggggtgtacatcctcacatccaacacctcccagtatgacacatattgcttcaatgcttcagctccacctgaagaagattgtacatcagtcacagacctgcccaatgcctttgatggaccaattaccataactattgttaaccgtgatggcacccgctatgtccagaaaggagaatacagaacgaatcctgaagacatctaccccagcaaccctactgatgatgacgtgagcagcggctcctccagtgaaaggagcagcacttcaggaggttacatcttttacaccttttctactgtacaccccatcccagacgaagacagtccctggatcaccgacagcacagacagaatccctgctaccagtacgtcttcaaataccatctcagcaggctgggagccaaatgaagaaaatgaagatgaaagagacagacacctcagtttttctggatcaggcattgatgatgatgaagattttatctccagcaccatttcaaccacaccacgggcttttgaccacacaaaacagaaccaggactggacccagtggaacccaagccattcaaatccggaagtgctacttcagacaaccacaaggatgactgcagatgtagacagaaatggcaccactgcttatgaaggaaactggaacccagaagcacaccctcccctcattcaccatgagcatcatgaggaagaagagaccccacattctacaagcacaatccaggcaactcctagtagtacaacggaagaaacagctacccagaaggaacagtggtttggcaacagatggcatgagggatatcgccaaacacccagagaagactcccattcgacaacagggacagctgcagcctcagctcataccagccatccaatgcaaggaaggacaacaccaagcccagaggacagttcctggactgatttcttcaacccaatctcacaccccatgggacgaggtcatcaagcaggaagaaggatggatatggactccagtcatagtacaacgcttcagcctactgcaaatccaaacacaggtttggtggaagatttggacaggacaggacctctttcaatgacaacgcagcagagtaattctcagagcttctctacatcacatgaaggcttggaagaagataaagaccatccaacaacttctactctgacatcaagcaataggaatgatgtcacaggtggaagaagagacccaaatcattctgaaggctcaactactttactggaaggttatacctctcattacccacacacgaaggaaagcaggaccttcatcccagtgacctcagctaagactgggtcctttggagttactgcagttactgttggagattccaactctaatgtcaatcgttccttatcaggagaccaagacacattccaccccagtggggggtcccataccactcatggatctgaatcagatggacactcacatgggagtcaagaaggtggagcaaacacaacctctggtcctataaggacaccccaaattccagaatggctgatcatcttggcatccctcttggccttggctttgattcttgcagtttgcattgcagtcaacagtcgaagaaggtgtgggcagaagaaaaagctagtgatcaacagtggcaatggagctgtggaggacagaaagccaagtggactcaacggagaggccagcaagtctcaggaaatggtgcatttggtgaacaaggagtcgtcagaaactccagaccagtttatgacagctgatgagacaaggaacctgcagaatgtggacatgaagattggggtgtaacacctacaccattatcttggaaagaaacaaccgttggaaacataaccattacagggagctgggacacttaacagatgcaatgtgctactgattgtttcattgcgaatcttttttagcataaaattttctactctt

SEQ ID NO: 405792 - DNA, 1080 bp, Homo sapiens
agtatgacaaacttcactctatttctccctatttatggataacaagtggaaagcttttgcagcaattgtgtgttctggagacaagcacatggtgggtggtgatcttacaaatacgggttcatcactgattccacctccacacagataggaatgatgtcacaggtggaagaagagacccaaatcattctgaaggctcaactactttactggaaggttatacctctcattacccacacacgaaggaaagcaggaccttcatcccagtgacctcagctaagactgggtcctttggagttactgcagttactgttggagattccaactctaatgtcaatcgttccttatcaggtaatttggcatttattatctagtttgctttctctatatagagaaacaatatatagtttcatattacagaggacattttctgtgtagtctgggattggactagtttgtgatatggaaatatctttcattattggttatcaattctagtgcaaataaacttgggtatattttagataaaagaatgcttccttttgccagtgttttttccatttgtctgtgtttgcatgtgtgtgtgtgtgtgtgtgtgtgtgtgttgtgtgtacaagttggctgttatgatggaattgctttctttgtcttatcttgtgatatatgaagttgaaccacatgaaactgatatttttgcaggtgaaagtagtcgaattttagcaattccgtttaattcgactaatatactctacttattttgtaaggttttatcctacaggtgaataatttctatatactagtatctttgctctgaaattattatcttgttttggtaatagattgatcagttttacttttggtgatggataaacctcttctagttctgatgcacacttaaaatgttcatgatttaatctagtattaatgaatagggaccacttctcttattgtaatagtgaagagaggaacgaagataatttattcaatgaagtttgacacggacctagaataagtctttttttttctcaaataagtagtcatctctgcttctgcttttctttgcttctccatttgtattaagaa

SEQ ID NO: 405793 - DNA, 5379 bp, Homo sapiens
ggttttttgtgtgttgtttgtgtgccggactgatgtccaaagttccgccaggagggctttattgttgtcgttgttcaacatcctgttctgcggcttcctggctctttttgcccgttatgccgaagagccgggcgttggcacggccaatacggagactagcgaaggctttgaaattcttctcttcctcagtgatgactcgagctttctccttctatagacgttccggacgggcatgaccggtccggtcagctgggtggccagtttcagttcttcagcagaactgtctcccttcttgggggccgagggcttcctggggaagaggatgagtttggagcggtactccttcagccgctgcacgttggcctgcagggactccgtggacttgttccgcctcctcggatccacagaaatgccgatggtccgggccaccttcttgtgaatgtatgggttcatagaagggcacgtggtgattccccggatccaccccaactccatctgtgcagcaaacaacacaggggtgtacatcctcacatccaacacctcccagtatgacacatattgcttcaatgcttcagctccacctgaagaagattgtacatcagtcacagacctgcccaatgcctttgatggaccaattaccataactattgttaaccgtgatggcacccgctatgtccagaaaggagaatacagaacgaatcctgaagacatctaccccagcaaccctactgatgatgacgtgagcagcggctcctccagtgaaaggagcagcacttcaggaggttacatcttttacaccttttctactgtacaccccatcccagacgaagacagtccctggatcaccgacagcacagacagaatccctgctaccagtacgtcttcaaataccatctcagcaggctgggagccaaatgaagaaaatgaagatgaaagagacagacacctcagtttttctggatcaggcattgatgatgatgaagattttatctccagcaccatttcaaccacaccacgggcttttgaccacacaaaacagaaccaggactggacccagtggaacccaagccattcaaatccggaagtgctacttcagacaaccacaaggatgactgcagatgtagacagaaatggcaccactgcttatgaaggaaactggaacccagaagcacaccctcccctcattcaccatgagcatcatgaggaagaagagaccccacattctacaagcacaatccaggcaactcctagtagtacaacggaagaaacagctacccagaaggaacagtggtttggcaacagatggcatgagggatatcgccaaacacccagagaagactcccattcgacaacagggacagctgcagcctcagctcataccagccatccaatgcaaggaaggacaacaccaagcccagaggacagttcctggactgatttcttcaacccaatctcacaccccatgggacgaggtcatcaagcaggaagaaggatggatatggactccagtcatagtacaacgcttcagcctactgcaaatccaaacacaggtttggtggaagatttggacaggacaggacctctttcaatgacaacgcagcagagtaattctcagagcttctctacatcacatgaaggcttggaagaagataaagaccatccaacaacttctactctgacatcaagcaataggaatgatgtcacaggtggaagaagagacccaaatcattctgaaggctcaactactttactggaaggttatacctctcattacccacacacgaaggaaagcaggaccttcatcccagtgacctcagctaagactgggtcctttggagttactgcagttactgttggagattccaactctaatgtcaatcgttccttatcaggagaccaagacacattccaccccagtggggggtcccataccactcatggatctgaatcagatggacactcacatgggagtcaagaaggtggagcaaacacaacctctggtcctataaggacaccccaaattccagaatggctgatcatcttggcatccctcttggccttggctttgattcttgcagtttgcattgcagtcaacagtcgaagaaggtgtgggcagaagaaaaagctagtgatcaacagtggcaatggagctgtggaggacagaaagccaagtggactcaacggagaggccagcaagtctcaggaaatggtgcatttggtgaacaaggagtcgtcagaaactccagaccagtttatgacagctgatgagacaaggaacctgcagaatgtggacatgaagattggggtgtaacacctacaccattatcttggaaagaaacaaccgttggaaacataaccattacagggagctgggacacttaacagatgcaatgtgctactgattgtttcattgcgaatcttttttagcataaaattttctactctttttgttttttgtgttttgttctttaaagtcaggtccaatttgtaaaaacagcattgctttctgaaattagggcccaattaataatcagcaagaatttgatcgttccagttcccacttggaggcctttcatccctcgggtgtgctatggatggcttctaacaaaaactacacatatgtattcctgatcgccaacctttcccccaccagctaaggacatttcccagggttaatagggcctggtccctgggaggaaatttgaatgggtccattttgcccttccatagcctaatccctgggcattgctttccactgaggttgggggttggggtgtactagttacacatcttcaacagaccccctctagaaatttttcagatgcttctgggagacacccaaagggtgaagctatttatctgtagtaaactatttatctgtgtttttgaaatattaaaccctggatcagtcctttgatcagtataattttttaaagttactttgtcagaggcacaaaagggtttaaactgattcataataaatatctgtacttcttcgatcttcaccttttgtgctgtgattcttcagtttctaaaccagcactgtctgggtccctacaatgtatcaggaagagctgagaatggtaaggagactcttctaagtcttcatctcagagaccctgagttcccactcagacccactcagccaaatctcatggaagaccaaggagggcagcactgtttttgttttttgttttttgtttttttttttttgacactgtccaaaggttttccatcctgtcctggaatcagagttggaagctgaggagcttcagcctcttttatggtttaatggccacctgttctctcctgtgaaaggctttgcaaagtcacattaagtttgcatgacctgttatccctggggccctatttcatagaggctggccctattagtgatttccaaaaacaatatggaagtgccttttgatgtcttacaataagagaagaagccaatggaaatgaaagagattggcaaaggggaaggatgatgccatgtagatcctgtttgacatttttatggctgtatttgtaaacttaaacacaccagtgtctgttcttgatgcagttgctatttaggatgagttaagtgcctggggagtccctcaaaaggttaaagggattcccatcattggaatcttatcaccagataggcaagtttatgaccaaacaagagagtactggctttatcctctaacctcatattttctcccacttggcaagtcctttgtggcatttattcatcagtcagggtgtccgattggtcctagaacttccaaaggctgcttgtcatagaagccattgcatctataaagcaacggctcctgttaaatggtatctcctttctgaggctcctactaaaagtcatttgttacctaaacttatgtgcttaacaggcaatgcttctcagaccacaaagcagaaagaagaagaaaagctcctgactaaatcagggctgggcttagacagagttgatctgtagaatatctttaaaggagagatgtcaactttctgcactattcccagcctctgctcctccctgtctaccctctcccctccctctctccctccacttcaccccacaatcttgaaaaacttcctttctcttctgtgaacatcattggccagatccattttcagtggtctggatttctttttattttcttttcaacttgaaagaaactggacattaggccactatgtgttgttactgccactagtgttcaagtgcctcttgttttcccagagatttcctgggtctgccagaggcccagacaggctcactcaagctctttaactgaaaagcaacaagccactccaggacaaggttcaaaatggttacaacagcctctacctgtcgccccagggagaaaggggtagtgatacaagtctcatagccagagatggttttccactccttctagatattcccaaaaagaggctgagacaggaggttattttcaattttattttggaattaaatacttttttccctttattactgttgtagtccctcacttggatatacctctgttttcacgatagaaataagggaggtctagagcttctattccttggccattgtcaacggagagctggccaagtcttcacaaacccttgcaacattgcctgaagtttatggaataagatgtattctcactcccttgatctcaagggcgtaactctggaagcacagcttgactacacgtcatttttaccaatgattttcaggtgacctgggctaagtcatttaaactgggtctttataaaagtaaaaggccaacatttaattattttgcaaagcaacctaagagctaaagatgtaatttttcttgcaattgtaaatcttttgtgtctcctgaagacttcccttaaaattagctctgagtgaaaaatcaaaagagacaaaagacatcttcgaatccatatttcaagcctggtagaattggcttttctagcagaacctttccaaaagttttatattgagattcataacaacaccaagaattgattttgtagccaacattcattcaatactgttatatcagaggagtaggagagaggaaacatttgacttatctggaaaagcaaaatgtacttaagaataagaataacatggtccattcacctttatgttatagatatgtctttgtgtaaatcatttgttttgagttttcaaagaatagcccattgttcattcttgtgctgtacaatgaccactgttattgttactttgacttttcagagcacacccttcctctggtttttgtatatttattgatggatcaataataatgaggaaagcatgatatgtatattgctgagttgaaagcacttattggaaaatattaaaaggctaacattaaaagactaaaggaaaca

SEQ ID NO: 405794 - DNA, 5508 bp, Homo sapiens
ggttttttgtgtgttgtttgtgtgccggactgatgtccaaagttccgccaggagggctttattgttgtcgttgttcaacatcctgttctgcggcttcctggctctttttgcccgttatgccgaagagccgggcgttggcacggccaatacggagactagcgaaggctttgaaattcttctcttcctcagtgatgactcgagctttctccttctatagacgttccggacgggcatgaccggtccggtcagctgggtggccagtttcagttcttcagcagaactgtctcccttcttgggggccgagggcttcctggggaagaggatgagtttggagcggtactccttcagccgctgcacgttggcctgcagggactccgtggacttgttccgcctcctcggatccacagaaatgccgatggtccgggccaccttcttgtgaatgtatgggttcatagaagggcacgtggtgattccccggatccaccccaactccatctgtgcagcaaacaacacaggggtgtacatcctcacatccaacacctcccagtatgacacatattgcttcaatgcttcagctccacctgaagaagattgtacatcagtcacagacctgcccaatgcctttgatggaccaattaccataactattgttaaccgtgatggcacccgctatgtccagaaaggagaatacagaacgaatcctgaagacatctaccccagcaaccctactgatgatgacgtgagcagcggctcctccagtgaaaggagcagcacttcaggaggttacatcttttacaccttttctactgtacaccccatcccagacgaagacagtccctggatcaccgacagcacagacagaatccctgctaccactttgatgagcactagtgctacagcaactgagacagcaaccaagaggcaagaaacctgggattggttttcatggttgtttctaccatcagagtcaaagaatcatcttcacacaacaacacaaatggctggtacgtcttcaaataccatctcagcaggctgggagccaaatgaagaaaatgaagatgaaagagacagacacctcagtttttctggatcaggcattgatgatgatgaagattttatctccagcaccatttcaaccacaccacgggcttttgaccacacaaaacagaaccaggactggacccagtggaacccaagccattcaaatccggaagtgctacttcagacaaccacaaggatgactgcagatgtagacagaaatggcaccactgcttatgaaggaaactggaacccagaagcacaccctcccctcattcaccatgagcatcatgaggaagaagagaccccacattctacaagcacaatccaggcaactcctagtagtacaacggaagaaacagctacccagaaggaacagtggtttggcaacagatggcatgagggatatcgccaaacacccagagaagactcccattcgacaacagggacagctgcagcctcagctcataccagccatccaatgcaaggaaggacaacaccaagcccagaggacagttcctggactgatttcttcaacccaatctcacaccccatgggacgaggtcatcaagcaggaagaaggatggatatggactccagtcatagtacaacgcttcagcctactgcaaatccaaacacaggtttggtggaagatttggacaggacaggacctctttcaatgacaacgcagcagagtaattctcagagcttctctacatcacatgaaggcttggaagaagataaagaccatccaacaacttctactctgacatcaagcaataggaatgatgtcacaggtggaagaagagacccaaatcattctgaaggctcaactactttactggaaggttatacctctcattacccacacacgaaggaaagcaggaccttcatcccagtgacctcagctaagactgggtcctttggagttactgcagttactgttggagattccaactctaatgtcaatcgttccttatcaggagaccaagacacattccaccccagtggggggtcccataccactcatggatctgaatcagatggacactcacatgggagtcaagaaggtggagcaaacacaacctctggtcctataaggacaccccaaattccagaatggctgatcatcttggcatccctcttggccttggctttgattcttgcagtttgcattgcagtcaacagtcgaagaaggtgtgggcagaagaaaaagctagtgatcaacagtggcaatggagctgtggaggacagaaagccaagtggactcaacggagaggccagcaagtctcaggaaatggtgcatttggtgaacaaggagtcgtcagaaactccagaccagtttatgacagctgatgagacaaggaacctgcagaatgtggacatgaagattggggtgtaacacctacaccattatcttggaaagaaacaaccgttggaaacataaccattacagggagctgggacacttaacagatgcaatgtgctactgattgtttcattgcgaatcttttttagcataaaattttctactctttttgttttttgtgttttgttctttaaagtcaggtccaatttgtaaaaacagcattgctttctgaaattagggcccaattaataatcagcaagaatttgatcgttccagttcccacttggaggcctttcatccctcgggtgtgctatggatggcttctaacaaaaactacacatatgtattcctgatcgccaacctttcccccaccagctaaggacatttcccagggttaatagggcctggtccctgggaggaaatttgaatgggtccattttgcccttccatagcctaatccctgggcattgctttccactgaggttgggggttggggtgtactagttacacatcttcaacagaccccctctagaaatttttcagatgcttctgggagacacccaaagggtgaagctatttatctgtagtaaactatttatctgtgtttttgaaatattaaaccctggatcagtcctttgatcagtataattttttaaagttactttgtcagaggcacaaaagggtttaaactgattcataataaatatctgtacttcttcgatcttcaccttttgtgctgtgattcttcagtttctaaaccagcactgtctgggtccctacaatgtatcaggaagagctgagaatggtaaggagactcttctaagtcttcatctcagagaccctgagttcccactcagacccactcagccaaatctcatggaagaccaaggagggcagcactgtttttgttttttgttttttgtttttttttttttgacactgtccaaaggttttccatcctgtcctggaatcagagttggaagctgaggagcttcagcctcttttatggtttaatggccacctgttctctcctgtgaaaggctttgcaaagtcacattaagtttgcatgacctgttatccctggggccctatttcatagaggctggccctattagtgatttccaaaaacaatatggaagtgccttttgatgtcttacaataagagaagaagccaatggaaatgaaagagattggcaaaggggaaggatgatgccatgtagatcctgtttgacatttttatggctgtatttgtaaacttaaacacaccagtgtctgttcttgatgcagttgctatttaggatgagttaagtgcctggggagtccctcaaaaggttaaagggattcccatcattggaatcttatcaccagataggcaagtttatgaccaaacaagagagtactggctttatcctctaacctcatattttctcccacttggcaagtcctttgtggcatttattcatcagtcagggtgtccgattggtcctagaacttccaaaggctgcttgtcatagaagccattgcatctataaagcaacggctcctgttaaatggtatctcctttctgaggctcctactaaaagtcatttgttacctaaacttatgtgcttaacaggcaatgcttctcagaccacaaagcagaaagaagaagaaaagctcctgactaaatcagggctgggcttagacagagttgatctgtagaatatctttaaaggagagatgtcaactttctgcactattcccagcctctgctcctccctgtctaccctctcccctccctctctccctccacttcaccccacaatcttgaaaaacttcctttctcttctgtgaacatcattggccagatccattttcagtggtctggatttctttttattttcttttcaacttgaaagaaactggacattaggccactatgtgttgttactgccactagtgttcaagtgcctcttgttttcccagagatttcctgggtctgccagaggcccagacaggctcactcaagctctttaactgaaaagcaacaagccactccaggacaaggttcaaaatggttacaacagcctctacctgtcgccccagggagaaaggggtagtgatacaagtctcatagccagagatggttttccactccttctagatattcccaaaaagaggctgagacaggaggttattttcaattttattttggaattaaatacttttttccctttattactgttgtagtccctcacttggatatacctctgttttcacgatagaaataagggaggtctagagcttctattccttggccattgtcaacggagagctggccaagtcttcacaaacccttgcaacattgcctgaagtttatggaataagatgtattctcactcccttgatctcaagggcgtaactctggaagcacagcttgactacacgtcatttttaccaatgattttcaggtgacctgggctaagtcatttaaactgggtctttataaaagtaaaaggccaacatttaattattttgcaaagcaacctaagagctaaagatgtaatttttcttgcaattgtaaatcttttgtgtctcctgaagacttcccttaaaattagctctgagtgaaaaatcaaaagagacaaaagacatcttcgaatccatatttcaagcctggtagaattggcttttctagcagaacctttccaaaagttttatattgagattcataacaacaccaagaattgattttgtagccaacattcattcaatactgttatatcagaggagtaggagagaggaaacatttgacttatctggaaaagcaaaatgtacttaagaataagaataacatggtccattcacctttatgttatagatatgtctttgtgtaaatcatttgttttgagttttcaaagaatagcccattgttcattcttgtgctgtacaatgaccactgttattgttactttgacttttcagagcacacccttcctctggtttttgtatatttattgatggatcaataataatgaggaaagcatgatatgtatattgctgagttgaaagcacttattggaaaatattaaaaggctaacattaaaagactaaaggaaaca

SEQ ID NO: 405795 - DNA, 4861 bp, Homo sapiens
  misc_feature (145)..(145): n is a, c, g, or t
actacatacttccgtcagtgttagaaaccttttatcttttccttcctcatgctactcttctaagtcttcatatgttctcttaaaatcttaagctattaaaattacgttaaaaacttaacgctaagcaatatcttagtaacctatngactatattttttaagtagttgtattaatctctatctttcaaagagaaaaaaacttatctgcggtttcctcaagctccgcctgccccctcagcagaagcccctgcgctggctgcctcaatgcctcggaagtatgtagtctgggattggttttcatggttgtttctaccatcagagtcaaagaatcatcttcacacaacaacacaaatggctggtacgtcttcaaataccatctcagcaggctgggagccaaatgaagaaaatgaagatgaaagagacagacacctcagtttttctggatcaggcattgatgatgatgaagattttatctccagcaccatttcaaccacaccacgggcttttgaccacacaaaacagaaccaggactggacccagtggaacccaagccattcaaatccggaagtgctacttcagacaaccacaaggatgactgcagatgtagacagaaatggcaccactgcttatgaaggaaactggaacccagaagcacaccctcccctcattcaccatgagcatcatgaggaagaagagaccccacattctacaagcacaatccaggcaactcctagtagtacaacggaagaaacagctacccagaaggaacagtggtttggcaacagatggcatgagggatatcgccaaacacccagagaagactcccattcgacaacagggacagctgcagcctcagctcataccagccatccaatgcaaggaaggacaacaccaagcccagaggacagttcctggactgatttcttcaacccaatctcacaccccatgggacgaggtcatcaagcaggaagaaggatggatatggactccagtcatagtacaacgcttcagcctactgcaaatccaaacacaggtttggtggaagatttggacaggacaggacctctttcaatgacaacgcagcagagtaattctcagagcttctctacatcacatgaaggcttggaagaagataaagaccatccaacaacttctactctgacatcaagcaataggaatgatgtcacaggtggaagaagagacccaaatcattctgaaggctcaactactttactggaaggttatacctctcattacccacacacgaaggaaagcaggaccttcatcccagtgacctcagctaagactgggtcctttggagttactgcagttactgttggagattccaactctaatgtcaatcgttccttatcaggagaccaagacacattccaccccagtggggggtcccataccactcatggatctgaatcagatggacactcacatgggagtcaagaaggtggagcaaacacaacctctggtcctataaggacaccccaaattccagaatggctgatcatcttggcatccctcttggccttggctttgattcttgcagtttgcattgcagtcaacagtcgaagaaggtgtgggcagaagaaaaagctagtgatcaacagtggcaatggagctgtggaggacagaaagccaagtggactcaacggagaggccagcaagtctcaggaaatggtgcatttggtgaacaaggagtcgtcagaaactccagaccagtttatgacagctgatgagacaaggaacctgcagaatgtggacatgaagattggggtgtaacacctacaccattatcttggaaagaaacaaccgttggaaacataaccattacagggagctgggacacttaacagatgcaatgtgctactgattgtttcattgcgaatcttttttagcataaaattttctactctttttgttttttgtgttttgttctttaaagtcaggtccaatttgtaaaaacagcattgctttctgaaattagggcccaattaataatcagcaagaatttgatcgttccagttcccacttggaggcctttcatccctcgggtgtgctatggatggcttctaacaaaaactacacatatgtattcctgatcgccaacctttcccccaccagctaaggacatttcccagggttaatagggcctggtccctgggaggaaatttgaatgggtccattttgcccttccatagcctaatccctgggcattgctttccactgaggttgggggttggggtgtactagttacacatcttcaacagaccccctctagaaatttttcagatgcttctgggagacacccaaagggtgaagctatttatctgtagtaaactatttatctgtgtttttgaaatattaaaccctggatcagtcctttgatcagtataattttttaaagttactttgtcagaggcacaaaagggtttaaactgattcataataaatatctgtacttcttcgatcttcaccttttgtgctgtgattcttcagtttctaaaccagcactgtctgggtccctacaatgtatcaggaagagctgagaatggtaaggagactcttctaagtcttcatctcagagaccctgagttcccactcagacccactcagccaaatctcatggaagaccaaggagggcagcactgtttttgttttttgttttttgtttttttttttttgacactgtccaaaggttttccatcctgtcctggaatcagagttggaagctgaggagcttcagcctcttttatggtttaatggccacctgttctctcctgtgaaaggctttgcaaagtcacattaagtttgcatgacctgttatccctggggccctatttcatagaggctggccctattagtgatttccaaaaacaatatggaagtgccttttgatgtcttacaataagagaagaagccaatggaaatgaaagagattggcaaaggggaaggatgatgccatgtagatcctgtttgacatttttatggctgtatttgtaaacttaaacacaccagtgtctgttcttgatgcagttgctatttaggatgagttaagtgcctggggagtccctcaaaaggttaaagggattcccatcattggaatcttatcaccagataggcaagtttatgaccaaacaagagagtactggctttatcctctaacctcatattttctcccacttggcaagtcctttgtggcatttattcatcagtcagggtgtccgattggtcctagaacttccaaaggctgcttgtcatagaagccattgcatctataaagcaacggctcctgttaaatggtatctcctttctgaggctcctactaaaagtcatttgttacctaaacttatgtgcttaacaggcaatgcttctcagaccacaaagcagaaagaagaagaaaagctcctgactaaatcagggctgggcttagacagagttgatctgtagaatatctttaaaggagagatgtcaactttctgcactattcccagcctctgctcctccctgtctaccctctcccctccctctctccctccacttcaccccacaatcttgaaaaacttcctttctcttctgtgaacatcattggccagatccattttcagtggtctggatttctttttattttcttttcaacttgaaagaaactggacattaggccactatgtgttgttactgccactagtgttcaagtgcctcttgttttcccagagatttcctgggtctgccagaggcccagacaggctcactcaagctctttaactgaaaagcaacaagccactccaggacaaggttcaaaatggttacaacagcctctacctgtcgccccagggagaaaggggtagtgatacaagtctcatagccagagatggttttccactccttctagatattcccaaaaagaggctgagacaggaggttattttcaattttattttggaattaaatacttttttccctttattactgttgtagtccctcacttggatatacctctgttttcacgatagaaataagggaggtctagagcttctattccttggccattgtcaacggagagctggccaagtcttcacaaacccttgcaacattgcctgaagtttatggaataagatgtattctcactcccttgatctcaagggcgtaactctggaagcacagcttgactacacgtcatttttaccaatgattttcaggtgacctgggctaagtcatttaaactgggtctttataaaagtaaaaggccaacatttaattattttgcaaagcaacctaagagctaaagatgtaatttttcttgcaattgtaaatcttttgtgtctcctgaagacttcccttaaaattagctctgagtgaaaaatcaaaagagacaaaagacatcttcgaatccatatttcaagcctggtagaattggcttttctagcagaacctttccaaaagttttatattgagattcataacaacaccaagaattgattttgtagccaacattcattcaatactgttatatcagaggagtaggagagaggaaacatttgacttatctggaaaagcaaaatgtacttaagaataagaataacatggtccattcacctttatgttatagatatgtctttgtgtaaatcatttgttttgagttttcaaagaatagcccattgttcattcttgtgctgtacaatgaccactgttattgttactttgacttttcagagcacacccttcctctggtttttgtatatttattgatggatcaataataatgaggaaagcatgatatgtatattgctgagttgaaagcacttattggaaaatattaaaaggctaacattaaaagactaaaggaaaca

SEQ ID NO: 405796 - DNA, 5019 bp, Homo sapiens
ggttttttgtgtgttgtttgtgtgccggactgatgtccaaagttccgccaggagggctttattgttgtcgttgttcaacatcctgttctgcggcttcctggctctttttgcccgttatgccgaagagccgggcgttggcacggccaatacggagactagcgaaggctttgaaattcttctcttcctcagtgatgactcgagctttctccttctatagacgttccggacgggcatgaccggtccggtcagctgggtggccagtttcagttcttcagcagaactgtctcccttcttgggggccgagggcttcctggggaagaggatgagtttggagcggtactccttcagccgctgcacgttggcctgcagggactccgtggacttgttccgcctcctcggatccacagaaatgccgatggtccgggccaccttcttgtgaatgtatgggttcatagaagggcacgtggtgattccccggatccaccccaactccatctgtgcagcaaacaacacaggggtgtacatcctcacatccaacacctcccagtatgacacatattgcttcaatgcttcagctccacctgaagaagattgtacatcagtcacagacctgcccaatgcctttgatggaccaattaccataactattgttaaccgtgatggcacccgctatgtccagaaaggagaatacagaacgaatcctgaagacatctaccccagcaaccctactgatgatgacgtgagcagcggctcctccagtgaaaggagcagcacttcaggaggttacatcttttacaccttttctactgtacaccccatcccagacgaagacagtccctggatcaccgacagcacagacagaatccctgctaccatccaggcaactcctagtagtacaacggaagaaacagctacccagaaggaacagtggtttggcaacagatggcatgagggatatcgccaaacacccagagaagactcccattcgacaacagggacagctgcagcctcagctcataccagccatccaatgcaaggaaggacaacaccaagcccagaggacagttcctggactgatttcttcaacccaatctcacaccccatgggacgaggtcatcaagcaggaagaaggatggatatggactccagtcatagtacaacgcttcagcctactgcaaatccaaacacaggtttggtggaagatttggacaggacaggacctctttcaatgacaacgcagcagagtaattctcagagcttctctacatcacatgaaggcttggaagaagataaagaccatccaacaacttctactctgacatcaagcaataggaatgatgtcacaggtggaagaagagacccaaatcattctgaaggctcaactactttactggaaggttatacctctcattacccacacacgaaggaaagcaggaccttcatcccagtgacctcagctaagactgggtcctttggagttactgcagttactgttggagattccaactctaatgtcaatcgttccttatcaggagaccaagacacattccaccccagtggggggtcccataccactcatggatctgaatcagatggacactcacatgggagtcaagaaggtggagcaaacacaacctctggtcctataaggacaccccaaattccagaatggctgatcatcttggcatccctcttggccttggctttgattcttgcagtttgcattgcagtcaacagtcgaagaaggtgtgggcagaagaaaaagctagtgatcaacagtggcaatggagctgtggaggacagaaagccaagtggactcaacggagaggccagcaagtctcaggaaatggtgcatttggtgaacaaggagtcgtcagaaactccagaccagtttatgacagctgatgagacaaggaacctgcagaatgtggacatgaagattggggtgtaacacctacaccattatcttggaaagaaacaaccgttggaaacataaccattacagggagctgggacacttaacagatgcaatgtgctactgattgtttcattgcgaatcttttttagcataaaattttctactctttttgttttttgtgttttgttctttaaagtcaggtccaatttgtaaaaacagcattgctttctgaaattagggcccaattaataatcagcaagaatttgatcgttccagttcccacttggaggcctttcatccctcgggtgtgctatggatggcttctaacaaaaactacacatatgtattcctgatcgccaacctttcccccaccagctaaggacatttcccagggttaatagggcctggtccctgggaggaaatttgaatgggtccattttgcccttccatagcctaatccctgggcattgctttccactgaggttgggggttggggtgtactagttacacatcttcaacagaccccctctagaaatttttcagatgcttctgggagacacccaaagggtgaagctatttatctgtagtaaactatttatctgtgtttttgaaatattaaaccctggatcagtcctttgatcagtataattttttaaagttactttgtcagaggcacaaaagggtttaaactgattcataataaatatctgtacttcttcgatcttcaccttttgtgctgtgattcttcagtttctaaaccagcactgtctgggtccctacaatgtatcaggaagagctgagaatggtaaggagactcttctaagtcttcatctcagagaccctgagttcccactcagacccactcagccaaatctcatggaagaccaaggagggcagcactgtttttgttttttgttttttgtttttttttttttgacactgtccaaaggttttccatcctgtcctggaatcagagttggaagctgaggagcttcagcctcttttatggtttaatggccacctgttctctcctgtgaaaggctttgcaaagtcacattaagtttgcatgacctgttatccctggggccctatttcatagaggctggccctattagtgatttccaaaaacaatatggaagtgccttttgatgtcttacaataagagaagaagccaatggaaatgaaagagattggcaaaggggaaggatgatgccatgtagatcctgtttgacatttttatggctgtatttgtaaacttaaacacaccagtgtctgttcttgatgcagttgctatttaggatgagttaagtgcctggggagtccctcaaaaggttaaagggattcccatcattggaatcttatcaccagataggcaagtttatgaccaaacaagagagtactggctttatcctctaacctcatattttctcccacttggcaagtcctttgtggcatttattcatcagtcagggtgtccgattggtcctagaacttccaaaggctgcttgtcatagaagccattgcatctataaagcaacggctcctgttaaatggtatctcctttctgaggctcctactaaaagtcatttgttacctaaacttatgtgcttaacaggcaatgcttctcagaccacaaagcagaaagaagaagaaaagctcctgactaaatcagggctgggcttagacagagttgatctgtagaatatctttaaaggagagatgtcaactttctgcactattcccagcctctgctcctccctgtctaccctctcccctccctctctccctccacttcaccccacaatcttgaaaaacttcctttctcttctgtgaacatcattggccagatccattttcagtggtctggatttctttttattttcttttcaacttgaaagaaactggacattaggccactatgtgttgttactgccactagtgttcaagtgcctcttgttttcccagagatttcctgggtctgccagaggcccagacaggctcactcaagctctttaactgaaaagcaacaagccactccaggacaaggttcaaaatggttacaacagcctctacctgtcgccccagggagaaaggggtagtgatacaagtctcatagccagagatggttttccactccttctagatattcccaaaaagaggctgagacaggaggttattttcaattttattttggaattaaatacttttttccctttattactgttgtagtccctcacttggatatacctctgttttcacgatagaaataagggaggtctagagcttctattccttggccattgtcaacggagagctggccaagtcttcacaaacccttgcaacattgcctgaagtttatggaataagatgtattctcactcccttgatctcaagggcgtaactctggaagcacagcttgactacacgtcatttttaccaatgattttcaggtgacctgggctaagtcatttaaactgggtctttataaaagtaaaaggccaacatttaattattttgcaaagcaacctaagagctaaagatgtaatttttcttgcaattgtaaatcttttgtgtctcctgaagacttcccttaaaattagctctgagtgaaaaatcaaaagagacaaaagacatcttcgaatccatatttcaagcctggtagaattggcttttctagcagaacctttccaaaagttttatattgagattcataacaacaccaagaattgattttgtagccaacattcattcaatactgttatatcagaggagtaggagagaggaaacatttgacttatctggaaaagcaaaatgtacttaagaataagaataacatggtccattcacctttatgttatagatatgtctttgtgtaaatcatttgttttgagttttcaaagaatagcccattgttcattcttgtgctgtacaatgaccactgttattgttactttgacttttcagagcacacccttcctctggtttttgtatatttattgatggatcaataataatgaggaaagcatgatatgtatattgctgagttgaaagcacttattggaaaatattaaaaggctaacattaaaagactaaaggaaaca

SEQ ID NO: 405797 - DNA, 4758 bp, Homo sapiens
ggttttttgtgtgttgtttgtgtgccggactgatgtccaaagttccgccaggagggctttattgttgtcgttgttcaacatcctgttctgcggcttcctggctctttttgcccgttatgccgaagagccgggcgttggcacggccaatacggagactagcgaaggctttgaaattcttctcttcctcagtgatgactcgagctttctccttctatagacgttccggacgggcatgaccggtccggtcagctgggtggccagtttcagttcttcagcagaactgtctcccttcttgggggccgagggcttcctggggaagaggatgagtttggagcggtactccttcagccgctgcacgttggcctgcagggactccgtggacttgttccgcctcctcggatccacagaaatgccgatggtccgggccaccttcttgtgaatgtatgggttcatagaagggcacgtggtgattccccggatccaccccaactccatctgtgcagcaaacaacacaggggtgtacatcctcacatccaacacctcccagtatgacacatattgcttcaatgcttcagctccacctgaagaagattgtacatcagtcacagacctgcccaatgcctttgatggaccaattaccataactattgttaaccgtgatggcacccgctatgtccagaaaggagaatacagaacgaatcctgaagacatctaccccagcaaccctactgatgatgacgtgagcagcggctcctccagtgaaaggagcagcacttcaggaggttacatcttttacaccttttctactgtacaccccatcccagacgaagacagtccctggatcaccgacagcacagacagaatccctgctaccaatatggactccagtcatagtacaacgcttcagcctactgcaaatccaaacacaggtttggtggaagatttggacaggacaggacctctttcaatgacaacgcagcagagtaattctcagagcttctctacatcacatgaaggcttggaagaagataaagaccatccaacaacttctactctgacatcaagcaataggaatgatgtcacaggtggaagaagagacccaaatcattctgaaggctcaactactttactggaaggttatacctctcattacccacacacgaaggaaagcaggaccttcatcccagtgacctcagctaagactgggtcctttggagttactgcagttactgttggagattccaactctaatgtcaatcgttccttatcaggagaccaagacacattccaccccagtggggggtcccataccactcatggatctgaatcagatggacactcacatgggagtcaagaaggtggagcaaacacaacctctggtcctataaggacaccccaaattccagaatggctgatcatcttggcatccctcttggccttggctttgattcttgcagtttgcattgcagtcaacagtcgaagaaggtgtgggcagaagaaaaagctagtgatcaacagtggcaatggagctgtggaggacagaaagccaagtggactcaacggagaggccagcaagtctcaggaaatggtgcatttggtgaacaaggagtcgtcagaaactccagaccagtttatgacagctgatgagacaaggaacctgcagaatgtggacatgaagattggggtgtaacacctacaccattatcttggaaagaaacaaccgttggaaacataaccattacagggagctgggacacttaacagatgcaatgtgctactgattgtttcattgcgaatcttttttagcataaaattttctactctttttgttttttgtgttttgttctttaaagtcaggtccaatttgtaaaaacagcattgctttctgaaattagggcccaattaataatcagcaagaatttgatcgttccagttcccacttggaggcctttcatccctcgggtgtgctatggatggcttctaacaaaaactacacatatgtattcctgatcgccaacctttcccccaccagctaaggacatttcccagggttaatagggcctggtccctgggaggaaatttgaatgggtccattttgcccttccatagcctaatccctgggcattgctttccactgaggttgggggttggggtgtactagttacacatcttcaacagaccccctctagaaatttttcagatgcttctgggagacacccaaagggtgaagctatttatctgtagtaaactatttatctgtgtttttgaaatattaaaccctggatcagtcctttgatcagtataattttttaaagttactttgtcagaggcacaaaagggtttaaactgattcataataaatatctgtacttcttcgatcttcaccttttgtgctgtgattcttcagtttctaaaccagcactgtctgggtccctacaatgtatcaggaagagctgagaatggtaaggagactcttctaagtcttcatctcagagaccctgagttcccactcagacccactcagccaaatctcatggaagaccaaggagggcagcactgtttttgttttttgttttttgtttttttttttttgacactgtccaaaggttttccatcctgtcctggaatcagagttggaagctgaggagcttcagcctcttttatggtttaatggccacctgttctctcctgtgaaaggctttgcaaagtcacattaagtttgcatgacctgttatccctggggccctatttcatagaggctggccctattagtgatttccaaaaacaatatggaagtgccttttgatgtcttacaataagagaagaagccaatggaaatgaaagagattggcaaaggggaaggatgatgccatgtagatcctgtttgacatttttatggctgtatttgtaaacttaaacacaccagtgtctgttcttgatgcagttgctatttaggatgagttaagtgcctggggagtccctcaaaaggttaaagggattcccatcattggaatcttatcaccagataggcaagtttatgaccaaacaagagagtactggctttatcctctaacctcatattttctcccacttggcaagtcctttgtggcatttattcatcagtcagggtgtccgattggtcctagaacttccaaaggctgcttgtcatagaagccattgcatctataaagcaacggctcctgttaaatggtatctcctttctgaggctcctactaaaagtcatttgttacctaaacttatgtgcttaacaggcaatgcttctcagaccacaaagcagaaagaagaagaaaagctcctgactaaatcagggctgggcttagacagagttgatctgtagaatatctttaaaggagagatgtcaactttctgcactattcccagcctctgctcctccctgtctaccctctcccctccctctctccctccacttcaccccacaatcttgaaaaacttcctttctcttctgtgaacatcattggccagatccattttcagtggtctggatttctttttattttcttttcaacttgaaagaaactggacattaggccactatgtgttgttactgccactagtgttcaagtgcctcttgttttcccagagatttcctgggtctgccagaggcccagacaggctcactcaagctctttaactgaaaagcaacaagccactccaggacaaggttcaaaatggttacaacagcctctacctgtcgccccagggagaaaggggtagtgatacaagtctcatagccagagatggttttccactccttctagatattcccaaaaagaggctgagacaggaggttattttcaattttattttggaattaaatacttttttccctttattactgttgtagtccctcacttggatatacctctgttttcacgatagaaataagggaggtctagagcttctattccttggccattgtcaacggagagctggccaagtcttcacaaacccttgcaacattgcctgaagtttatggaataagatgtattctcactcccttgatctcaagggcgtaactctggaagcacagcttgactacacgtcatttttaccaatgattttcaggtgacctgggctaagtcatttaaactgggtctttataaaagtaaaaggccaacatttaattattttgcaaagcaacctaagagctaaagatgtaatttttcttgcaattgtaaatcttttgtgtctcctgaagacttcccttaaaattagctctgagtgaaaaatcaaaagagacaaaagacatcttcgaatccatatttcaagcctggtagaattggcttttctagcagaacctttccaaaagttttatattgagattcataacaacaccaagaattgattttgtagccaacattcattcaatactgttatatcagaggagtaggagagaggaaacatttgacttatctggaaaagcaaaatgtacttaagaataagaataacatggtccattcacctttatgttatagatatgtctttgtgtaaatcatttgttttgagttttcaaagaatagcccattgttcattcttgtgctgtacaatgaccactgttattgttactttgacttttcagagcacacccttcctctggtttttgtatatttattgatggatcaataataatgaggaaagcatgatatgtatattgctgagttgaaagcacttattggaaaatattaaaaggctaacattaaaagactaaaggaaaca

SEQ ID NO: 405798 - DNA, 4559 bp, Homo sapiens
ttcttcatgttcccttattattccactatgatcagttgtcaaaggcagaaccacaaaccattcaaacatattcatttttatcatgaagcaacataaaaaatcctgtgcccacatggtataatagataaatgactcctaaatgcaattaggtaaagtcactcaaaatttttgagagtggatgctcagaggtaacactttggcatagaattgttaaatagcatgcactttaatggaagaacagaatcattaaagattggttgataacaagtcacagtgtatttaaccatcatcacagcagatgtagacagaaatggcaccactgcttatgaaggaaactggaacccagaagcacaccctcccctcattcaccatgagcatcatgaggaagaagagaccccacattctacaagcacaatccaggcaactcctagtagtacaacggaagaaacagctacccagaaggaacagtggtttggcaacagatggcatgagggatatcgccaaacacccagagaagactcccattcgacaacagggacagctgcagcctcagctcataccagccatccaatgcaaggaaggacaacaccaagcccagaggacagttcctggactgatttcttcaacccaatctcacaccccatgggacgaggtcatcaagcaggaagaaggatggatatggactccagtcatagtacaacgcttcagcctactgcaaatccaaacacaggtttggtggaagatttggacaggacaggacctctttcaatgacaacgcagcagagtaattctcagagcttctctacatcacatgaaggcttggaagaagataaagaccatccaacaacttctactctgacatcaagcaataggaatgatgtcacaggtggaagaagagacccaaatcattctgaaggctcaactactttactggaaggttatacctctcattacccacacacgaaggaaagcaggaccttcatcccagtgacctcagctaagactgggtcctttggagttactgcagttactgttggagattccaactctaatgtcaatcgttccttatcaggagaccaagacacattccaccccagtggggggtcccataccactcatggatctgaatcagatggacactcacatgggagtcaagaaggtggagcaaacacaacctctggtcctataaggacaccccaaattccagaatggctgatcatcttggcatccctcttggccttggctttgattcttgcagtttgcattgcagtcaacagtcgaagaaggtgtgggcagaagaaaaagctagtgatcaacagtggcaatggagctgtggaggacagaaagccaagtggactcaacggagaggccagcaagtctcaggaaatggtgcatttggtgaacaaggagtcgtcagaaactccagaccagtttatgacagctgatgagacaaggaacctgcagaatgtggacatgaagattggggtgtaacacctacaccattatcttggaaagaaacaaccgttggaaacataaccattacagggagctgggacacttaacagatgcaatgtgctactgattgtttcattgcgaatcttttttagcataaaattttctactctttttgttttttgtgttttgttctttaaagtcaggtccaatttgtaaaaacagcattgctttctgaaattagggcccaattaataatcagcaagaatttgatcgttccagttcccacttggaggcctttcatccctcgggtgtgctatggatggcttctaacaaaaactacacatatgtattcctgatcgccaacctttcccccaccagctaaggacatttcccagggttaatagggcctggtccctgggaggaaatttgaatgggtccattttgcccttccatagcctaatccctgggcattgctttccactgaggttgggggttggggtgtactagttacacatcttcaacagaccccctctagaaatttttcagatgcttctgggagacacccaaagggtgaagctatttatctgtagtaaactatttatctgtgtttttgaaatattaaaccctggatcagtcctttgatcagtataattttttaaagttactttgtcagaggcacaaaagggtttaaactgattcataataaatatctgtacttcttcgatcttcaccttttgtgctgtgattcttcagtttctaaaccagcactgtctgggtccctacaatgtatcaggaagagctgagaatggtaaggagactcttctaagtcttcatctcagagaccctgagttcccactcagacccactcagccaaatctcatggaagaccaaggagggcagcactgtttttgttttttgttttttgtttttttttttttgacactgtccaaaggttttccatcctgtcctggaatcagagttggaagctgaggagcttcagcctcttttatggtttaatggccacctgttctctcctgtgaaaggctttgcaaagtcacattaagtttgcatgacctgttatccctggggccctatttcatagaggctggccctattagtgatttccaaaaacaatatggaagtgccttttgatgtcttacaataagagaagaagccaatggaaatgaaagagattggcaaaggggaaggatgatgccatgtagatcctgtttgacatttttatggctgtatttgtaaacttaaacacaccagtgtctgttcttgatgcagttgctatttaggatgagttaagtgcctggggagtccctcaaaaggttaaagggattcccatcattggaatcttatcaccagataggcaagtttatgaccaaacaagagagtactggctttatcctctaacctcatattttctcccacttggcaagtcctttgtggcatttattcatcagtcagggtgtccgattggtcctagaacttccaaaggctgcttgtcatagaagccattgcatctataaagcaacggctcctgttaaatggtatctcctttctgaggctcctactaaaagtcatttgttacctaaacttatgtgcttaacaggcaatgcttctcagaccacaaagcagaaagaagaagaaaagctcctgactaaatcagggctgggcttagacagagttgatctgtagaatatctttaaaggagagatgtcaactttctgcactattcccagcctctgctcctccctgtctaccctctcccctccctctctccctccacttcaccccacaatcttgaaaaacttcctttctcttctgtgaacatcattggccagatccattttcagtggtctggatttctttttattttcttttcaacttgaaagaaactggacattaggccactatgtgttgttactgccactagtgttcaagtgcctcttgttttcccagagatttcctgggtctgccagaggcccagacaggctcactcaagctctttaactgaaaagcaacaagccactccaggacaaggttcaaaatggttacaacagcctctacctgtcgccccagggagaaaggggtagtgatacaagtctcatagccagagatggttttccactccttctagatattcccaaaaagaggctgagacaggaggttattttcaattttattttggaattaaatacttttttccctttattactgttgtagtccctcacttggatatacctctgttttcacgatagaaataagggaggtctagagcttctattccttggccattgtcaacggagagctggccaagtcttcacaaacccttgcaacattgcctgaagtttatggaataagatgtattctcactcccttgatctcaagggcgtaactctggaagcacagcttgactacacgtcatttttaccaatgattttcaggtgacctgggctaagtcatttaaactgggtctttataaaagtaaaaggccaacatttaattattttgcaaagcaacctaagagctaaagatgtaatttttcttgcaattgtaaatcttttgtgtctcctgaagacttcccttaaaattagctctgagtgaaaaatcaaaagagacaaaagacatcttcgaatccatatttcaagcctggtagaattggcttttctagcagaacctttccaaaagttttatattgagattcataacaacaccaagaattgattttgtagccaacattcattcaatactgttatatcagaggagtaggagagaggaaacatttgacttatctggaaaagcaaaatgtacttaagaataagaataacatggtccattcacctttatgttatagatatgtctttgtgtaaatcatttgttttgagttttcaaagaatagcccattgttcattcttgtgctgtacaatgaccactgttattgttactttgacttttcagagcacacccttcctctggtttttgtatatttattgatggatcaataataatgaggaaagcatgatatgtatattgctgagttgaaagcacttattggaaaatattaaaaggctaacattaaaagactaaaggaaaca

SEQ ID NO: 405799 - DNA, 4884 bp, Homo sapiens
ggttttttgtgtgttgtttgtgtgccggactgatgtccaaagttccgccaggagggctttattgttgtcgttgttcaacatcctgttctgcggcttcctggctctttttgcccgttatgccgaagagccgggcgttggcacggccaatacggagactagcgaaggctttgaaattcttctcttcctcagtgatgactcgagctttctccttctatagacgttccggacgggcatgaccggtccggtcagctgggtggccagtttcagttcttcagcagaactgtctcccttcttgggggccgagggcttcctggggaagaggatgagtttggagcggtactccttcagccgctgcacgttggcctgcagggactccgtggacttgttccgcctcctcggatccacagaaatgccgatggtccgggccaccttcttgtgaatgtatgggttcatagaagggcacgtggtgattccccggatccaccccaactccatctgtgcagcaaacaacacaggggtgtacatcctcacatccaacacctcccagtatgacacatattgcttcaatgcttcagctccacctgaagaagattgtacatcagtcacagacctgcccaatgcctttgatggaccaattaccataactattgttaaccgtgatggcacccgctatgtccagaaaggagaatacagaacgaatcctgaagacatctaccccagcaaccctactgatgatgacgtgagcagcggctcctccagtgaaaggagcagcacttcaggaggttacatcttttacaccttttctactgtacaccccatcccagacgaagacagtccctggatcaccgacagcacagacagaatccctgctaccagtacgtcttcaaataccatctcagcaggctgggagccaaatgaagaaaatgaagatgaaagagacagacacctcagtttttctggatcaggcattgatgatgatgaagattttatctccagcaccaatatggactccagtcatagtacaacgcttcagcctactgcaaatccaaacacaggtttggtggaagatttggacaggacaggacctctttcaatgacaacgcagcagagtaattctcagagcttctctacatcacatgaaggcttggaagaagataaagaccatccaacaacttctactctgacatcaagcaataggaatgatgtcacaggtggaagaagagacccaaatcattctgaaggctcaactactttactggaaggttatacctctcattacccacacacgaaggaaagcaggaccttcatcccagtgacctcagctaagactgggtcctttggagttactgcagttactgttggagattccaactctaatgtcaatcgttccttatcaggagaccaagacacattccaccccagtggggggtcccataccactcatggatctgaatcagatggacactcacatgggagtcaagaaggtggagcaaacacaacctctggtcctataaggacaccccaaattccagaatggctgatcatcttggcatccctcttggccttggctttgattcttgcagtttgcattgcagtcaacagtcgaagaaggtgtgggcagaagaaaaagctagtgatcaacagtggcaatggagctgtggaggacagaaagccaagtggactcaacggagaggccagcaagtctcaggaaatggtgcatttggtgaacaaggagtcgtcagaaactccagaccagtttatgacagctgatgagacaaggaacctgcagaatgtggacatgaagattggggtgtaacacctacaccattatcttggaaagaaacaaccgttggaaacataaccattacagggagctgggacacttaacagatgcaatgtgctactgattgtttcattgcgaatcttttttagcataaaattttctactctttttgttttttgtgttttgttctttaaagtcaggtccaatttgtaaaaacagcattgctttctgaaattagggcccaattaataatcagcaagaatttgatcgttccagttcccacttggaggcctttcatccctcgggtgtgctatggatggcttctaacaaaaactacacatatgtattcctgatcgccaacctttcccccaccagctaaggacatttcccagggttaatagggcctggtccctgggaggaaatttgaatgggtccattttgcccttccatagcctaatccctgggcattgctttccactgaggttgggggttggggtgtactagttacacatcttcaacagaccccctctagaaatttttcagatgcttctgggagacacccaaagggtgaagctatttatctgtagtaaactatttatctgtgtttttgaaatattaaaccctggatcagtcctttgatcagtataattttttaaagttactttgtcagaggcacaaaagggtttaaactgattcataataaatatctgtacttcttcgatcttcaccttttgtgctgtgattcttcagtttctaaaccagcactgtctgggtccctacaatgtatcaggaagagctgagaatggtaaggagactcttctaagtcttcatctcagagaccctgagttcccactcagacccactcagccaaatctcatggaagaccaaggagggcagcactgtttttgttttttgttttttgtttttttttttttgacactgtccaaaggttttccatcctgtcctggaatcagagttggaagctgaggagcttcagcctcttttatggtttaatggccacctgttctctcctgtgaaaggctttgcaaagtcacattaagtttgcatgacctgttatccctggggccctatttcatagaggctggccctattagtgatttccaaaaacaatatggaagtgccttttgatgtcttacaataagagaagaagccaatggaaatgaaagagattggcaaaggggaaggatgatgccatgtagatcctgtttgacatttttatggctgtatttgtaaacttaaacacaccagtgtctgttcttgatgcagttgctatttaggatgagttaagtgcctggggagtccctcaaaaggttaaagggattcccatcattggaatcttatcaccagataggcaagtttatgaccaaacaagagagtactggctttatcctctaacctcatattttctcccacttggcaagtcctttgtggcatttattcatcagtcagggtgtccgattggtcctagaacttccaaaggctgcttgtcatagaagccattgcatctataaagcaacggctcctgttaaatggtatctcctttctgaggctcctactaaaagtcatttgttacctaaacttatgtgcttaacaggcaatgcttctcagaccacaaagcagaaagaagaagaaaagctcctgactaaatcagggctgggcttagacagagttgatctgtagaatatctttaaaggagagatgtcaactttctgcactattcccagcctctgctcctccctgtctaccctctcccctccctctctccctccacttcaccccacaatcttgaaaaacttcctttctcttctgtgaacatcattggccagatccattttcagtggtctggatttctttttattttcttttcaacttgaaagaaactggacattaggccactatgtgttgttactgccactagtgttcaagtgcctcttgttttcccagagatttcctgggtctgccagaggcccagacaggctcactcaagctctttaactgaaaagcaacaagccactccaggacaaggttcaaaatggttacaacagcctctacctgtcgccccagggagaaaggggtagtgatacaagtctcatagccagagatggttttccactccttctagatattcccaaaaagaggctgagacaggaggttattttcaattttattttggaattaaatacttttttccctttattactgttgtagtccctcacttggatatacctctgttttcacgatagaaataagggaggtctagagcttctattccttggccattgtcaacggagagctggccaagtcttcacaaacccttgcaacattgcctgaagtttatggaataagatgtattctcactcccttgatctcaagggcgtaactctggaagcacagcttgactacacgtcatttttaccaatgattttcaggtgacctgggctaagtcatttaaactgggtctttataaaagtaaaaggccaacatttaattattttgcaaagcaacctaagagctaaagatgtaatttttcttgcaattgtaaatcttttgtgtctcctgaagacttcccttaaaattagctctgagtgaaaaatcaaaagagacaaaagacatcttcgaatccatatttcaagcctggtagaattggcttttctagcagaacctttccaaaagttttatattgagattcataacaacaccaagaattgattttgtagccaacattcattcaatactgttatatcagaggagtaggagagaggaaacatttgacttatctggaaaagcaaaatgtacttaagaataagaataacatggtccattcacctttatgttatagatatgtctttgtgtaaatcatttgttttgagttttcaaagaatagcccattgttcattcttgtgctgtacaatgaccactgttattgttactttgacttttcagagcacacccttcctctggtttttgtatatttattgatggatcaataataatgaggaaagcatgatatgtatattgctgagttgaaagcacttattggaaaatattaaaaggctaacattaaaagactaaaggaaaca

SEQ ID NO: 405800 - DNA, 4155 bp, Homo sapiens
tgctcctttcactggaggagccgctgctcacgtcagcacttcaggaggttacatcttttacaccttttctactgtacaccccatcccagacgaagacagtccctggatcaccgacagcacagacagaatccctgctaccacagcctcagctcataccagccatccaatgcaaggaaggacaacaccaagcccagaggacagttcctggactgatttcttcaacccaatctcacaccccatgggacgaggtcatcaagcaggaagaaggatggatatggactccagtcatagtacaacgcttcagcctactgcaaatccaaacacaggtttggtggaagatttggacaggacaggacctctttcaatgacaacgcagcagagtaattctcagagcttctctacatcacatgaaggcttggaagaagataaagaccatccaacaacttctactctgacatcaagcaataggaatgatgtcacaggtggaagaagagacccaaatcattctgaaggctcaactactttactggaaggttatacctctcattacccacacacgaaggaaagcaggaccttcatcccagtgacctcagctaagactgggtcctttggagttactgcagttactgttggagattccaactctaatgtcaatcgttccttatcaggagaccaagacacattccaccccagtggggggtcccataccactcatggatctgaatcagatggacactcacatgggagtcaagaaggtggagcaaacacaacctctggtcctataaggacaccccaaattccagaatggctgatcatcttggcatccctcttggccttggctttgattcttgcagtttgcattgcagtcaacagtcgaagaaggtgtgggcagaagaaaaagctagtgatcaacagtggcaatggagctgtggaggacagaaagccaagtggactcaacggagaggccagcaagtctcaggaaatggtgcatttggtgaacaaggagtcgtcagaaactccagaccagtttatgacagctgatgagacaaggaacctgcagaatgtggacatgaagattggggtgtaacacctacaccattatcttggaaagaaacaaccgttggaaacataaccattacagggagctgggacacttaacagatgcaatgtgctactgattgtttcattgcgaatcttttttagcataaaattttctactctttttgttttttgtgttttgttctttaaagtcaggtccaatttgtaaaaacagcattgctttctgaaattagggcccaattaataatcagcaagaatttgatcgttccagttcccacttggaggcctttcatccctcgggtgtgctatggatggcttctaacaaaaactacacatatgtattcctgatcgccaacctttcccccaccagctaaggacatttcccagggttaatagggcctggtccctgggaggaaatttgaatgggtccattttgcccttccatagcctaatccctgggcattgctttccactgaggttgggggttggggtgtactagttacacatcttcaacagaccccctctagaaatttttcagatgcttctgggagacacccaaagggtgaagctatttatctgtagtaaactatttatctgtgtttttgaaatattaaaccctggatcagtcctttgatcagtataattttttaaagttactttgtcagaggcacaaaagggtttaaactgattcataataaatatctgtacttcttcgatcttcaccttttgtgctgtgattcttcagtttctaaaccagcactgtctgggtccctacaatgtatcaggaagagctgagaatggtaaggagactcttctaagtcttcatctcagagaccctgagttcccactcagacccactcagccaaatctcatggaagaccaaggagggcagcactgtttttgttttttgttttttgtttttttttttttgacactgtccaaaggttttccatcctgtcctggaatcagagttggaagctgaggagcttcagcctcttttatggtttaatggccacctgttctctcctgtgaaaggctttgcaaagtcacattaagtttgcatgacctgttatccctggggccctatttcatagaggctggccctattagtgatttccaaaaacaatatggaagtgccttttgatgtcttacaataagagaagaagccaatggaaatgaaagagattggcaaaggggaaggatgatgccatgtagatcctgtttgacatttttatggctgtatttgtaaacttaaacacaccagtgtctgttcttgatgcagttgctatttaggatgagttaagtgcctggggagtccctcaaaaggttaaagggattcccatcattggaatcttatcaccagataggcaagtttatgaccaaacaagagagtactggctttatcctctaacctcatattttctcccacttggcaagtcctttgtggcatttattcatcagtcagggtgtccgattggtcctagaacttccaaaggctgcttgtcatagaagccattgcatctataaagcaacggctcctgttaaatggtatctcctttctgaggctcctactaaaagtcatttgttacctaaacttatgtgcttaacaggcaatgcttctcagaccacaaagcagaaagaagaagaaaagctcctgactaaatcagggctgggcttagacagagttgatctgtagaatatctttaaaggagagatgtcaactttctgcactattcccagcctctgctcctccctgtctaccctctcccctccctctctccctccacttcaccccacaatcttgaaaaacttcctttctcttctgtgaacatcattggccagatccattttcagtggtctggatttctttttattttcttttcaacttgaaagaaactggacattaggccactatgtgttgttactgccactagtgttcaagtgcctcttgttttcccagagatttcctgggtctgccagaggcccagacaggctcactcaagctctttaactgaaaagcaacaagccactccaggacaaggttcaaaatggttacaacagcctctacctgtcgccccagggagaaaggggtagtgatacaagtctcatagccagagatggttttccactccttctagatattcccaaaaagaggctgagacaggaggttattttcaattttattttggaattaaatacttttttccctttattactgttgtagtccctcacttggatatacctctgttttcacgatagaaataagggaggtctagagcttctattccttggccattgtcaacggagagctggccaagtcttcacaaacccttgcaacattgcctgaagtttatggaataagatgtattctcactcccttgatctcaagggcgtaactctggaagcacagcttgactacacgtcatttttaccaatgattttcaggtgacctgggctaagtcatttaaactgggtctttataaaagtaaaaggccaacatttaattattttgcaaagcaacctaagagctaaagatgtaatttttcttgcaattgtaaatcttttgtgtctcctgaagacttcccttaaaattagctctgagtgaaaaatcaaaagagacaaaagacatcttcgaatccatatttcaagcctggtagaattggcttttctagcagaacctttccaaaagttttatattgagattcataacaacaccaagaattgattttgtagccaacattcattcaatactgttatatcagaggagtaggagagaggaaacatttgacttatctggaaaagcaaaatgtacttaagaataagaataacatggtccattcacctttatgttatagatatgtctttgtgtaaatcatttgttttgagttttcaaagaatagcccattgttcattcttgtgctgtacaatgaccactgttattgttactttgacttttcagagcacacccttcctctggtttttgtatatttattgatggatcaataataatgaggaaagcatgatatgtatattgctgagttgaaagcacttattggaaaatattaaaaggctaacattaaaagactaaaggaaaca

SEQ ID NO: 405801 - DNA, 5361 bp, Homo sapiens
ggttttttgtgtgttgtttgtgtgccggactgatgtccaaagttccgccaggagggctttattgttgtcgttgttcaacatcctgttctgcggcttcctggctctttttgcccgttatgccgaagagccgggcgttggcacggccaatacggagactagcgaaggctttgaaattcttctcttcctcagtgatgactcgagctttctccttctatagacgttccggacgggcatgaccggtccggtcagctgggtggccagtttcagttcttcagcagaactgtctcccttcttgggggccgagggcttcctggggaagaggatgagtttggagcggtactccttcagccgctgcacgttggcctgcagggactccgtggacttgttccgcctcctcggatccacagaaatgccgatggtccgggccaccttcttgtgaatgtatgggttcatagaagggcacgtggtgattccccggatccaccccaactccatctgtgcagcaaacaacacaggggtgtacatcctcacatccaacacctcccagtatgacacatattgcttcaatgcttcagctccacctgaagaagattgtacatcagtcacagacctgcccaatgcctttgatggaccaattaccataactattgttaaccgtgatggcacccgctatgtccagaaaggagaatacagaacgaatcctgaagacatctaccccagcaaccctactgatgatgacgtgagcagcggctcctccagtgaaaggagcagcacttcaggaggttacatcttttacaccttttctactgtacaccccatcccagacgaagacagtccctggatcaccgacagcacagacagaatccctgctaccagtacgtcttcaaataccatctcagcaggctgggagccaaatgaagaaaatgaagatgaaagagacagacacctcagtttttctggatcaggcattgatgatgatgaagattttatctccagcaccatttcaaccacaccacgggcttttgaccacacaaaacagaaccaggactggacccagtggaacccaagccattcaaatccggaagtgctacttcagacaaccacaaggatgactgcagatgtagacagaaatggcaccactgcttatgaaggaaactggaacccagaagcacaccctcccctcattcaccatgagcatcatgaggaagaagagaccccacattctacaagcacaatccaggcaactcctagtagtacaacggaagaaacagctacccagaaggaacagtggtttggcaacagatggcatgagggatatcgccaaacacccagagaagactcccattcgacaacagggacagctgcagcctcagctcataccagccatccaatgcaaggaaggacaacaccaagcccagaggacagttcctggactgatttcttcaacccaatctcacaccccatgggacgaggtcatcaagcaggaagaaggatggatatggactccagtcatagtacaacgcttcagcctactgcaaatccaaacacaggtttggtggaagatttggacaggacaggacctctttcaatgacaacgcagcagagtaattctcagagcttctctacatcacatgaaggcttggaagaagataaagaccatccaacaacttctactctgacatcaagcagtggaagaagagacccaaatcattctgaaggctcaactactttactggaaggttatacctctcattacccacacacgaaggaaagcaggaccttcatcccagtgacctcagctaagactgggtcctttggagttactgcagttactgttggagattccaactctaatgtcaatcgttccttatcaggagaccaagacacattccaccccagtggggggtcccataccactcatggatctgaatcagatggacactcacatgggagtcaagaaggtggagcaaacacaacctctggtcctataaggacaccccaaattccagaatggctgatcatcttggcatccctcttggccttggctttgattcttgcagtttgcattgcagtcaacagtcgaagaaggtgtgggcagaagaaaaagctagtgatcaacagtggcaatggagctgtggaggacagaaagccaagtggactcaacggagaggccagcaagtctcaggaaatggtgcatttggtgaacaaggagtcgtcagaaactccagaccagtttatgacagctgatgagacaaggaacctgcagaatgtggacatgaagattggggtgtaacacctacaccattatcttggaaagaaacaaccgttggaaacataaccattacagggagctgggacacttaacagatgcaatgtgctactgattgtttcattgcgaatcttttttagcataaaattttctactctttttgttttttgtgttttgttctttaaagtcaggtccaatttgtaaaaacagcattgctttctgaaattagggcccaattaataatcagcaagaatttgatcgttccagttcccacttggaggcctttcatccctcgggtgtgctatggatggcttctaacaaaaactacacatatgtattcctgatcgccaacctttcccccaccagctaaggacatttcccagggttaatagggcctggtccctgggaggaaatttgaatgggtccattttgcccttccatagcctaatccctgggcattgctttccactgaggttgggggttggggtgtactagttacacatcttcaacagaccccctctagaaatttttcagatgcttctgggagacacccaaagggtgaagctatttatctgtagtaaactatttatctgtgtttttgaaatattaaaccctggatcagtcctttgatcagtataattttttaaagttactttgtcagaggcacaaaagggtttaaactgattcataataaatatctgtacttcttcgatcttcaccttttgtgctgtgattcttcagtttctaaaccagcactgtctgggtccctacaatgtatcaggaagagctgagaatggtaaggagactcttctaagtcttcatctcagagaccctgagttcccactcagacccactcagccaaatctcatggaagaccaaggagggcagcactgtttttgttttttgttttttgtttttttttttttgacactgtccaaaggttttccatcctgtcctggaatcagagttggaagctgaggagcttcagcctcttttatggtttaatggccacctgttctctcctgtgaaaggctttgcaaagtcacattaagtttgcatgacctgttatccctggggccctatttcatagaggctggccctattagtgatttccaaaaacaatatggaagtgccttttgatgtcttacaataagagaagaagccaatggaaatgaaagagattggcaaaggggaaggatgatgccatgtagatcctgtttgacatttttatggctgtatttgtaaacttaaacacaccagtgtctgttcttgatgcagttgctatttaggatgagttaagtgcctggggagtccctcaaaaggttaaagggattcccatcattggaatcttatcaccagataggcaagtttatgaccaaacaagagagtactggctttatcctctaacctcatattttctcccacttggcaagtcctttgtggcatttattcatcagtcagggtgtccgattggtcctagaacttccaaaggctgcttgtcatagaagccattgcatctataaagcaacggctcctgttaaatggtatctcctttctgaggctcctactaaaagtcatttgttacctaaacttatgtgcttaacaggcaatgcttctcagaccacaaagcagaaagaagaagaaaagctcctgactaaatcagggctgggcttagacagagttgatctgtagaatatctttaaaggagagatgtcaactttctgcactattcccagcctctgctcctccctgtctaccctctcccctccctctctccctccacttcaccccacaatcttgaaaaacttcctttctcttctgtgaacatcattggccagatccattttcagtggtctggatttctttttattttcttttcaacttgaaagaaactggacattaggccactatgtgttgttactgccactagtgttcaagtgcctcttgttttcccagagatttcctgggtctgccagaggcccagacaggctcactcaagctctttaactgaaaagcaacaagccactccaggacaaggttcaaaatggttacaacagcctctacctgtcgccccagggagaaaggggtagtgatacaagtctcatagccagagatggttttccactccttctagatattcccaaaaagaggctgagacaggaggttattttcaattttattttggaattaaatacttttttccctttattactgttgtagtccctcacttggatatacctctgttttcacgatagaaataagggaggtctagagcttctattccttggccattgtcaacggagagctggccaagtcttcacaaacccttgcaacattgcctgaagtttatggaataagatgtattctcactcccttgatctcaagggcgtaactctggaagcacagcttgactacacgtcatttttaccaatgattttcaggtgacctgggctaagtcatttaaactgggtctttataaaagtaaaaggccaacatttaattattttgcaaagcaacctaagagctaaagatgtaatttttcttgcaattgtaaatcttttgtgtctcctgaagacttcccttaaaattagctctgagtgaaaaatcaaaagagacaaaagacatcttcgaatccatatttcaagcctggtagaattggcttttctagcagaacctttccaaaagttttatattgagattcataacaacaccaagaattgattttgtagccaacattcattcaatactgttatatcagaggagtaggagagaggaaacatttgacttatctggaaaagcaaaatgtacttaagaataagaataacatggtccattcacctttatgttatagatatgtctttgtgtaaatcatttgttttgagttttcaaagaatagcccattgttcattcttgtgctgtacaatgaccactgttattgttactttgacttttcagagcacacccttcctctggtttttgtatatttattgatggatcaataataatgaggaaagcatgatatgtatattgctgagttgaaagcacttattggaaaatattaaaaggctaacattaaaagactaaaggaaaca

SEQ ID NO: 405802 - DNA, 4566 bp, Homo sapiens
ggttttttgtgtgttgtttgtgtgccggactgatgtccaaagttccgccaggagggctttattgttgtcgttgttcaacatcctgttctgcggcttcctggctctttttgcccgttatgccgaagagccgggcgttggcacggccaatacggagactagcgaaggctttgaaattcttctcttcctcagtgatgactcgagctttctccttctatagacgttccggacgggcatgaccggtccggtcagctgggtggccagtttcagttcttcagcagaactgtctcccttcttgggggccgagggcttcctggggaagaggatgagtttggagcggtactccttcagccgctgcacgttggcctgcagggactccgtggacttgttccgcctcctcggatccacagaaatgccgatggtccgggccaccttcttgtgaatgtatgggttcatagaagggcacgtggtgattccccggatccaccccaactccatctgtgcagcaaacaacacaggggtgtacatcctcacatccaacacctcccagtatgacacatattgcttcaatgcttcagctccacctgaagaagattgtacatcagtcacagacctgcccaatgcctttgatggaccaattaccataactattgttaaccgtgatggcacccgctatgtccagaaaggagaatacagaacgaatcctgaagacatctaccccagcaaccctactgatgatgacgtgagcagcggctcctccagtgaaaggagcagcacttcaggaggttacatcttttacaccttttctactgtacaccccatcccagacgaagacagtccctggatcaccgacagcacagacagaatccctgctaccaataggaatgatgtcacaggtggaagaagagacccaaatcattctgaaggctcaactactttactggaaggttatacctctcattacccacacacgaaggaaagcaggaccttcatcccagtgacctcagctaagactgggtcctttggagttactgcagttactgttggagattccaactctaatgtcaatcgttccttatcaggagaccaagacacattccaccccagtggggggtcccataccactcatggatctgaatcagatggacactcacatgggagtcaagaaggtggagcaaacacaacctctggtcctataaggacaccccaaattccagaatggctgatcatcttggcatccctcttggccttggctttgattcttgcagtttgcattgcagtcaacagtcgaagaaggtgtgggcagaagaaaaagctagtgatcaacagtggcaatggagctgtggaggacagaaagccaagtggactcaacggagaggccagcaagtctcaggaaatggtgcatttggtgaacaaggagtcgtcagaaactccagaccagtttatgacagctgatgagacaaggaacctgcagaatgtggacatgaagattggggtgtaacacctacaccattatcttggaaagaaacaaccgttggaaacataaccattacagggagctgggacacttaacagatgcaatgtgctactgattgtttcattgcgaatcttttttagcataaaattttctactctttttgttttttgtgttttgttctttaaagtcaggtccaatttgtaaaaacagcattgctttctgaaattagggcccaattaataatcagcaagaatttgatcgttccagttcccacttggaggcctttcatccctcgggtgtgctatggatggcttctaacaaaaactacacatatgtattcctgatcgccaacctttcccccaccagctaaggacatttcccagggttaatagggcctggtccctgggaggaaatttgaatgggtccattttgcccttccatagcctaatccctgggcattgctttccactgaggttgggggttggggtgtactagttacacatcttcaacagaccccctctagaaatttttcagatgcttctgggagacacccaaagggtgaagctatttatctgtagtaaactatttatctgtgtttttgaaatattaaaccctggatcagtcctttgatcagtataattttttaaagttactttgtcagaggcacaaaagggtttaaactgattcataataaatatctgtacttcttcgatcttcaccttttgtgctgtgattcttcagtttctaaaccagcactgtctgggtccctacaatgtatcaggaagagctgagaatggtaaggagactcttctaagtcttcatctcagagaccctgagttcccactcagacccactcagccaaatctcatggaagaccaaggagggcagcactgtttttgttttttgttttttgtttttttttttttgacactgtccaaaggttttccatcctgtcctggaatcagagttggaagctgaggagcttcagcctcttttatggtttaatggccacctgttctctcctgtgaaaggctttgcaaagtcacattaagtttgcatgacctgttatccctggggccctatttcatagaggctggccctattagtgatttccaaaaacaatatggaagtgccttttgatgtcttacaataagagaagaagccaatggaaatgaaagagattggcaaaggggaaggatgatgccatgtagatcctgtttgacatttttatggctgtatttgtaaacttaaacacaccagtgtctgttcttgatgcagttgctatttaggatgagttaagtgcctggggagtccctcaaaaggttaaagggattcccatcattggaatcttatcaccagataggcaagtttatgaccaaacaagagagtactggctttatcctctaacctcatattttctcccacttggcaagtcctttgtggcatttattcatcagtcagggtgtccgattggtcctagaacttccaaaggctgcttgtcatagaagccattgcatctataaagcaacggctcctgttaaatggtatctcctttctgaggctcctactaaaagtcatttgttacctaaacttatgtgcttaacaggcaatgcttctcagaccacaaagcagaaagaagaagaaaagctcctgactaaatcagggctgggcttagacagagttgatctgtagaatatctttaaaggagagatgtcaactttctgcactattcccagcctctgctcctccctgtctaccctctcccctccctctctccctccacttcaccccacaatcttgaaaaacttcctttctcttctgtgaacatcattggccagatccattttcagtggtctggatttctttttattttcttttcaacttgaaagaaactggacattaggccactatgtgttgttactgccactagtgttcaagtgcctcttgttttcccagagatttcctgggtctgccagaggcccagacaggctcactcaagctctttaactgaaaagcaacaagccactccaggacaaggttcaaaatggttacaacagcctctacctgtcgccccagggagaaaggggtagtgatacaagtctcatagccagagatggttttccactccttctagatattcccaaaaagaggctgagacaggaggttattttcaattttattttggaattaaatacttttttccctttattactgttgtagtccctcacttggatatacctctgttttcacgatagaaataagggaggtctagagcttctattccttggccattgtcaacggagagctggccaagtcttcacaaacccttgcaacattgcctgaagtttatggaataagatgtattctcactcccttgatctcaagggcgtaactctggaagcacagcttgactacacgtcatttttaccaatgattttcaggtgacctgggctaagtcatttaaactgggtctttataaaagtaaaaggccaacatttaattattttgcaaagcaacctaagagctaaagatgtaatttttcttgcaattgtaaatcttttgtgtctcctgaagacttcccttaaaattagctctgagtgaaaaatcaaaagagacaaaagacatcttcgaatccatatttcaagcctggtagaattggcttttctagcagaacctttccaaaagttttatattgagattcataacaacaccaagaattgattttgtagccaacattcattcaatactgttatatcagaggagtaggagagaggaaacatttgacttatctggaaaagcaaaatgtacttaagaataagaataacatggtccattcacctttatgttatagatatgtctttgtgtaaatcatttgttttgagttttcaaagaatagcccattgttcattcttgtgctgtacaatgaccactgttattgttactttgacttttcagagcacacccttcctctggtttttgtatatttattgatggatcaataataatgaggaaagcatgatatgtatattgctgagttgaaagcacttattggaaaatattaaaaggctaacattaaaagactaaaggaaaca

SEQ ID NO: 405803 - DNA, 5325 bp, Homo sapiens
ggttttttgtgtgttgtttgtgtgccggactgatgtccaaagttccgccaggagggctttattgttgtcgttgttcaacatcctgttctgcggcttcctggctctttttgcccgttatgccgaagagccgggcgttggcacggccaatacggagactagcgaaggctttgaaattcttctcttcctcagtgatgactcgagctttctccttctatagacgttccggacgggcatgaccggtccggtcagctgggtggccagtttcagttcttcagcagaactgtctcccttcttgggggccgagggcttcctggggaagaggatgagtttggagcggtactccttcagccgctgcacgttggcctgcagggactccgtggacttgttccgcctcctcggatccacagaaatgccgatggtccgggccaccttcttgtgaatgtatgggttcatagaagggcacgtggtgattccccggatccaccccaactccatctgtgcagcaaacaacacaggggtgtacatcctcacatccaacacctcccagtatgacacatattgcttcaatgcttcagctccacctgaagaagattgtacatcagtcacagacctgcccaatgcctttgatggaccaattaccataactattgttaaccgtgatggcacccgctatgtccagaaaggagaatacagaacgaatcctgaagacatctaccccagcaaccctactgatgatgacgtgagcagcggctcctccagtgaaaggagcagcacttcaggaggttacatcttttacaccttttctactgtacaccccatcccagacgaagacagtccctggatcaccgacagcacagacagaatccctgctaccagtacgtcttcaaataccatctcagcaggctgggagccaaatgaagaaaatgaagatgaaagagacagacacctcagtttttctggatcaggcattgatgatgatgaagattttatctccagcaccatttcaaccacaccacgggcttttgaccacacaaaacagaaccaggactggacccagtggaacccaagccattcaaatccggaagtgctacttcagacaaccacaaggatgactgcagatgtagacagaaatggcaccactgcttatgaaggaaactggaacccagaagcacaccctcccctcattcaccatgagcatcatgaggaagaagagaccccacattctacaagcacaatccaggcaactcctagtagtacaacggaagaaacagctacccagaaggaacagtggtttggcaacagatggcatgagggatatcgccaaacacccagagaagactcccattcgacaacagggacagctgcagcctcagctcataccagccatccaatgcaaggaaggacaacaccaagcccagaggacagttcctggactgatttcttcaacccaatctcacaccccatgggacgaggtcatcaagcaggaagaaggatggatatggactccagtcatagtacaacgcttcagcctactgcaaatccaaacacaggtttggtggaagatttggacaggacaggacctctttcaatgacaacgcagcagagtaattctcagagcttctctacatcacatgaaggcttggaagaagataaagaccatccaacaacttctactctgacatcaagcaataggaatgatgtcacaggtggaagaagagacccaaatcattctgaaggctcaactactttactggaaggttatacctctcattacccacacacgaaggaaagcaggaccttcatcccagtgacctcagctaagactgggtcctttggagttactgcagttactgttggagattccaactctaatgtcaatcgttccttatcaggagaccaagacacattccaccccagtggggggtcccataccactcatggatctgaatcagatggacactcacatgggagtcaagaaggtggagcaaacacaacctctggtcctataaggacaccccaaattccagaatggctgatcatcttggcatccctcttggccttggctttgattcttgcagtttgcattgcagtcaacagtcgaagaaggtgtgggcagaagaaaaagctagtgatcaacagtggcaatggagctgtggaggacagaaagccaagtggactcaacggagaggccagcaagtctcaggaaatggtgcatttggtgaacaaggagtcgtcagaaactccagaccagtttatgacagctgatgagacaaggaacctgcagaatgtggacatgaagattggggtgtaacacctacaccattatcttggaaagaaacaaccgttggaaacataaccattacagggagctgggacacttaacagatgcaatgtgctactgattgtttcattgcgaatcttttttagcataaaattttctactctttttgttttttgtgttttgttctttaaagtcaggtccaatttgtaaaaacagcattgctttctgaaattagggcccaattaataatcagcaagaatttgatcgttccagttcccacttggaggcctttcatccctcgggtgtgctatggatggcttctaacaaaaactacacatatgtattcctgatcgccaacctttcccccaccagctaaggacatttcccagggttaatagggcctggtccctgggaggaaatttgaatgggtccattttgcccttccatagcctaatccctgggcattgctttccactgaggttgggggttggggtgtactagttacacatcttcaacagaccccctctagaaatttttcagatgcttctgggagacacccaaagggtgaagctatttatctgtagtaaactatttatctgtgtttttgaaatattaaaccctggatcagtcctttgatcagtataattttttaaagttactttgtcagaggcacaaaagggtttaaactgattcataataaatatctgtacttcttcgatcttcaccttttgtgctgtgattcttcagtttctaaaccagcactgtctgggtccctacaatgtatcaggaagagctgagaatggtaaggagactcttctaagtcttcatctcagagaccctgagttcccactcagacccactcagccaaatctcatggaagaccaaggagggcagcactgtttttgttttttgttttttgtttttttttttttgacactgtccaaaggttttccatcctgtcctggaatcagagttggaagctgaggagcttcagcctcttttatggtttaatggccacctgttctctcctgtgaaaggctttgcaaagtcacattaagtttgcatgacctgttatccctggggccctatttcatagaggctggccctattagtgatttccaaaaacaatatggaagtgccttttgatgtcttacaataagagaagaagccaatggaaatgaaagagattggcaaaggggaaggatgatgccatgtagatcctgtttgacatttttatggctgtatttgtaaacttaaacacaccagtgtctgttcttgatgcagttgctatttaggatgagttaagtgcctggggagtccctcaaaaggttaaagggattcccatcattggaatcttatcaccagataggcaagtttatgaccaaacaagagagtactggctttatcctctaacctcatattttctcccacttggcaagtcctttgtggcatttattcatcagtcagggtgtccgattggtcctagaacttccaaaggctgcttgtcatagaagccattgcatctataaagcaacggctcctgttaaatggtatctcctttctgaggctcctactaaaagtcatttgttacctaaacttatgtgcttaacaggcaatgcttctcagaccacaaagcagaaagaagaagaaaagctcctgactaaatcagggctgggcttagacagagttgatctgtagaatatctttaaaggagagatgtcaactttctgcactattcccagcctctgctcctccctgtctaccctctcccctccctctctccctccacttcaccccacaatcttgatggatttctttttattttcttttcaacttgaaagaaactggacattaggccactatgtgttgttactgccactagtgttcaagtgcctcttgttttcccagagatttcctgggtctgccagaggcccagacaggctcactcaagctctttaactgaaaagcaacaagccactccaggacaaggttcaaaatggttacaacagcctctacctgtcgccccagggagaaaggggtagtgatacaagtctcatagccagagatggttttccactccttctagatattcccaaaaagaggctgagacaggaggttattttcaattttattttggaattaaatacttttttccctttattactgttgtagtccctcacttggatatacctctgttttcacgatagaaataagggaggtctagagcttctattccttggccattgtcaacggagagctggccaagtcttcacaaacccttgcaacattgcctgaagtttatggaataagatgtattctcactcccttgatctcaagggcgtaactctggaagcacagcttgactacacgtcatttttaccaatgattttcaggtgacctgggctaagtcatttaaactgggtctttataaaagtaaaaggccaacatttaattattttgcaaagcaacctaagagctaaagatgtaatttttcttgcaattgtaaatcttttgtgtctcctgaagacttcccttaaaattagctctgagtgaaaaatcaaaagagacaaaagacatcttcgaatccatatttcaagcctggtagaattggcttttctagcagaacctttccaaaagttttatattgagattcataacaacaccaagaattgattttgtagccaacattcattcaatactgttatatcagaggagtaggagagaggaaacatttgacttatctggaaaagcaaaatgtacttaagaataagaataacatggtccattcacctttatgttatagatatgtctttgtgtaaatcatttgttttgagttttcaaagaatagcccattgttcattcttgtgctgtacaatgaccactgttattgttactttgacttttcagagcacacccttcctctggtttttgtatatttattgatggatcaataataatgaggaaagcatgatatgtatattgctgagttgaaagcacttattggaaaatattaaaaggctaacattaaaagactaaaggaaaca

SEQ ID NO: 405804 - DNA, 5755 bp, Homo sapiens
ggttttttgtgtgttgtttgtgtgccggactgatgtccaaagttccgccaggagggctttattgttgtcgttgttcaacatcctgttctgcggcttcctggctctttttgcccgttatgccgaagagccgggcgttggcacggccaatacggagactagcgaaggctttgaaattcttctcttcctcagtgatgactcgagctttctccttctatagacgttccggacgggcatgaccggtccggtcagctgggtggccagtttcagttcttcagcagaactgtctcccttcttgggggccgagggcttcctggggaagaggatgagtttggagcggtactccttcagccgctgcacgttggcctgcagggactccgtggacttgttccgcctcctcggatccacagaaatgccgatggtccgggccaccttcttgtgaatgtatgggttcatagaagggcacgtggtgattccccggatccaccccaactccatctgtgcagcaaacaacacaggggtgtacatcctcacatccaacacctcccagtatgacacatattgcttcaatgcttcagctccacctgaagaagattgtacatcagtcacagacctgcccaatgcctttgatggaccaattaccataactattgttaaccgtgatggcacccgctatgtccagaaaggagaatacagaacgaatcctgaagacatctaccccagcaaccctactgatgatgacgtgagcagcggctcctccagtgaaaggagcagcacttcaggaggttacatcttttacaccttttctactgtacaccccatcccagacgaagacagtccctggatcaccgacagcacagacagaatccctgctaccagtacgtcttcaaataccatctcagcaggctgggagccaaatgaagaaaatgaagatgaaagagacagacacctcagtttttctggatcaggcattgatgatgatgaagattttatctccagcaccatttcaaccacaccacgggcttttgaccacacaaaacagaaccaggactggacccagtggaacccaagccattcaaatccggaagtgctacttcagacaaccacaaggatgactgcagatgtagacagaaatggcaccactgcttatgaaggaaactggaacccagaagcacaccctcccctcattcaccatgagcatcatgaggaagaagagaccccacattctacaagcacaatccaggcaactcctagtagtacaacggaagaaacagctacccagaaggaacagtggtttggcaacagatggcatgagggatatcgccaaacacccagagaagactcccattcgacaacagggacagctgcagcctcagctcataccagccatccaatgcaaggaaggacaacaccaagcccagaggacagttcctggactgatttcttcaacccaatctcacaccccatgggacgaggtcatcaagcaggaagaaggatggatatggactccagtcatagtacaacgcttcagcctactgcaaatccaaacacaggtttggtggaagatttggacaggacaggacctctttcaatgacaacgcagcagagtaattctcagagcttctctacatcacatgaaggcttggaagaagataaagaccatccaacaacttctactctgacatcaagcaataggaatgatgtcacaggtggaagaagagacccaaatcattctgaaggctcaactactttactggaaggttatacctctcattacccacacacgaaggaaagcaggaccttcatcccagtgacctcagctaagactgggtcctttggagttactgcagttactgttggagattccaactctaatgtcaatcgttccttatcaggagaccaagacacattccaccccagtggggggtcccataccactcatggatctgaatcagatggacactcacatgggagtcaagaaggtggagcaaacacaacctctggtcctataaggacaccccaaattccagaatggctgatcatcttggcatccctcttggccttggctttgattcttgcagtttgcattgcagtcaacagtcgaagaaggtgtgggcagaagaaaaagctagtgatcaacagtggcaatggagctgtggaggacagaaagccaagtggactcaacggagaggccagcaagtctcaggaaatggtgcatttggtgaacaaggagtcgtcagaaactccagaccagtttatgacagctgatgagacaaggaacctgcagaatgtggacatgaagattggggtgtaacacctacaccattatcttggaaagaaacaaccgttggaaacataaccattacagggagctgggacacttaacagatgcaatgtgctactgattgtttcattgcgaatcttttttagcataaaattttctactctttttgttttttgtgttttgttctttaaagtcaggtccaatttgtaaaaacagcattgctttctgaaattagggcccaattaataatcagcaagaatttgatcgttccagttcccacttggaggcctttcatccctcgggtgtgctatggatggcttctaacaaaaactacacatatgtattcctgatcgccaacctttcccccaccagctaaggacatttcccagggttaatagggcctggtccctgggaggaaatttgaatgggtccattttgcccttccatagcctaatccctgggcattgctttccactgaggttgggggttggggtgtactagttacacatcttcaacagaccccctctagaaatttttcagatgcttctgggagacacccaaagggtgaagctatttatctgtagtaaactatttatctgtgtttttgaaatattaaaccctggatcagtcctttgatcagtataattttttaaagttactttgtcagaggcacaaaagggtttaaactgattcataataaatatctgtacttcttcgatcttcaccttttgtgctgtgattcttcagtttctaaaccagcactgtctgggtccctacaatgtatcaggaagagctgagaatggtaaggagactcttctaagtcttcatctcagagaccctgagttcccactcagacccactcagccaaatctcatggaagaccaaggagggcagcactgtttttgttttttgttttttgtttttttttttttgacactgtccaaaggttttccatcctgtcctggaatcagagttggaagctgaggagcttcagcctcttttatggtttaatggccacctgttctctcctgtgaaaggctttgcaaagtcacattaagtttgcatgacctgttatccctggggccctatttcatagaggctggccctattagtgatttccaaaaacaatatggaagtgccttttgatgtcttacaataagagaagaagccaatggaaatgaaagagattggcaaaggggaaggatgatgccatgtagatcctgtttgacatttttatggctgtatttgtaaacttaaacacaccagtgtctgttcttgatgcagttgctatttaggatgagttaagtgcctggggagtccctcaaaaggttaaagggattcccatcattggaatcttatcaccagataggcaagtttatgaccaaacaagagagtactggctttatcctctaacctcatattttctcccacttggcaagtcctttgtggcatttattcatcagtcagggtgtccgattggtcctagaacttccaaaggctgcttgtcatagaagccattgcatctataaagcaacggctcctgttaaatggtatctcctttctgaggctcctactaaaagtcatttgttacctaaacttatgtgcttaacaggcaatgcttctcagaccacaaagcagaaagaagaagaaaagctcctgactaaatcagggctgggcttagacagagttgatctgtagaatatctttaaaggagagatgtcaactttctgcactattcccagcctctgctcctccctgtctaccctctcccctccctctctccctccacttcaccccacaatcttgaaaaacttcctttctcttctgtgaacatcattggccagatccattttcagtggtctggatttctttttattttcttttcaacttgaaagaaactggacattaggccactatgtgttgttactgccactagtgttcaagtgcctcttgttttcccagagatttcctgggtctgccagaggcccagacaggctcactcaagctctttaactgaaaagcaacaagccactccaggacaaggttcaaaatggttacaacagcctctacctgtcgccccagggagaaaggggtagtgatacaagtctcatagccagagatggttttccactccttctagatattcccaaaaagaggctgagacaggaggttattttcaattttattttggaattaaatacttttttccctttattactgttgtagtccctcacttggatatacctctgttttcacgatagaaataagggaggtctagagcttctattccttggccattgtcaacggagagctggccaagtcttcacaaacccttgcaacattgcctgaagtttatggaataagatgtattctcactcccttgatctcaagggcgtaactctggaagcacagcttgactacacgtcatttttaccaatgattttcaggtgacctgggctaagtcatttaaactgggtctttataaaagtaaaaggccaacatttaattattttgcaaagcaacctaagagctaaagatgtaatttttcttgcaattgtaaatcttttgtgtctcctgaagacttcccttaaaattagctctgagtgaaaaatcaaaagagacaaaagacatcttcgaatccatatttcaagcctggtagaattggcttttctagcagaacctttccaaaagttttatattgagattcataacaacaccaagaattgattttgtagccaacattcattcaatactgttatatcagaggagtaggagagaggaaacatttgacttatctggaaaagcaaaatgtacttaagaataagaataacatggtccattcacctttatgttatagatatgtctttgtgtaaatcatttgttttgagttttcaaagaatagcccattgttcattcttgtgctgtacaatgaccactgttattgttactttgacttttcagagcacacccttcctctggtttttgtatatttattgatggatcaataataatgaggaaagcatgatatgtatattgctgagttgaaagcacttattggaaaatattaaaaggctaacattaaaagactaaaggaaacaaaaaaaaaaaaaaaaaaaaaaaaaaaaaaaaaaaaaaaaaaaaaaaaaaacttagtcattgtggaagtatggcatgggtcaagaagtacttctccttcatcttcctttgatgtcggtaactcatcctttctgcactgcgggagttgttaatgcttttgggtcctccagttcacatgctgattgctaagaagaaaatgagcatgagtgaacccaaagctgctgaaacattctgcgtttatgcaacttccttgccctctatacaaggaagatggtttcattgtcttgtctagagaataaagtcttttttaaaaataaaatcggtgtatccctgaccagcgtccattaacacttgacattgctcactgcatggtcacag

SEQ ID NO: 405805 - DNA, 5376 bp, Homo sapiens
ggttttttgtgtgttgtttgtgtgccggactgatgtccaaagttccgccaggagggctttattgttgtcgttgttcaacatcctgttctgcggcttcctggctctttttgcccgttatgccgaagagccgggcgttggcacggccaatacggagactagcgaaggctttgaaattcttctcttcctcagtgatgactcgagctttctccttctatagacgttccggacgggcatgaccggtccggtcagctgggtggccagtttcagttcttcagcagaactgtctcccttcttgggggccgagggcttcctggggaagaggatgagtttggagcggtactccttcagccgctgcacgttggcctgcagggactccgtggacttgttccgcctcctcggatccacagaaatgccgatggtccgggccaccttcttgtgaatgtatgggttcatagaagggcacgtggtgattccccggatccaccccaactccatctgtgcagcaaacaacacaggggtgtacatcctcacatccaacacctcccagtatgacacatattgcttcaatgcttcagctccacctgaagaagattgtacatcagtcacagacctgcccaatgcctttgatggaccaattaccataactattgttaaccgtgatggcacccgctatgtccagaaaggagaatacagaacgaatcctgaagacatctaccccagcaaccctactgatgatgacgtgagcagcggctcctccagtgaaaggagcagcacttcaggaggttacatcttttacaccttttctactgtacaccccatcccagacgaagacagtccctggatcaccgacagcacagacagaatccctgctaccagtacgtcttcaaataccatctcagcaggctgggagccaaatgaagaaaatgaagatgaaagagacagacacctcagtttttctggatcaggcattgatgatgatgaagattttatctccagcaccatttcaaccacaccacgggcttttgaccacacaaaacagaaccaggactggacccagtggaacccaagccattcaaatccggaagtgctacttcagacaaccacaaggatgactgcagatgtagacagaaatggcaccactgcttatgaaggaaactggaacccagaagcacaccctcccctcattcaccatgagcatcatgaggaagaagagaccccacattctacaagcacaatccaggcaactcctagtagtacaacggaagaaacagctacccagaaggaacagtggtttggcaacagatggcatgagggatatcgccaaacacccagagaagactcccattcgacaacagggacagctgcagcctcagctcataccagccatccaatgcaaggaaggacaacaccaagcccagaggacagttcctggactgatttcttcaacccaatctcacaccccatgggacgaggtcatcaagcaggaagaaggatggatatggactccagtcatagtacaacgcttcagcctactgcaaatccaaacacaggtttggtggaagatttggacaggacaggacctctttcaatgacaacgcagcagagtaattctcagagcttctctacatcacatgaaggcttggaagaagataaagaccatccaacaacttctactctgacatcaagcaataggaatgatgtcacaggtggaagaagagacccaaatcattctgaaggctcaactactttactggaaggttatacctctcattacccacacacgaaggaaagcaggaccttcatcccagtgacctcagctaagactgggtcctttggagttactgcagttactgttggagattccaactctaatgtcaatcgttccttatcaggagaccaagacacattccaccccagtggggggtcccataccactcatggatctgaatcagatggacactcacatgggagtcaagaaggtggagcaaacacaacctctggtcctataaggacaccccaaattccagaatggctgatcatcttggcatccctcttggccttggctttgattcttgcagtttgcattgcagtcaacagtcgaagaaggtgtgggcagaagaaaaagctagtgatcaacagtggcaatggagctgtggaggacagaaagccaagtggactcaacggagaggccagcaagtctcaggaaatggtgcatttggtgaacaaggagtcgtcagaaactccagaccagtttatgacagctgatgagacaaggaacctgcagaatgtggacatgaagattggggtgtaacacctacaccattatcttggaaagaaacaaccgttggaaacataaccattacagggagctgggacacttaacagatgcaatgtgctactgattgtttcattgcgaatcttttttagcataaaattttctactctttttgttttttgtgttttgttctttaaagtcaggtccaatttgtaaaaacagcattgctttctgaaattagggcccaattaataatcagcaagaatttgatcgttccagttcccacttggaggcctttcatccctcgggtgtgctatggatggcttctaacaaaaactacacatatgtattcctgatcgccaacctttcccccaccagctaaggacatttcccagggttaatagggcctggtccctgggaggaaatttgaatgggtccattttgcccttccatagcctaatccctgggcattgctttccactgaggttgggggttggggtgtactagttacacatcttcaacagaccccctctagaaatttttcagatgcttctgggagacacccaaagggtgaagctatttatctgtagtaaactatttatctgtgtttttgaaatattaaaccctggatcagtcctttgatcagtataattttttaaagttactttgtcagaggcacaaaagggtttaaactgattcataataaatatctgtacttcttcgatcttcaccttttgtgctgtgattcttcagtttctaaaccagcactgtctgggtccctacaatgtatcaggaagagctgagaatggtaaggagactcttctaagtcttcatctcagagaccctgagttcccactcagacccactcagccaaatctcatggaagaccaaggagggcagcactgtttttgttttttgttttttgtttttttttttttgacactgtccaaaggttttccatcctgtcctggaatcagagttggaagctgaggagcttcagcctcttttatggtttaatggccacctgttctctcctgtgaaaggctttgcaaagtcacattaagtttgcatgacctgttatccctggggccctatttcatagaggctggccctattagtgatttccaaaaacaatatggaagtgccttttgatgtcttacaataagagaagaagccaatggaaatgaaagagattggcaaaggggaaggatgatgccatgtagatcctgtttgacatttttatggctgtatttgtaaacttaaacacaccagtgtctgttcttgatgcagttgctatttaggatgagttaagtgcctggggagtccctcaaaaggttaaagggattcccatcattggaatcttatcaccagataggcaagtttatgaccaaacaagagagtactggctttatcctctaacctcatattttctcccacttggcaagtcctttgtggcatttattcatcagtcagggtgtccgattggtcctagaacttccaaaggctgcttgtcatagaagccattgcatctataaagcaacggctcctgttaaatggtatctcctttctgaggctcctactaaaagtcatttgttacctaaacttatgtgcttaacaggcaatgcttctcagaccacaaagcagaaagaagaagaaaagctcctgactaaatcagggctgggcttagacagagttgatctgtagaatatctttaaaggagagatgtcaactttctgcactattcccagcctctgctcctccctgtctaccctctcccctccctctctccctccacttcaccccacaatcttgaaaaacttcctttctcttctgtgaacatcattggccagatccattttcagtggtctggatttctttttattttcttttcaacttgaaagaaactggacattaggccactatgtgttgttactgccactagtgttcaagtgcctcttgttttcccagagatttcctgggtctgccagaggcccagacaggctcactcaagctctttaactgaaaagcaacaagccactccaggacaaggttcaaaatggttacaacagcctctacctgtcgccccagggagaaaggggtagtgatacaagtctcatagccagagatggttttccactccttctagatattcccaaaaagaggctgagacaggaggttattttcaattttattttggaattaaatacttttttccctttattactgttgtagtccctcacttggatatacctctgttttcacgatagaaataagggaggtctagagcttctattccttggccattgtcaacggagagctggccaagtcttcacaaacccttgcaacattgcctgaagtttatggaataagatgtattctcactcccttgatctcaagggcgtaactctggaagcacagcttgactacacgtcatttttaccaatgattttcaggtgacctgggctaagtcatttaaactgggtctttataaaagtaaaaggccaacatttaattattttgcaaagcaacctaagagctaaagatgtaatttttcttgcaattgtaaatcttttgtgtctcctgaagacttcccttaaaattagctctgagtgaaaaatcaaaagagacaaaagacatcttcgaatccatatttcaagcctggtagaattggcttttctagcagaacctttccaaaagttttatattgagattcataacaacaccaagaattgattttgtagccaacattcattcaatactgttatatcagaggagtaggagagaggaaacatttgacttatctggaaaagcaaaatgtacttaagaataagaataacatggtccattcacctttatgttatagatatgtctttgtgtaaatcatttgttttgagttttcaaagaatagcccattgttagcgcgtgctgtccggacagcacgcgctaacaaatggtcagtagatgctggacacaatcattagggaagtgtaaatcaaaactactatgagctcgggtgtagtggctcatgcttgtaatcccgtactttaggaggctgtggtagctggactcaccttgaggtcccggagctcagaacagcctgt

SEQ ID NO: 405806 - DNA, 5325 bp, Homo sapiens
ggttttttgtgtgttgtttgtgtgccggactgatgtccaaagttccgccaggagggctttattgttgtcgttgttcaacatcctgttctgcggcttcctggctctttttgcccgttatgccgaagagccgggcgttggcacggccaatacggagactagcgaaggctttgaaattcttctcttcctcagtgatgactcgagctttctccttctatagacgttccggacgggcatgaccggtccggtcagctgggtggccagtttcagttcttcagcagaactgtctcccttcttgggggccgagggcttcctggggaagaggatgagtttggagcggtactccttcagccgctgcacgttggcctgcagggactccgtggacttgttccgcctcctcggatccacagaaatgccgatggtccgggccaccttcttgtgaatgtatgggttcatagaagggcacgtggtgattccccggatccaccccaactccatctgtgcagcaaacaacacaggggtgtacatcctcacatccaacacctcccagtatgacacatattgcttcaatgcttcagctccacctgaagaagattgtacatcagtcacagacctgcccaatgcctttgatggaccaattaccataactattgttaaccgtgatggcacccgctatgtccagaaaggagaatacagaacgaatcctgaagacatctaccccagcaaccctactgatgatgacgtgagcagcggctcctccagtgaaaggagcagcacttcaggaggttacatcttttacaccttttctactgtacaccccatcccagacgaagacagtccctggatcaccgacagcacagacagaatccctgctaccagtacgtcttcaaataccatctcagcaggctgggagccaaatgaagaaaatgaagatgaaagagacagacacctcagtttttctggatcaggcattgatgatgatgaagattttatctccagcaccatttcaaccacaccacgggcttttgaccacacaaaacagaaccaggactggacccagtggaacccaagccattcaaatccggaagtgctacttcagacaaccacaaggatgactgcagatgtagacagaaatggcaccactgcttatgaaggaaactggaacccagaagcacaccctcccctcattcaccatgagcatcatgaggaagaagagaccccacattctacaagcacaatccaggcaactcctagtagtacaacggaagaaacagctacccagaaggaacagtggtttggcaacagatggcatgagggatatcgccaaacacccagagaagactcccattcgacaacagggacagctgcagcctcagctcataccagccatccaatgcaaggaaggacaacaccaagcccagaggacagttcctggactgatttcttcaacccaatctcacaccccatgggacgaggtcatcaagcaggaagaaggatggatatggactccagtcatagtacaacgcttcagcctactgcaaatccaaacacaggtttggtggaagatttggacaggacaggacctctttcaatgacaacgcagcagagtaattctcagagcttctctacatcacatgaaggcttggaagaagataaagaccatccaacaacttctactctgacatcaagcaataggaatgatgtcacaggtggaagaagagacccaaatcattctgaaggctcaactactttactggaaggttatacctctcattacccacacacgaaggaaagcaggaccttcatcccagtgacctcagctaagactgggtcctttggagttactgcagttactgttggagattccaactctaatgtcaatcgttccttatcaggagaccaagacacattccaccccagtggggggtcccataccactcatggatctgaatcagatggacactcacatgggagtcaagaaggtggagcaaacacaacctctggtcctataaggacaccccaaattccagaatggctgatcatcttggcatccctcttggccttggctttgattcttgcagtttgcattgcagtcaacagtcgaagaaggtgtgggcagaagaaaaagctagtgatcaacagtggcaatggagctgtggaggacagaaagccaagtggactcaacggagaggccagcaagtctcaggaaatggtgcatttggtgaacaaggagtcgtcagaaactccagaccagtttatgacagctgatgagacaaggaacctgcagaatgtggacatgaagattggggtgtaacacctacaccattatcttggaaagaaacaaccgttggaaacataaccattacagggagctgggacacttaacagatgcaatgtgctactgattgtttcattgcgaatcttttttagcataaaattttctactctttttgttttttgtgttttgttctttaaagtcaggtccaatttgtaaaaacagcattgctttctgaaattagggcccaattaataatcagcaagaatttgatcgttccagttcccacttggaggcctttcatccctcgggtgtgctatggatggcttctaacaatttcccagggttaatagggcctggtccctgggaggaaatttgaatgggtccattttgcccttccatagcctaatccctgggcattgctttccactgaggttgggggttggggtgtactagttacacatcttcaacagaccccctctagaaatttttcagatgcttctgggagacacccaaagggtgaagctatttatctgtagtaaactatttatctgtgtttttgaaatattaaaccctggatcagtcctttgatcagtataattttttaaagttactttgtcagaggcacaaaagggtttaaactgattcataataaatatctgtacttcttcgatcttcaccttttgtgctgtgattcttcagtttctaaaccagcactgtctgggtccctacaatgtatcaggaagagctgagaatggtaaggagactcttctaagtcttcatctcagagaccctgagttcccactcagacccactcagccaaatctcatggaagaccaaggagggcagcactgtttttgttttttgttttttgtttttttttttttgacactgtccaaaggttttccatcctgtcctggaatcagagttggaagctgaggagcttcagcctcttttatggtttaatggccacctgttctctcctgtgaaaggctttgcaaagtcacattaagtttgcatgacctgttatccctggggccctatttcatagaggctggccctattagtgatttccaaaaacaatatggaagtgccttttgatgtcttacaataagagaagaagccaatggaaatgaaagagattggcaaaggggaaggatgatgccatgtagatcctgtttgacatttttatggctgtatttgtaaacttaaacacaccagtgtctgttcttgatgcagttgctatttaggatgagttaagtgcctggggagtccctcaaaaggttaaagggattcccatcattggaatcttatcaccagataggcaagtttatgaccaaacaagagagtactggctttatcctctaacctcatattttctcccacttggcaagtcctttgtggcatttattcatcagtcagggtgtccgattggtcctagaacttccaaaggctgcttgtcatagaagccattgcatctataaagcaacggctcctgttaaatggtatctcctttctgaggctcctactaaaagtcatttgttacctaaacttatgtgcttaacaggcaatgcttctcagaccacaaagcagaaagaagaagaaaagctcctgactaaatcagggctgggcttagacagagttgatctgtagaatatctttaaaggagagatgtcaactttctgcactattcccagcctctgctcctccctgtctaccctctcccctccctctctccctccacttcaccccacaatcttgaaaaacttcctttctcttctgtgaacatcattggccagatccattttcagtggtctggatttctttttattttcttttcaacttgaaagaaactggacattaggccactatgtgttgttactgccactagtgttcaagtgcctcttgttttcccagagatttcctgggtctgccagaggcccagacaggctcactcaagctctttaactgaaaagcaacaagccactccaggacaaggttcaaaatggttacaacagcctctacctgtcgccccagggagaaaggggtagtgatacaagtctcatagccagagatggttttccactccttctagatattcccaaaaagaggctgagacaggaggttattttcaattttattttggaattaaatacttttttccctttattactgttgtagtccctcacttggatatacctctgttttcacgatagaaataagggaggtctagagcttctattccttggccattgtcaacggagagctggccaagtcttcacaaacccttgcaacattgcctgaagtttatggaataagatgtattctcactcccttgatctcaagggcgtaactctggaagcacagcttgactacacgtcatttttaccaatgattttcaggtgacctgggctaagtcatttaaactgggtctttataaaagtaaaaggccaacatttaattattttgcaaagcaacctaagagctaaagatgtaatttttcttgcaattgtaaatcttttgtgtctcctgaagacttcccttaaaattagctctgagtgaaaaatcaaaagagacaaaagacatcttcgaatccatatttcaagcctggtagaattggcttttctagcagaacctttccaaaagttttatattgagattcataacaacaccaagaattgattttgtagccaacattcattcaatactgttatatcagaggagtaggagagaggaaacatttgacttatctggaaaagcaaaatgtacttaagaataagaataacatggtccattcacctttatgttatagatatgtctttgtgtaaatcatttgttttgagttttcaaagaatagcccattgttcattcttgtgctgtacaatgaccactgttattgttactttgacttttcagagcacacccttcctctggtttttgtatatttattgatggatcaataataatgaggaaagcatgatatgtatattgctgagttgaaagcacttattggaaaatattaaaaggctaacattaaaagactaaaggaaaca

SEQ ID NO: 405807 - DNA, 3247 bp, Homo sapiens
ccattcgagagttccccgggtgggagtacggaatgcacagtggactcaacggagaggccagcaagtctcaggaaatggtgcatttggtgaacaaggagtcgtcagaaactccagaccagtttatgacagctgatgagacaaggaacctgcagaatgtggacatgaagattggggtgtaacacctacaccattatcttggaaagaaacaaccgttggaaacataaccattacagggagctgggacacttaacagatgcaatgtgctactgattgtttcattgcgaatcttttttagcataaaattttctactctttttgttttttgtgttttgttctttaaagtcaggtccaatttgtaaaaacagcattgctttctgaaattagggcccaattaataatcagcaagaatttgatcgttccagttcccacttggaggcctttcatccctcgggtgtgctatggatggcttctaacaaaaactacacatatgtattcctgatcgccaacctttcccccaccagctaaggacatttcccagggttaatagggcctggtccctgggaggaaatttgaatgggtccattttgcccttccatagcctaatccctgggcattgctttccactgaggttgggggttggggtgtactagttacacatcttcaacagaccccctctagaaatttttcagatgcttctgggagacacccaaagggtgaagctatttatctgtagtaaactatttatctgtgtttttgaaatattaaaccctggatcagtcctttgatcagtataattttttaaagttactttgtcagaggcacaaaagggtttaaactgattcataataaatatctgtacttcttcgatcttcaccttttgtgctgtgattcttcagtttctaaaccagcactgtctgggtccctacaatgtatcaggaagagctgagaatggtaaggagactcttctaagtcttcatctcagagaccctgagttcccactcagacccactcagccaaatctcatggaagaccaaggagggcagcactgtttttgttttttgttttttgtttttttttttttgacactgtccaaaggttttccatcctgtcctggaatcagagttggaagctgaggagcttcagcctcttttatggtttaatggccacctgttctctcctgtgaaaggctttgcaaagtcacattaagtttgcatgacctgttatccctggggccctatttcatagaggctggccctattagtgatttccaaaaacaatatggaagtgccttttgatgtcttacaataagagaagaagccaatggaaatgaaagagattggcaaaggggaaggatgatgccatgtagatcctgtttgacatttttatggctgtatttgtaaacttaaacacaccagtgtctgttcttgatgcagttgctatttaggatgagttaagtgcctggggagtccctcaaaaggttaaagggattcccatcattggaatcttatcaccagataggcaagtttatgaccaaacaagagagtactggctttatcctctaacctcatattttctcccacttggcaagtcctttgtggcatttattcatcagtcagggtgtccgattggtcctagaacttccaaaggctgcttgtcatagaagccattgcatctataaagcaacggctcctgttaaatggtatctcctttctgaggctcctactaaaagtcatttgttacctaaacttatgtgcttaacaggcaatgcttctcagaccacaaagcagaaagaagaagaaaagctcctgactaaatcagggctgggcttagacagagttgatctgtagaatatctttaaaggagagatgtcaactttctgcactattcccagcctctgctcctccctgtctaccctctcccctccctctctccctccacttcaccccacaatcttgaaaaacttcctttctcttctgtgaacatcattggccagatccattttcagtggtctggatttctttttattttcttttcaacttgaaagaaactggacattaggccactatgtgttgttactgccactagtgttcaagtgcctcttgttttcccagagatttcctgggtctgccagaggcccagacaggctcactcaagctctttaactgaaaagcaacaagccactccaggacaaggttcaaaatggttacaacagcctctacctgtcgccccagggagaaaggggtagtgatacaagtctcatagccagagatggttttccactccttctagatattcccaaaaagaggctgagacaggaggttattttcaattttattttggaattaaatacttttttccctttattactgttgtagtccctcacttggatatacctctgttttcacgatagaaataagggaggtctagagcttctattccttggccattgtcaacggagagctggccaagtcttcacaaacccttgcaacattgcctgaagtttatggaataagatgtattctcactcccttgatctcaagggcgtaactctggaagcacagcttgactacacgtcatttttaccaatgattttcaggtgacctgggctaagtcatttaaactgggtctttataaaagtaaaaggccaacatttaattattttgcaaagcaacctaagagctaaagatgtaatttttcttgcaattgtaaatcttttgtgtctcctgaagacttcccttaaaattagctctgagtgaaaaatcaaaagagacaaaagacatcttcgaatccatatttcaagcctggtagaattggcttttctagcagaacctttccaaaagttttatattgagattcataacaacaccaagaattgattttgtagccaacattcattcaatactgttatatcagaggagtaggagagaggaaacatttgacttatctggaaaagcaaaatgtacttaagaataagaataacatggtccattcacctttatgttatagatatgtctttgtgtaaatcatttgttttgagttttcaaagaatagcccattgttcattcttgtgctgtacaatgaccactgttattgttactttgacttttcagagcacacccttcctctggtttttgtatatttattgatggatcaataataatgaggaaagcatgatatgtatattgctgagttgaaagcacttattggaaaatattaaaaggctaacattaaaagactaaaggaaaca

SEQ ID NO: 405808 - DNA, 3714 bp, Homo sapiens
ggttttttgtgtgttgtttgtgtgccggactgatgtccaaagttccgccaggagggctttattgttgtcgttgttcaacatcctgttctgcggcttcctggctctttttgcccgttatgccgaagagccgggcgttggcacggccaatacggagactagcgaaggctttgaaattcttctcttcctcagtgatgactcgagctttctccttctatagacgttccggacgggcatgaccggtccggtcagctgggtggccagtttcagttcttcagcagaactgtctcccttcttgggggccgagggcttcctggggaagaggatgagtttggagcggtactccttcagccgctgcacgttggcctgcagggactccgtggacttgttccgcctcctcggatccacagaaatgccgatggtccgggccaccttcttgtgaatgtatgggttcatagaagggcacgtggtgattccccggatccaccccaactccatctgtgcagcaaacaacacaggggtgtacatcctcacatccaacacctcccagtatgacacatattgcttcaatgcttcagctccacctgaagaagattgtacatcagtcacagacctgcccaatgcctttgatggaccaattaccataactattgttaaccgtgatggcacccgctatgtccagaaaggagaatacagaacgaatcctgaagacatctaccccagcaaccctactgatgatgacgtgagcagcggctcctccagtgaaaggagcagcacttcaggaggttacatcttttacaccttttctactgtacaccccatcccagacgaagacagtccctggatcaccgacagcacagacagaatccctgctaccagtacgtcttcaaataccatctcagcaggctgggagccaaatgaagaaaatgaagatgaaagagacagacacctcagtttttctggatcaggcattgatgatgatgaagattttatctccagcaccatttcaaccacaccacgggcttttgaccacacaaaacagaaccaggactggacccagtggaacccaagccattcaaatccggaagtgctacttcagacaaccacaaggatgactgcagatgtagacagaaatggcaccactgcttatgaaggaaactggaacccagaagcacaccctcccctcattcaccatgagcatcatgaggaagaagagaccccacattctacaagcacaatccaggcaactcctagtagtacaacggaagaaacagctacccagaaggaacagtggtttggcaacagatggcatgagggatatcgccaaacacccagagaagactcccattcgacaacagggacagctgcagcctcagctcataccagccatccaatgcaaggaaggacaacaccaagcccagaggacagttcctggactgatttcttcaacccaatctcacaccccatgggacgaggtcatcaagcaggaagaaggatggatatggactccagtcatagtacaacgcttcagcctactgcaaatccaaacacaggtttggtggaagatttggacaggacaggacctctttcaatgacaacgcagcagagtaattctcagagcttctctacatcacatgaaggcttggaagaagataaagaccatccaacaacttctactctgacatcaagcaataggaatgatgtcacaggtggaagaagagacccaaatcattctgaaggctcaactactttactggaaggttatacctctcattacccacacacgaaggaaagcaggaccttcatcccagtgacctcagctaagactgggtcctttggagttactgcagttactgttggagattccaactctaatgtcaatcgttccttatcaggagaccaagacacattccaccccagtggggggtcccataccactcatggatctgaatcagatggacactcacatgggagtcaagaaggtggagcaaacacaacctctggtcctataaggacaccccaaattccagaatggctgatcatcttggcatccctcttggccttggctttgattcttgcagtttgcattgcagtcaacagtcgaagaaggtgtgggcagaagaaaaagctagtgatcaacagtggcaatggagctgtggaggacagaaagccaagtggactcaacggagaggccagcaagtctcaggaaatggtgcatttggtgaacaaggagtcgtcagaaactccagaccagtttatgacagctgatgagacaaggaacctgcagaatgtggacatgaagattggggtgtaacacctacaccattatcttggaaagaaacaaccgttggaaacataaccattacagggagctgggacacttaacagatgcaatgtgctactgattgtttcattgcgaatcttttttagcataaaattttctactctttttgttttttgtgttttgttctttaaagtcaggtccaatttgtaaaaacagcattgctttctgaaattagggcccaattaataatcagcaagaatttgatcgttccagttcccacttggaggcctttcatccctcgggtgtgctatggatggcttctaacaaaaactacacatatgtattcctgatcgccaacctttcccccaccagctaaggacatttcccagggttaatagggcctggtccctgggaggaaatttgaatgggtccattttgcccttccatagcctaatccctgggcattgctttccactgaggttgggggttggggtgtactagttacacatcttcaacagaccccctctagaaatttttcagatgcttctgggagacacccaaagggtgaagctatttatctgtagtaaactatttatctgtgtttttgaaatattaaaccctggatcagtcctttgatcagtataattttttaaagttactttgtcagaggcacaaaagggtttaaactgattcataataaatatctgtacttcttcgatcttcaccttttgtgctgtgattcttcagtttctaaaccagcactgtctgggtccctacaatgtatcaggaagagctgagaatggtaaggagactcttctaagtcttcatctcagagaccctgagttcccactcagacccactcagccaaatctcatggaagaccaaggagggcagcactgtttttgttttttgttttttgtttttttttttttgacactgtccaaaggttttccatcctgtcctggaatcagagttggaagctgaggagcttcagcctcttttatggtttaatggccacctgttctctcctgtgaaaggctttgcaaagtcacattaagtttgcatgacctgttatccctggggccctatttcatagaggctggccctattagtgatttccaaaaacaatatggaagtgccttttgatgtcttacaataagaataacatggtccattcacctttatgttatagatatgtctttgtgtaaatcatttgttttgagttttcaaagaatagcccattgttcattcttgtgctgtacaatgaccactgttattgttactttgacttttcagagcacacccttcctctggtttttgtatatttattgatggatcaataataatgaggaaagcatgatatgtatattgctgagttgaaagcacttattggaaaatattaaaaggctaacattaaaagactaaaggaaaca

SEQ ID NO: 405809 - DNA, 1072 bp, Homo sapiens
gttgcttttcagttaaagagcttgagtgagcctgtctgggcctctggcagacccagggagaaaggggtagtgatacaagtctcatagccagagatggttttccactccttctagatattcccaaaaagaggctgagacaggaggttattttcaattttattttggaattaaatacttttttccctttattactgttgtagtccctcacttggatatacctctgttttcacgatagaaataagggaggtctagagcttctattccttggccattgtcaacggagagctggccaagtcttcacaaacccttgcaacattgcctgaagtttatggaataagatgtattctcactcccttgatctcaagggcgtaactctggaagcacagcttgactacacgtcatttttaccaatgattttcaggtgacctgggctaagtcatttaaactgggtctttataaaagtaaaaggccaacatttaattattttgcaaagcaacctaagagctaaagatgtaatttttcttgcaattgtaaatcttttgtgtctcctgaagacttcccttaaaattagctctgagtgaaaaatcaaaagagacaaaagacatcttcgaatccatatttcaagcctggtagaattggcttttctagcagaacctttccaaaagttttatattgagattcataacaacaccaagaattgattttgtagccaacattcattcaatactgttatatcagaggagtaggagagaggaaacatttgacttatctggaaaagcaaaatgtacttaagaataagaataacatggtccattcacctttatgttatagatatgtctttgtgtaaatcatttgttttgagttttcaaagaatagcccattgttcattcttgtgctgtacaatgaccactgttattgttactttgacttttcagagcacacccttcctctggtttttgtatatttattgatggatcaataataatgaggaaagcatgatatgtatattgctgagttgaaagcacttattggaaaatattaaaaggctaacattaaaagactaaaggaaaca

SEQ ID NO: 405810 - DNA, 2446 bp, Homo sapiens
ggttttttgtgtgttgtttgtgtgccggactgatgtccaaagttccgccaggagggctttattgttgtcgttgttcaacatcctgttctgcggcttcctggctctttttgcccgttatgccgaagagccgggcgttggcacggccaatacggagactagcgaaggctttgaaattcttctcttcctcagtgatgactcgagctttctccttctatagacgttccggacgggcatgaccggtccggtcagctgggtggccagtttcagttcttcagcagaactgtctcccttcttgggggccgagggcttcctggggaagaggatgagtttggagcggtactccttcagccgctgcacgttggcctgcagggactccgtggacttgttccgcctcctcggatccacagaaatgccgatggtccgggccaccttcttgtgaatgtatgggttcatagaagggcacgtggtgattccccggatccaccccaactccatctgtgcagcaaacaacacaggggtgtacatcctcacatccaacacctcccagtatgacacatattgcttcaatgcttcagctccacctgaagaagattgtacatcagtcacagacctgcccaatgcctttgatggaccaattaccataactattgttaaccgtgatggcacccgctatgtccagaaaggagaatacagaacgaatcctgaagacatctaccccagcaaccctactgatgatgacgtgagcagcggctcctccagtgaaaggagcagcacttcaggaggttacatcttttacaccttttctactgtacaccccatcccagacgaagacagtccctggatcaccgacagcacagacagaatccctgctaccagtacgtcttcaaataccatctcagcaggctgggagccaaatgaagaaaatgaagatgaaagagacagacacctcagtttttctggatcaggcattgatgatgatgaagattttatctccagcaccatttcaaccacaccacgggcttttgaccacacaaaacagaaccaggactggacccagtggaacccaagccattcaaatccggaagtgctacttcagacaaccacaaggatgactgcagatgtagacagaaatggcaccactgcttatgaaggaaactggaacccagaagcacaccctcccctcattcaccatgagcatcatgaggaagaagagaccccacattctacaagcacaatccaggcaactcctagtagtacaacggaagaaacagctacccagaaggaacagtggtttggcaacagatggcatgagggatatcgccaaacacccagagaagactcccattcgacaacagggacagctgcagcctcagctcataccagccatccaatgcaaggaaggacaacaccaagcccagaggacagttcctggactgatttcttcaacccaatctcacaccccatgggacgaggtcatcaagcaggaagaaggatggatatggactccagtcatagtacaacgcttcagcctactgcaaatccaaacacaggtttggtggaagatttggacaggacaggacctctttcaatgacaacgcagcagagtaattctcagagcttctctacatcacatgaaggcttggaagaagataaagaccatccaacaacttctactctgacatcaagcaataggaatgatgtcacaggtggaagaagagacccaaatcattctgaaggctcaactactttactggaaggttatacctctcattacccacacacgaaggaaagcaggaccttcatcccagtgacctcagctaagactgggtcctttggagttactgcagttactgttggagattccaactctaatgtcaatcgttccttatcaggagaccaagacacattccaccccagtggggggtcccataccactcatggatctgaatcagatggacactcacatgggagtcaagaaggtggagcaaacacaacctctggtcctataaggacaccccaaattccagaatggctgatcatcttggcatccctcttggccttggctttgattcttgcagtttgcattgcagtcaacagtcgaagaaggtgtgggcagaagaaaaagctagtgatcaacagtggcaatggagctgtggaggacagaaagccaagtggactcaacggagaggccagcaagtctcaggaaatggtgcatttggtgaacaaggagtcgtcagaaactccagaccagtttatgacagctgatgagacaaggaacctgcagaatgtggacatgaagattggggtgtaacacctacaccattatcttggaaagaaacaaccgttggaaacataaccattacagggagctgggacacttaacagatgcaatgtgctactgattgtttcattgcgaatcttttttagcataaaattttctactctt

SEQ ID NO: 405811 - DNA, 2722 bp, Homo sapiens
ggttttttgtgtgttgtttgtgtgccggactgatgtccaaagttccgccaggagggctttattgttgtcgttgttcaacatcctgttctgcggcttcctggctctttttgcccgttatgccgaagagccgggcgttggcacggccaatacggagactagcgaaggctttgaaattcttctcttcctcagtgatgactcgagctttctccttctatagacgttccggacgggcatgaccggtccggtcagctgggtggccagtttcagttcttcagcagaactgtctcccttcttgggggccgagggcttcctggggaagaggatgagtttggagcggtactccttcagccgctgcacgttggcctgcagggactccgtggacttgttccgcctcctcggatccacagaaatgccgatggtccgggccaccttcttgtgaatgtatgggttcatagaagggcacgtggtgattccccggatccaccccaactccatctgtgcagcaaacaacacaggggtgtacatcctcacatccaacacctcccagtatgacacatattgcttcaatgcttcagctccacctgaagaagattgtacatcagtcacagacctgcccaatgcctttgatggaccaattaccataactattgttaaccgtgatggcacccgctatgtccagaaaggagaatacagaacgaatcctgaagacatctaccccagcaaccctactgatgatgacgtgagcagcggctcctccagtgaaaggagcagcacttcaggaggttacatcttttacaccttttctactgtacaccccatcccagacgaagacagtccctggatcaccgacagcacagacagaatccctgctaccagtacgtcttcaaataccatctcagcaggctgggagccaaatgaagaaaatgaagatgaaagagacagacacctcagtttttctggatcaggcattgatgatgatgaagattttatctccagcaccatttcaaccacaccacgggcttttgaccacacaaaacagaaccaggactggacccagtggaacccaagccattcaaatccggaagtgctacttcagacaaccacaaggatgactgcagatgtagacagaaatggcaccactgcttatgaaggaaactggaacccagaagcacaccctcccctcattcaccatgagcatcatgaggaagaagagaccccacattctacaagcacaatccaggcaactcctagtagtacaacggaagaaacagctacccagaaggaacagtggtttggcaacagatggcatgagggatatcgccaaacacccagagaagactcccattcgacaacagggacagctgcagcctcagctcataccagccatccaatgcaaggaaggacaacaccaagcccagaggacagttcctggactgatttcttcaacccaatctcacaccccatgggacgaggtcatcaagcaggaagaaggatggatatggactccagtcatagtacaacgcttcagcctactgcaaatccaaacacaggtttggtggaagatttggacaggacaggacctctttcaatgacaacgcagcagagtaattctcagagcttctctacatcacatgaaggcttggaagaagataaagaccatccaacaacttctactctgacatcaagcaataggaatgatgtcacaggtggaagaagagacccaaatcattctgaaggctcaactactttactggaaggttatacctctcattacccacacacgaaggaaagcaggaccttcatcccagtgacctcagctaagactgggtcctttggagttactgcagttactgttggagattccaactctaatgtcaatcgttccttatcaggagaccaagacacattccaccccagtggggggtcccataccactcatggatctgaatcagatggacactcacatgggagtcaagaaggtggagcaaacacaacctctggtcctataaggacaccccaaattccagaatggctgatcatcttggcatccctcttggccttggctttgattcttgcagtttgcattgcagtcaacagtcgaagaaggtgtgggcagaagaaaaagctagtgatcaacagtggcaatggagctgtggaggacagaaagccaagtggactcaacggagaggccagcaagtctcaggaaatggtgcatttggtgaacaaggagtcgtcagaaactccagaccagtttatgacagctgatgagacaaggaacctgcagaatgtggacatgaagattggggtgtaacacctacaccattatcttggaaagaaacaaccgttggaaacataaccattacaggggagccggagcacactacaacgcatgccactgtggctaccgatagaccccctgcccacctcaccaacaccaatcacacaataccccaccccaaaacggaacaacgcagcacggccaccaaaagcagctcacctgacacacacacgcacggacaagtacggaacaaacacggcccacaataactcaccaaccaagaattgcaaccaccacgaacccactcaggaagcatcaacaccggaggcgcaagagcgggcctaaagaccacccaccatgttcccgcaagcaaagtcacaacaagaaggccacccacggaaacagacgccggagcaccaacgaggccccaccacagaaacccga

SEQ ID NO: 405812 - DNA, 2603 bp, Homo sapiens
  misc_feature (2439)..(2439): n is a, c, g, or t
  misc_feature (2461)..(2461): n is a, c, g, or t
  misc_feature (2464)..(2464): n is a, c, g, or t
  misc_feature (2504)..(2504): n is a, c, g, or t
ggttttttgtgtgttgtttgtgtgccggactgatgtccaaagttccgccaggagggctttattgttgtcgttgttcaacatcctgttctgcggcttcctggctctttttgcccgttatgccgaagagccgggcgttggcacggccaatacggagactagcgaaggctttgaaattcttctcttcctcagtgatgactcgagctttctccttctatagacgttccggacgggcatgaccggtccggtcagctgggtggccagtttcagttcttcagcagaactgtctcccttcttgggggccgagggcttcctggggaagaggatgagtttggagcggtactccttcagccgctgcacgttggcctgcagggactccgtggacttgttccgcctcctcggatccacagaaatgccgatggtccgggccaccttcttgtgaatgtatgggttcatagaagggcacgtggtgattccccggatccaccccaactccatctgtgcagcaaacaacacaggggtgtacatcctcacatccaacacctcccagtatgacacatattgcttcaatgcttcagctccacctgaagaagattgtacatcagtcacagacctgcccaatgcctttgatggaccaattaccataactattgttaaccgtgatggcacccgctatgtccagaaaggagaatacagaacgaatcctgaagacatctaccccagcaaccctactgatgatgacgtgagcagcggctcctccagtgaaaggagcagcacttcaggaggttacatcttttacaccttttctactgtacaccccatcccagacgaagacagtccctggatcaccgacagcacagacagaatccctgctaccagtacgtcttcaaataccatctcagcaggctgggagccaaatgaagaaaatgaagatgaaagagacagacacctcagtttttctggatcaggcattgatgatgatgaagattttatctccagcaccatttcaaccacaccacgggcttttgaccacacaaaacagaaccaggactggacccagtggaacccaagccattcaaatccggaagtgctacttcagacaaccacaaggatgactgcagatgtagacagaaatggcaccactgcttatgaaggaaactggaacccagaagcacaccctcccctcattcaccatgagcatcatgaggaagaagagaccccacattctacaagcacaatccaggcaactcctagtagtacaacggaagaaacagctacccagaaggaacagtggtttggcaacagatggcatgagggatatcgccaaacacccagagaagactcccattcgacaacagggacagctgcagcctcagctcataccagccatccaatgcaaggaaggacaacaccaagcccagaggacagttcctggactgatttcttcaacccaatctcacaccccatgggacgaggtcatcaagcaggaagaaggatggatatggactccagtcatagtacaacgcttcagcctactgcaaatccaaacacaggtttggtggaagatttggacaggacaggacctctttcaatgacaacgcagcagagtaattctcagagcttctctacatcacatgaaggcttggaagaagataaagaccatccaacaacttctactctgacatcaagcaataggaatgatgtcacaggtggaagaagagacccaaatcattctgaaggctcaactactttactggaaggttatacctctcattacccacacacgaaggaaagcaggaccttcatcccagtgacctcagctaagactgggtcctttggagttactgcagttactgttggagattccaactctaatgtcaatcgttccttatcaggagaccaagacacattccaccccagtggggggtcccataccactcatggatctgaatcagatggacactcacatgggagtcaagaaggtggagcaaacacaacctctggtcctataaggacaccccaaattccagaatggctgatcatcttggcatccctcttggccttggctttgattcttgcagtttgcattgcagtcaacagtcgaagaaggtgtgggcagaagaaaaagctagtgatcaacagtggcaatggagctgtggaggacagaaagccaagtggactcaacggagaggccagtaggactcactactggcctctctatcttttatacgtattctttctcaattttcctatcatgcaaaacagtaaaaaatctcaacacattcacacctgattctggttacccagtagtattacttgtgtgcaattaaacaagagaccaaaaccacagaacaagtgcacgtggtagggattacagggtagggaacagatataaaaacacagatgtgcagatttcaccagaaacctcaaggatccacatcncacgtctggggcagagggctantgnccaggttagtccgcttcacccatcactcctattcttgacnccaaagcaggccactgcttttactgttgacctgggtcctcaaatgagtgtgtgaaagtccataatgcatctggtgaaacagatgacgcacaacctacag

SEQ ID NO: 405813 - DNA, 3049 bp, Homo sapiens
  misc_feature (2229)..(2229): n is a, c, g, or t
  misc_feature (2243)..(2243): n is a, c, g, or t
ggttttttgtgtgttgtttgtgtgccggactgatgtccaaagttccgccaggagggctttattgttgtcgttgttcaacatcctgttctgcggcttcctggctctttttgcccgttatgccgaagagccgggcgttggcacggccaatacggagactagcgaaggctttgaaattcttctcttcctcagtgatgactcgagctttctccttctatagacgttccggacgggcatgaccggtccggtcagctgggtggccagtttcagttcttcagcagaactgtctcccttcttgggggccgagggcttcctggggaagaggatgagtttggagcggtactccttcagccgctgcacgttggcctgcagggactccgtggacttgttccgcctcctcggatccacagaaatgccgatggtccgggccaccttcttgtgaatgtatgggttcatagaagggcacgtggtgattccccggatccaccccaactccatctgtgcagcaaacaacacaggggtgtacatcctcacatccaacacctcccagtatgacacatattgcttcaatgcttcagctccacctgaagaagattgtacatcagtcacagacctgcccaatgcctttgatggaccaattaccataactattgttaaccgtgatggcacccgctatgtccagaaaggagaatacagaacgaatcctgaagacatctaccccagcaaccctactgatgatgacgtgagcagcggctcctccagtgaaaggagcagcacttcaggaggttacatcttttacaccttttctactgtacaccccatcccagacgaagacagtccctggatcaccgacagcacagacagaatccctgctaccagtacgtcttcaaataccatctcagcaggctgggagccaaatgaagaaaatgaagatgaaagagacagacacctcagtttttctggatcaggcattgatgatgatgaagattttatctccagcaccatttcaaccacaccacgggcttttgaccacacaaaacagaaccaggactggacccagtggaacccaagccattcaaatccggaagtgctacttcagacaaccacaaggatgactgcagatgtagacagaaatggcaccactgcttatgaaggaaactggaacccagaagcacaccctcccctcattcaccatgagcatcatgaggaagaagagaccccacattctacaagcacaatccaggcaactcctagtagtacaacggaagaaacagctacccagaaggaacagtggtttggcaacagatggcatgagggatatcgccaaacacccagagaagactcccattcgacaacagggacagctgcagcctcagctcataccagccatccaatgcaaggaaggacaacaccaagcccagaggacagttcctggactgatttcttcaacccaatctcacaccccatgggacgaggtcatcaagcaggaagaaggatggatatggactccagtcatagtacaacgcttcagcctactgcaaatccaaacacaggtttggtggaagatttggacaggacaggacctctttcaatgacaacgcagcagagtaattctcagagcttctctacatcacatgaaggcttggaagaagataaagaccatccaacaacttctactctgacatcaagcaataggaatgatgtcacaggtggaagaagagacccaaatcattctgaaggctcaactactttactggaaggttatacctctcattacccacacacgaaggaaagcaggaccttcatcccagtgacctcagctaagactgggtcctttggagttactgcagttactgttggagattccaactctaatgtcaatcgttccttatcaggagaccaagacacattccaccccagtggggggtcccataccactcatggatctgaatcagatggacactcacatgggagtcaagaaggtggagcaaacacaacctctggtcctataaggacaccccaaattccagaatggctgatcatcttggcatccctcttggccttggctttgattcttgcagtttgcattgcagtcaacagtcgaagaagttgaagagattcaggttatagcataagaagagcactgtttcatcgtcttcttgctgttaggaggtctatgaagcagagaagaactttcctttggaaaacaactaaatgaagacagtcacctcnctagaactgacacntgggctgtttttatattcttgaaggccactctctccctacctgaaccaagacctataggtttacatgttatttacattttatatataatatatatatatatatatacacatacattatatatacacaatagtaattctagcaacagaggaaatgacctttaacaggggtataaatctaaatttataaaagtataaatctaaatttcttacccaagacacttaagatacattattttctccaggacgtaattcataggaatattaagccttttgtaaatgtccctttagatggtttctcataaggtaaaagaaacttatttccaagcaggaccacctttattgtgtccccagatcacctcacagggcagaaaaatgcccctcagtctgggagaagacctagagagaattatggactccttactggtttttggaaagcaaccaacagctaattccaacaccatgggcagcccatacagtctctaattatctgagaaaatcaaatgatgctgttacaataattacgctggtacaagttaataaaagtgccatgttacagtcaaacagctatgttgctatctataccattgagggcatagttttaaaaagtagttatgctacctgattgtataaggaacaaaactgagagaaaaaatctaaaaggccgcctatgattgaatggaaagattttttttagttgaatttaaataatgtgacttgggggagcctttacaaagagtctttatacctcccttcagcttcctcattttcccttggattacttttgctcaattaaatatgaatttcct

SEQ ID NO: 405814 - DNA, 2129 bp, Homo sapiens
ggttttttgtgtgttgtttgtgtgccggactgatgtccaaagttccgccaggagggctttattgttgtcgttgttcaacatcctgttctgcggcttcctggctctttttgcccgttatgccgaagagccgggcgttggcacggccaatacggagactagcgaaggctttgaaattcttctcttcctcagtgatgactcgagctttctccttctatagacgttccggacgggcatgaccggtccggtcagctgggtggccagtttcagttcttcagcagaactgtctcccttcttgggggccgagggcttcctggggaagaggatgagtttggagcggtactccttcagccgctgcacgttggcctgcagggactccgtggacttgttccgcctcctcggatccacagaaatgccgatggtccgggccaccttcttgtgaatgtatgggttcatagaagggcacgtggtgattccccggatccaccccaactccatctgtgcagcaaacaacacaggggtgtacatcctcacatccaacacctcccagtatgacacatattgcttcaatgcttcagctccacctgaagaagattgtacatcagtcacagacctgcccaatgcctttgatggaccaattaccataactattgttaaccgtgatggcacccgctatgtccagaaaggagaatacagaacgaatcctgaagacatctaccccagcaaccctactgatgatgacgtgagcagcggctcctccagtgaaaggagcagcacttcaggaggttacatcttttacaccttttctactgtacaccccatcccagacgaagacagtccctggatcaccgacagcacagacagaatccctgctaccagtacgtcttcaaataccatctcagcaggctgggagccaaatgaagaaaatgaagatgaaagagacagacacctcagtttttctggatcaggcattgatgatgatgaagattttatctccagcaccatttcaaccacaccacgggcttttgaccacacaaaacagaaccaggactggacccagtggaacccaagccattcaaatccggaagtgctacttcagacaaccacaaggatgactgcagatgtagacagaaatggcaccactgcttatgaaggaaactggaacccagaagcacaccctcccctcattcaccatgagcatcatgaggaagaagagaccccacattctacaagcacaatccaggcaactcctagtagtacaacggaagaaacagctacccagaaggaacagtggtttggcaacagatggcatgagggatatcgccaaacacccagagaagactcccattcgacaacagggacagctgcagcctcagctcataccagccatccaatgcaaggaaggacaacaccaagcccagaggacagttcctggactgatttcttcaacccaatctcacaccccatgggacgaggtcatcaagcaggaagaaggatggatatggactccagtcatagtacaacgcttcagcctactgcaaatccaaacacaggtttggtggaagatttggacaggacaggacctctttcaatgacaacgcagcagagtaattctcagagcttctctacatcacatgaaggcttggaagaagataaagaccatccaacaacttctactctgacatcaagcaataggaatgatgtcacaggtggaagaagagacccaaatcattctgaaggctcaactactttactggaaggttatacctctcattacccacacacgaaggaaagcaggaccttcatcccagtgacctcagctaagactgggtcctttggagttactgcagttactgttggagattccaactctaatgtcaatcgttccttatcaggagaccaagacacattccaccccagtggggggtcccataccactcatggatctgaatcagatggacactcacatgggagtcaagaaggtggagcaaacacaacctctggtcctataaggacaccccaaattccagaatggctgatcatcttggcatccctcttggccttggctttgattcttgcagtttgcattgcagtcaacagtcgaagaaggtaaggggctgtcctgggggctt

SEQ ID NO: 405815 - DNA, 2739 bp, Homo sapiens
ggttttttgtgtgttgtttgtgtgccggactgatgtccaaagttccgccaggagggctttattgttgtcgttgttcaacatcctgttctgcggcttcctggctctttttgcccgttatgccgaagagccgggcgttggcacggccaatacggagactagcgaaggctttgaaattcttctcttcctcagtgatgactcgagctttctccttctatagacgttccggacgggcatgaccggtccggtcagctgggtggccagtttcagttcttcagcagaactgtctcccttcttgggggccgagggcttcctggggaagaggatgagtttggagcggtactccttcagccgctgcacgttggcctgcagggactccgtggacttgttccgcctcctcggatccacagaaatgccgatggtccgggccaccttcttgtgaatgtatgggttcatagaagggcacgtggtgattccccggatccaccccaactccatctgtgcagcaaacaacacaggggtgtacatcctcacatccaacacctcccagtatgacacatattgcttcaatgcttcagctccacctgaagaagattgtacatcagtcacagacctgcccaatgcctttgatggaccaattaccataactattgttaaccgtgatggcacccgctatgtccagaaaggagaatacagaacgaatcctgaagacatctaccccagcaaccctactgatgatgacgtgagcagcggctcctccagtgaaaggagcagcacttcaggaggttacatcttttacaccttttctactgtacaccccatcccagacgaagacagtccctggatcaccgacagcacagacagaatccctgctaccagtacgtcttcaaataccatctcagcaggctgggagccaaatgaagaaaatgaagatgaaagagacagacacctcagtttttctggatcaggcattgatgatgatgaagattttatctccagcaccatttcaaccacaccacgggcttttgaccacacaaaacagaaccaggactggacccagtggaacccaagccattcaaatccggaagtgctacttcagacaaccacaaggatgactgcagatgtagacagaaatggcaccactgcttatgaaggaaactggaacccagaagcacaccctcccctcattcaccatgagcatcatgaggaagaagagaccccacattctacaagcacaatccaggcaactcctagtagtacaacggaagaaacagctacccagaaggaacagtggtttggcaacagatggcatgagggatatcgccaaacacccagagaagactcccattcgacaacagggacagctggggactgtggcagcatggcatgggtcaagaagtacttctccttcatcttcctttgatgtcggtaactcatcctttctgcactgcgggagttgttaatgcttttgtgtcctccagttcacatgctgattgctaagaagaaaatgagcatgagtgaacccaaagctgctgaaacattctgcgtttatgcaacttccttgccctctatacaaggaagatggtttcattgtcttgtctagagaataaagtcttttttaaaaataaaatcggtgtatccctgaccaagcgtccattaacactttgacaattgctcaaactgcatggtcacagcagcctcagctcataccagccatccaatgcaaggaaggacaacaccaagcccagaggacagttcctggactgatttcttcaacccaatctcacaccccatgggacgaggtcatcaagcaggaagaaggatggatatggactccagtcatagtacaacgcttcagcctactgcaaatccaaacacaggtttggtggaagatttggacaggacaggacctctttcaatgacaacgcagcagagtaattctcagagcttctctacatcacatgaaggcttggaagaagataaagaccatccaacaacttctactctgacatcaagcagtaaggattataaaacctagttggcttcagctattgataagaatcaatcaattatgggtacttttgcagtgtctttggtggaggtgcatccattagctgccgttacactgttacttttaatcaaaaggtgcgtctggtggtggttctctgatttttctgttttatatacctcttcgtacattaagtgcaaactacatttcttcatcttaaaagttgggtttctttcactctagagttagtgatttgttttaacaataatggattgcttatatatgatttattttatttatttatttttgttaacttgagatctttctaacttttttatgtgggcgtttaaatttagtgctataaatttccctcttactactgccttagctgtgtcccagagattctgatatgttgtatctttgttcttattagtttcaaagaacttcttgatttctgcattaatttcattatttacccagaagtcattcaggagcaggttatttaatttccatgtaattgtatggttttgagtgagtttcttagtcttgatttcaaatttgattgcgctgtggtccaatagactgtttgctatgatttcagttcttttgcagtgtgatttataattggcgtaaatgtctgattatatcactttacattcctcacaataatattgttttgccttttgtcctctggacctccatggtgctgatgactaaaaagcagtcccttcagg

SEQ ID NO: 405816 - DNA, 2161 bp, Homo sapiens
ggttttttgtgtgttgtttgtgtgccggactgatgtccaaagttccgccaggagggctttattgttgtcgttgttcaacatcctgttctgcggcttcctggctctttttgcccgttatgccgaagagccgggcgttggcacggccaatacggagactagcgaaggctttgaaattcttctcttcctcagtgatgactcgagctttctccttctatagacgttccggacgggcatgaccggtccggtcagctgggtggccagtttcagttcttcagcagaactgtctcccttcttgggggccgagggcttcctggggaagaggatgagtttggagcggtactccttcagccgctgcacgttggcctgcagggactccgtggacttgttccgcctcctcggatccacagaaatgccgatggtccgggccaccttcttgtgaatgtatgggttcatagaagggcacgtggtgattccccggatccaccccaactccatctgtgcagcaaacaacacaggggtgtacatcctcacatccaacacctcccagtatgacacatattgcttcaatgcttcagctccacctgaagaagattgtacatcagtcacagacctgcccaatgcctttgatggaccaattaccataactattgttaaccgtgatggcacccgctatgtccagaaaggagaatacagaacgaatcctgaagacatctaccccagcaaccctactgatgatgacgtgagcagcggctcctccagtgaaaggagcagcacttcaggaggttacatcttttacaccttttctactgtacaccccatcccagacgaagacagtccctggatcaccgacagcacagacagaatccctgctaccagtacgtcttcaaataccatctcagcaggctgggagccaaatgaagaaaatgaagatgaaagagacagacacctcagtttttctggatcaggcattgatgatgatgaagattttatctccagcaccatttcaaccacaccacgggcttttgaccacacaaaacagaaccaggactggacccagtggaacccaagccattcaaatccggaagtgctacttcagacaaccacaaggatgactgcagatgtagacagaaatggcaccactgcttatgaaggaaactggaacccagaagcacaccctcccctcattcaccatgagcatcatgaggaagaagagaccccacattctacaagcacaatccaggcaactcctagtagtacaacggaagaaacagctacccagaaggaacagtggtttggcaacagatggcatgagggatatcgccaaacacccagagaagactcccattcgacaacagggacagctggggactgtggcagcatggcatgggtcaagaagtacttctccttcatcttcctttgatgtcggtaactcatcctttctgcactgcgggagttgttaatgcttttgtgtcctccagttcacatgctgattgctaagaagaaaatgagcatgagtgaacccaaagctgctgaaacattctgcgtttatgcaacttccttgccctctatacaaggaagatggtttcattgtcttgtctagagaataaagtcttttttaaaaataaaatcggtgtatccctgaccaagcgtccattaacactttgacaattgctcaaactgcatggtcacagcagcctcagctcataccagccatccaatgcaaggaaggacaacaccaagcccagaggacagttcctggactgatttcttcaacccaatctcacaccccatgggacgaggtcatcaagcaggaagaaggatgggtaatagcctctgagatttttatatattatgttttttgaaatccactgagtgactgctgactatttttctagaaatatgcccttggttttagaccaaactactttcctgaaggacctgaggttcttcaaaaattagttttcttggtaggagtgatactcatattcacctgaatatgaagttctgagctgaaagtaaggaatttagcaggagggttggcaaaagaaaaaacttattgtcaaaatatatctgtgtgaggcagtaagtaatagatatgaaatgaatgttgccaacaataaacgctaaagaaattctgagaacccctccctgcccaccacag

SEQ ID NO: 405817 - DNA, 910 bp, Homo sapiens
ggttttttgtgtgttgtttgtgtgccggactgatgtccaaagttccgccaggagggctttattgttgtcgttgttcaacatcctgttctgcggcttcctggctctttttgcccgttatgccgaagagccgggcgttggcacggccaatacggagactagcgaaggctttgaaattcttctcttcctcagtgatgactcgagctttctccttctatagacgttccggacgggcatgaccggtccggtcagctgggtggccagtttcagttcttcagcagaactgtctcccttcttgggggccgagggcttcctggggaagaggatgagtttggagcggtactccttcagccgctgcacgttggcctgcagggactccgtggacttgttccgcctcctcggatccacagaaatgccgatggtccgggccaccttcttgtgaatgtatgggttcatagaagggcacgtggtgattccccggatccaccccaactccatctgtgcagcaaacaacacaggggtgtacatcctcacatccaacacctcccagtatgacacatattgcttcaatgcttcagctccacctgaagaagattgtacatcagtcacagacctgcccaatgcctttgatggaccaattaccataactattgttaaccgtgatggcacccgctatgtccagaaaggagaatacagaacgaatcctgaagacatctaccccagcaaccctactgatgatgacgtgagcagcggctcctccagtgaaaggagcagcacttcaggaggttacatcttttacaccttttctactgtacaccccatcccagacgaagacagtccctggatcaccgacagcacagacagaatccctgctaccagtaaggagaataaatcactgtgcttcccaatagca

SEQ ID NO: 405818 - DNA, 1175 bp, Homo sapiens
ggttttttgtgtgttgtttgtgtgccggactgatgtccaaagttccgccaggagggctttattgttgtcgttgttcaacatcctgttctgcggcttcctggctctttttgcccgttatgccgaagagccgggcgttggcacggccaatacggagactagcgaaggctttgaaattcttctcttcctcagtgatgactcgagctttctccttctatagacgttccggacgggcatgaccggtccggtcagctgggtggccagtttcagttcttcagcagaactgtctcccttcttgggggccgagggcttcctggggaagaggatgagtttggagcggtactccttcagccgctgcacgttggcctgcagggactccgtggacttgttccgcctcctcggatccacagaaatgccgatggtccgggccaccttcttgtgaatgtatgggttcatagaagggcacgtggtgattccccggatccaccccaactccatctgtgcagcaaacaacacaggggtgtacatcctcacatccaacacctcccagtatgacacatattgcttcaatgcttcagctccacctgaagaagattgtacatcagtcacagacctgcccaatgcctttgatggaccaattaccataactattgttaaccgtgatggcacccgctatgtccagaaaggagaatacagaacgaatcctgaagacatctaccccagcaaccctactgatgatgacgtgagcagcggctcctccagtgaaaggagcagcacttcaggaggttacatcttttacaccttttctactgtacaccccatcccagacgaagacagtccctggatcaccgacagcacagacagaatccctgctaccatccaggcaactcctagtagtacaacggaagaaacagctacccagaaggaacagtggtttggcaacagatggcatgagggatatcgccaaacacccagagaagactcccattcgacaacagggacagctggtaatggatggtttaacaagtaaatttggatggaaacttccttttgggttaaacggtagacattgaggacattgaacaaaaggacactggaggaattgtcacgagatgttaggttacttaataaattatgctgcagttcacacagagccaaaccttaaaggctcataacaa

SEQ ID NO: 405819 - DNA, 1078 bp, Homo sapiens
ggttttttgtgtgttgtttgtgtgccggactgatgtccaaagttccgccaggagggctttattgttgtcgttgttcaacatcctgttctgcggcttcctggctctttttgcccgttatgccgaagagccgggcgttggcacggccaatacggagactagcgaaggctttgaaattcttctcttcctcagtgatgactcgagctttctccttctatagacgttccggacgggcatgaccggtccggtcagctgggtggccagtttcagttcttcagcagaactgtctcccttcttgggggccgagggcttcctggggaagaggatgagtttggagcggtactccttcagccgctgcacgttggcctgcagggactccgtggacttgttccgcctcctcggatccacagaaatgccgatggtccgggccaccttcttgtgaatgtatgggttcatagaagggcacgtggtgattccccggatccaccccaactccatctgtgcagcaaacaacacaggggtgtacatcctcacatccaacacctcccagtatgacacatattgcttcaatgcttcagctccacctgaagaagattgtacatcagtcacagacctgcccaatgcctttgatggaccaattaccataactattgttaaccgtgatggcacccgctatgtccagaaaggagaatacagaacgaatcctgaagacatctaccccagcaaccctactgatgatgacgtgagcagcggctcctccagtgaaaggagcagcacttcaggaggttacatcttttacaccttttctactgtacaccccatcccagacgaagacagtccctggatcaccgacagcacagacagaatccctgctaccatccaggcaactcctagtagtacaacggaagaaacagctacccagaaggaacagtggtttggcaacagatggcatgagggatatcgccaaacacccagtgtctccaggttcatctacatgcatgaataccatgtcatcatttgctccagaatagaatagaactgttcctgtccacgaagggggatgacacgggatcgctctagt

SEQ ID NO: 405820 - DNA, 915 bp, Homo sapiens
ggttttttgtgtgttgtttgtgtgccggactgatgtccaaagttccgccaggagggctttattgttgtcgttgttcaacatcctgttctgcggcttcctggctctttttgcccgttatgccgaagagccgggcgttggcacggccaatacggagactagcgaaggctttgaaattcttctcttcctcagtgatgactcgagctttctccttctatagacgttccggacgggcatgaccggtccggtcagctgggtggccagtttcagttcttcagcagaactgtctcccttcttgggggccgagggcttcctggggaagaggatgagtttggagcggtactccttcagccgctgcacgttggcctgcagggactccgtggacttgttccgcctcctcggatccacagaaatgccgatggtccgggccaccttcttgtgaatgtatgggttcatagaagggcacgtggtgattccccggatccaccccaactccatctgtgcagcaaacaacacaggggtgtacatcctcacatccaacacctcccagtatgacacatattgcttcaatgcttcagctccacctgaagaagattgtacatcagtcacagacctgcccaatgcctttgatggaccaattaccataactattgttaaccgtgatggcacccgctatgtccagaaaggagaatacagaacgaatcctgaagacatctaccccagcaaccctactgatgatgacgtgagcagcggctcctccagtgaaaggagcagcacttcaggaggttacatcttttacaccttttctactgtacaccccactgggtagaatatgtgtcttggtctctggtagcagggattctgtctgtgctgtcggtgatccagggactgtcttcgtctgggatggggtggtcgacg

SEQ ID NO: 405821 - DNA, 511 bp, Homo sapiens
tgcaaaggtcaatcatcgaggcacagtgggaaatttagttaatatctgatcaagaaattcttagtggacttttatgaggatacttaattccatttaggagtcatttatcaattataccatgtgggcacaggattttttatgttgcttcatgataaaaatgaatatgtttgaatggtttgtggttctgcctttgacaaactgatcatagtggaataataagggaacatgaagaaattccaagcccattgattttctcttgagaccaattaggtaaagtcactcaaaatttttgagagtggatgctcagaggtaacactttggcatagaattgttaaatagcatgcactttaatggaagaacagaatcattaaagattggttgataacaagtcacagtgtatttaaccatcatcacagcagatgtagacagaaatggcaccactgcttatgaaggaaactggaacccagaagcacaccctcccctcattcaccatgagcatcatgaggaagaa

SEQ ID NO: 405822 - DNA, 463 bp, Homo sapiens
gtatgggttcatagaagggcacgtggtgattccccggatccaccccaactccatctgtgcagcaaacaacacaggggtgtacatcctcacatccaacacctcccagtatgacacatattgcttcaatgcttcaggttggttctcaggggggtgtctgttggcgtgaaaggctgtgggagcctggtctttggagctcagcttaagtggggattcatgtagcctccatttacataacaaatgctcactgaatatctgtacagcagagccaacattcctgtctccatggagcttacatgctaaattggggaggcaaacaataaacaaataaatattaaataccattcaggactgtccaatcttttggcttccctaggtcacattgggagaagaattgtcttgggccccacataaattacactaaaactaagagtagctgataagctaaaacacaaacaaaaatcac

SEQ ID NO: 405823 - DNA, 376 bp, Homo sapiens
gcctcatccccagggtgtgtgggggatgggagggtgcactttcttagtgcatctgccactctctcccaccactggatagataggtgtttctcattacaaaggaaaatagctttgaagtcactatgttaaacgctaatccacatactcaaaatatgagctgtgaagttctgtaagtaccttttctctctcccagctattgttaaccgtgatggcacccgctatgtccagaaaggagaatacagaacgaatcctgaagacatctaccccagcaaccctactgatgatgacgtgagcagcggctcctccagtgaaaggagcagcacttcaggaggttacatcttttacaccttttctactgtacaccccatcccagacg

SEQ ID NO: 405824 - DNA, 1188 bp, Homo sapiens
tgctcctttcactggaggagccgctgctcacgtcagcacttcaggaggttacatcttttacaccttttctactgtacaccccatcccagacgaagacagtccctggatcaccgacagcacagacagaatccctgctaccacagcctcagctcataccagccatccaatgcaaggaaggacaacaccaagcccagaggacagttcctggactgatttcttcaacccaatctcacaccccatgggacgaggtcatcaagcaggaagaaggatggatatggactccagtcatagtacaacgcttcagcctactgcaaatccaaacacaggtttggtggaagatttggacaggacaggacctctttcaatgacaacgcagcagagtaattctcagagcttctctacatcacatgaaggcttggaagaagataaagaccatccaacaacttctactctgacatcaagcagtaaggattataaaacctagttggcttcagctattgataagaatcaatcaattatgggtacttttgcagtgtctttggtggaggtgcatccattagctgccgttacactgttacttttaatcaaaaggtgcgtctggtggtggttctctgatttttctgttttatatacctcttcgtacattaagtgcaaactacatttcttcatcttaaaagttgggtttctttcactctagagttagtgatttgttttaacaataatggattgcttatatatgatttattttatttatttatttttgttaacttgagatctttctaacttttttatgtgggcgtttaaatttagtgctataaatttccctcttactactgccttagctgtgtcccagagattctgatatgttgtatctttgttcttattagtttcaaagaacttcttgatttctgcattaatttcattatttacccagaagtcattcaggagcaggttatttaatttccatgtaattgtatggttttgagtgagtttcttagtcttgatttcaaatttgattgcgctgtggtccaatagactgtttgctatgatttcagttcttttgcagtgtgatttataattggcgtaaatgtctgattatatcactttacattcctcacaataatattgttttgccttttgtcctctggacctccatggtgctgatgactaaaaagcagtcccttcagg

SEQ ID NO: 405825 - DNA, 599 bp, Homo sapiens
actctggcatacttgtcctatgatgtacccctggatacacctggataggagctatccaatgacaacgcagcagagtaattctcagagcttctctacatcacatgaaggcttggaagaagataaagaccatccaacaacttctactctgacatcaagcaataggaatgatgtcacaggtggaagaagagacccaaatcattctgaaggctcaactactttactggaaggttatacctctcattacccacacacgaaggaaagcaggaccttcatcccagtgacctcagctaagactgggtcctttggagttactgcagttactgttggagattccaactctaatgtcaatcgttccttatcaggagaccaagacacattccaccccagtggggggtcccataccactcatggatctgaatcagatggacactcacatgggagtcaagaaggtggagcaaacacaacctctggtcctataaggacaccccaaattccagaatggctgatcatcttggcatccctcttggccttggctttgattcttgcagtttgcattgcagtcaacagtcgaagaaggtaaggggctgtcctgggggctt

SEQ ID NO: 405826 - DNA, 6754 bp, Homo sapiens
ggttttttgtgtgttgtttgtgtgccggactgatgtccaaagttccgccaggagggctttattgttgtcgttgttcaacatcctgttctgcggcttcctggctctttttgcccgttatgccgaagagccgggcgttggcacggccaatacggagactagcgaaggctttgaaattcttctcttcctcagtgatgactcgagctttctccttctatagacgttccggacgggcatgaccggtccggtcagctgggtggccagtttcagttcttcagcagaactgtctcccttcttgggggccgagggcttcctggggaagaggatgagtttggagcggtactccttcagccgctgcacgttggcctgcagggactccgtggacttgttccgcctcctcggatccacagaaatgccgatggtccgggccaccttcttgtgaatgtatgggttcatagaagggcacgtggtgattccccggatccaccccaactccatctgtgcagcaaacaacacaggggtgtacatcctcacatccaacacctcccagtatgacacatattgcttcaatgcttcagctccacctgaagaagattgtacatcagtcacagacctgcccaatgcctttgatggaccaattaccataactattgttaaccgtgatggcacccgctatgtccagaaaggagaatacagaacgaatcctgaagacatctaccccagcaaccctactgatgatgacgtgagcagcggctcctccagtgaaaggagcagcacttcaggaggttacatcttttacaccttttctactgtacaccccatcccagacgaagacagtccctggatcaccgacagcacagacagaatccctgctaccactttgatgagcactagtgctacagcaactgagacagcaaccaagaggcaagaaacctgggattggttttcatggttgtttctaccatcagagtcaaagaatcatcttcacacaacaacacaaatggctggtaatgagttattattatctcatagcgtatgttttcttgacagccttgaataattttgattgacctctgggatgttattaaagcctaacgttccttctattctcacaaattttcgttatgacttcagaaggatcattaactctggtatctgtttgtttgcttgtatggcaccaataagcagatttcttctttctaatctatggattagtatagaccaggagaaggctaatacagagactatgaaacgggaataagtttttttaacgatatggcaaaattgtgactctgaaagatcattcatgtatattctaaaattaccacagtcataaaaagtcttggactttcatgaggaaatagcatagctagatatgaaaaaatatagaaaatcttcatcaatggaactattcttggggtagacactaatcatatgaaaagacaaatgctcattccctaagatagcctgaatctcatttaaaatgtagaaaacccctttttagtaaagagacatcttctacagtaaccactgagaagaagtggaagtttttcatctcctttttttattcaaaaagaaaaagaatttctcaatttctgaaccacagttcactttagttaacccctttgattgcctaataatgccaaaaatgatttctctgttaattggcttcacatttttgctctatgctgaagtagtattgggaactgcagtgtagcttccatctctgtttggaggtacactgatctgatctgatactagagaagataaaaaatgaattagcaaattgtgaacacaatgaaatgactgacgtaggtgtagattccaacatttttctgaaggtgtcttgaccaaaaaaaaaaaaaaaaaaggcacgtgtgaaacctttccattctgttcttgatggcttggctttaatggcatatggttaatgagttaataataaacatatctgaaagtgtgggggagttttcattagcctttaaaaacttatatggtgagattatgtccacacttattctttcagctttcttaaagagaatattcagttttaaagatcatagccacttgttttgagatttatgtattagcttcggagatcagaacataagaatttggggtatgcaagtcaactccctcactttcttttaaaaatcctgggaaatccattataccttctgtgcctgattttcttcctttgcaagtgggttgcttggcgtccagctcagccactaatgcaagtcaccacaacaggtacgtcttcaaataccatctcagcaggctgggagccaaatgaagaaaatgaagatgaaagagacagacacctcagtttttctggatcaggcattgatgatgatgaagattttatctccagcaccatttcaaccacaccacgggcttttgaccacacaaaacagaaccaggactggacccagtggaacccaagccattcaaatccggaagtgctacttcagacaaccacaaggatgactgcagatgtagacagaaatggcaccactgcttatgaaggaaactggaacccagaagcacaccctcccctcattcaccatgagcatcatgaggaagaagagaccccacattctacaagcacaatccaggcaactcctagtagtacaacggaagaaacagctacccagaaggaacagtggtttggcaacagatggcatgagggatatcgccaaacacccagagaagactcccattcgacaacagggacagctgcagcctcagctcataccagccatccaatgcaaggaaggacaacaccaagcccagaggacagttcctggactgatttcttcaacccaatctcacaccccatgggacgaggtcatcaagcaggaagaaggatggatatggactccagtcatagtacaacgcttcagcctactgcaaatccaaacacaggtttggtggaagatttggacaggacaggacctctttcaatgacaacgcagcagagtaattctcagagcttctctacatcacatgaaggcttggaagaagataaagaccatccaacaacttctactctgacatcaagcaataggaatgatgtcacaggtggaagaagagacccaaatcattctgaaggctcaactactttactggaaggttatacctctcattacccacacacgaaggaaagcaggaccttcatcccagtgacctcagctaagactgggtcctttggagttactgcagttactgttggagattccaactctaatgtcaatcgttccttatcaggagaccaagacacattccaccccagtggggggtcccataccactcatggatctgaatcagatggacactcacatgggagtcaagaaggtggagcaaacacaacctctggtcctataaggacaccccaaattccagaatggctgatcatcttggcatccctcttggccttggctttgattcttgcagtttgcattgcagtcaacagtcgaagaaggtgtgggcagaagaaaaagctagtgatcaacagtggcaatggagctgtggaggacagaaagccaagtggactcaacggagaggccagcaagtctcaggaaatggtgcatttggtgaacaaggagtcgtcagaaactccagaccagtttatgacagctgatgagacaaggaacctgcagaatgtggacatgaagattggggtgtaacacctacaccattatcttggaaagaaacaaccgttggaaacataaccattacagggagctgggacacttaacagatgcaatgtgctactgattgtttcattgcgaatcttttttagcataaaattttctactctttttgttttttgtgttttgttctttaaagtcaggtccaatttgtaaaaacagcattgctttctgaaattagggcccaattaataatcagcaagaatttgatcgttccagttcccacttggaggcctttcatccctcgggtgtgctatggatggcttctaacaaaaactacacatatgtattcctgatcgccaacctttcccccaccagctaaggacatttcccagggttaatagggcctggtccctgggaggaaatttgaatgggtccattttgcccttccatagcctaatccctgggcattgctttccactgaggttgggggttggggtgtactagttacacatcttcaacagaccccctctagaaatttttcagatgcttctgggagacacccaaagggtgaagctatttatctgtagtaaactatttatctgtgtttttgaaatattaaaccctggatcagtcctttgatcagtataattttttaaagttactttgtcagaggcacaaaagggtttaaactgattcataataaatatctgtacttcttcgatcttcaccttttgtgctgtgattcttcagtttctaaaccagcactgtctgggtccctacaatgtatcaggaagagctgagaatggtaaggagactcttctaagtcttcatctcagagaccctgagttcccactcagacccactcagccaaatctcatggaagaccaaggagggcagcactgtttttgttttttgttttttgtttttttttttttgacactgtccaaaggttttccatcctgtcctggaatcagagttggaagctgaggagcttcagcctcttttatggtttaatggccacctgttctctcctgtgaaaggctttgcaaagtcacattaagtttgcatgacctgttatccctggggccctatttcatagaggctggccctattagtgatttccaaaaacaatatggaagtgccttttgatgtcttacaataagagaagaagccaatggaaatgaaagagattggcaaaggggaaggatgatgccatgtagatcctgtttgacatttttatggctgtatttgtaaacttaaacacaccagtgtctgttcttgatgcagttgctatttaggatgagttaagtgcctggggagtccctcaaaaggttaaagggattcccatcattggaatcttatcaccagataggcaagtttatgaccaaacaagagagtactggctttatcctctaacctcatattttctcccacttggcaagtcctttgtggcatttattcatcagtcagggtgtccgattggtcctagaacttccaaaggctgcttgtcatagaagccattgcatctataaagcaacggctcctgttaaatggtatctcctttctgaggctcctactaaaagtcatttgttacctaaacttatgtgcttaacaggcaatgcttctcagaccacaaagcagaaagaagaagaaaagctcctgactaaatcagggctgggcttagacagagttgatctgtagaatatctttaaaggagagatgtcaactttctgcactattcccagcctctgctcctccctgtctaccctctcccctccctctctccctccacttcaccccacaatcttgaaaaacttcctttctcttctgtgaacatcattggccagatccattttcagtggtctggatttctttttattttcttttcaacttgaaagaaactggacattaggccactatgtgttgttactgccactagtgttcaagtgcctcttgttttcccagagatttcctgggtctgccagaggcccagacaggctcactcaagctctttaactgaaaagcaacaagccactccaggacaaggttcaaaatggttacaacagcctctacctgtcgccccagggagaaaggggtagtgatacaagtctcatagccagagatggttttccactccttctagatattcccaaaaagaggctgagacaggaggttattttcaattttattttggaattaaatacttttttccctttattactgttgtagtccctcacttggatatacctctgttttcacgatagaaataagggaggtctagagcttctattccttggccattgtcaacggagagctggccaagtcttcacaaacccttgcaacattgcctgaagtttatggaataagatgtattctcactcccttgatctcaagggcgtaactctggaagcacagcttgactacacgtcatttttaccaatgattttcaggtgacctgggctaagtcatttaaactgggtctttataaaagtaaaaggccaacatttaattattttgcaaagcaacctaagagctaaagatgtaatttttcttgcaattgtaaatcttttgtgtctcctgaagacttcccttaaaattagctctgagtgaaaaatcaaaagagacaaaagacatcttcgaatccatatttcaagcctggtagaattggcttttctagcagaacctttccaaaagttttatattgagattcataacaacaccaagaattgattttgtagccaacattcattcaatactgttatatcagaggagtaggagagaggaaacatttgacttatctggaaaagcaaaatgtacttaagaataagaataacatggtccattcacctttatgttatagatatgtctttgtgtaaatcatttgttttgagttttcaaagaatagcccattgttcattcttgtgctgtacaatgaccactgttattgttactttgacttttcagagcacacccttcctctggtttttgtatatttattgatggatcaataataatgaggaaagcatgatatgtatattgctgagttgaaagcacttattggaaaatattaaaaggctaacattaaaagactaaaggaaaca

SEQ ID NO: 405827 - DNA, 5355 bp, Homo sapiens
ggttttttgtgtgttgtttgtgtgccggactgatgtccaaagttccgccaggagggctttattgttgtcgttgttcaacatcctgttctgcggcttcctggctctttttgcccgttatgccgaagagccgggcgttggcacggccaatacggagactagcgaaggctttgaaattcttctcttcctcagtgatgactcgagctttctccttctatagacgttccggacgggcatgaccggtccggtcagctgggtggccagtttcagttcttcagcagaactgtctcccttcttgggggccgagggcttcctggggaagaggatgagtttggagcggtactccttcagccgctgcacgttggcctgcagggactccgtggacttgttccgcctcctcggatccacagaaatgccgatggtccgggccaccttcttgtgaatgtatgggttcatagaagggcacgtggtgattccccggatccaccccaactccatctgtgcagcaaacaacacaggggtgtacatcctcacatccaacacctcccagtatgacacatattgcttcaatgcttcagctccacctgaagaagattgtacatcagtcacagacctgcccaatgcctttgatggaccaattaccataactattgttaaccgtgatggcacccgctatgtccagaaaggagaatacagaacgaatcctgaagacatctaccccagcaaccctactgatgatgacgtgagcagcggctcctccagtgaaaggagcagcacttcaggaggttacatcttttacaccttttctactgtacaccccatcccagacgaagacagtccctggatcaccgacagcacagacagaatccctgctaccacaggctgggagccaaatgaagaaaatgaagatgaaagagacagacacctcagtttttctggatcaggcattgatgatgatgaagattttatctccagcaccatttcaaccacaccacgggcttttgaccacacaaaacagaaccaggactggacccagtggaacccaagccattcaaatccggaagtgctacttcagacaaccacaaggatgactgcagatgtagacagaaatggcaccactgcttatgaaggaaactggaacccagaagcacaccctcccctcattcaccatgagcatcatgaggaagaagagaccccacattctacaagcacaatccaggcaactcctagtagtacaacggaagaaacagctacccagaaggaacagtggtttggcaacagatggcatgagggatatcgccaaacacccagagaagactcccattcgacaacagggacagctgcagcctcagctcataccagccatccaatgcaaggaaggacaacaccaagcccagaggacagttcctggactgatttcttcaacccaatctcacaccccatgggacgaggtcatcaagcaggaagaaggatggatatggactccagtcatagtacaacgcttcagcctactgcaaatccaaacacaggtttggtggaagatttggacaggacaggacctctttcaatgacaacgcagcagagtaattctcagagcttctctacatcacatgaaggcttggaagaagataaagaccatccaacaacttctactctgacatcaagcaataggaatgatgtcacaggtggaagaagagacccaaatcattctgaaggctcaactactttactggaaggttatacctctcattacccacacacgaaggaaagcaggaccttcatcccagtgacctcagctaagactgggtcctttggagttactgcagttactgttggagattccaactctaatgtcaatcgttccttatcaggagaccaagacacattccaccccagtggggggtcccataccactcatggatctgaatcagatggacactcacatgggagtcaagaaggtggagcaaacacaacctctggtcctataaggacaccccaaattccagaatggctgatcatcttggcatccctcttggccttggctttgattcttgcagtttgcattgcagtcaacagtcgaagaaggtgtgggcagaagaaaaagctagtgatcaacagtggcaatggagctgtggaggacagaaagccaagtggactcaacggagaggccagcaagtctcaggaaatggtgcatttggtgaacaaggagtcgtcagaaactccagaccagtttatgacagctgatgagacaaggaacctgcagaatgtggacatgaagattggggtgtaacacctacaccattatcttggaaagaaacaaccgttggaaacataaccattacagggagctgggacacttaacagatgcaatgtgctactgattgtttcattgcgaatcttttttagcataaaattttctactctttttgttttttgtgttttgttctttaaagtcaggtccaatttgtaaaaacagcattgctttctgaaattagggcccaattaataatcagcaagaatttgatcgttccagttcccacttggaggcctttcatccctcgggtgtgctatggatggcttctaacaaaaactacacatatgtattcctgatcgccaacctttcccccaccagctaaggacatttcccagggttaatagggcctggtccctgggaggaaatttgaatgggtccattttgcccttccatagcctaatccctgggcattgctttccactgaggttgggggttggggtgtactagttacacatcttcaacagaccccctctagaaatttttcagatgcttctgggagacacccaaagggtgaagctatttatctgtagtaaactatttatctgtgtttttgaaatattaaaccctggatcagtcctttgatcagtataattttttaaagttactttgtcagaggcacaaaagggtttaaactgattcataataaatatctgtacttcttcgatcttcaccttttgtgctgtgattcttcagtttctaaaccagcactgtctgggtccctacaatgtatcaggaagagctgagaatggtaaggagactcttctaagtcttcatctcagagaccctgagttcccactcagacccactcagccaaatctcatggaagaccaaggagggcagcactgtttttgttttttgttttttgtttttttttttttgacactgtccaaaggttttccatcctgtcctggaatcagagttggaagctgaggagcttcagcctcttttatggtttaatggccacctgttctctcctgtgaaaggctttgcaaagtcacattaagtttgcatgacctgttatccctggggccctatttcatagaggctggccctattagtgatttccaaaaacaatatggaagtgccttttgatgtcttacaataagagaagaagccaatggaaatgaaagagattggcaaaggggaaggatgatgccatgtagatcctgtttgacatttttatggctgtatttgtaaacttaaacacaccagtgtctgttcttgatgcagttgctatttaggatgagttaagtgcctggggagtccctcaaaaggttaaagggattcccatcattggaatcttatcaccagataggcaagtttatgaccaaacaagagagtactggctttatcctctaacctcatattttctcccacttggcaagtcctttgtggcatttattcatcagtcagggtgtccgattggtcctagaacttccaaaggctgcttgtcatagaagccattgcatctataaagcaacggctcctgttaaatggtatctcctttctgaggctcctactaaaagtcatttgttacctaaacttatgtgcttaacaggcaatgcttctcagaccacaaagcagaaagaagaagaaaagctcctgactaaatcagggctgggcttagacagagttgatctgtagaatatctttaaaggagagatgtcaactttctgcactattcccagcctctgctcctccctgtctaccctctcccctccctctctccctccacttcaccccacaatcttgaaaaacttcctttctcttctgtgaacatcattggccagatccattttcagtggtctggatttctttttattttcttttcaacttgaaagaaactggacattaggccactatgtgttgttactgccactagtgttcaagtgcctcttgttttcccagagatttcctgggtctgccagaggcccagacaggctcactcaagctctttaactgaaaagcaacaagccactccaggacaaggttcaaaatggttacaacagcctctacctgtcgccccagggagaaaggggtagtgatacaagtctcatagccagagatggttttccactccttctagatattcccaaaaagaggctgagacaggaggttattttcaattttattttggaattaaatacttttttccctttattactgttgtagtccctcacttggatatacctctgttttcacgatagaaataagggaggtctagagcttctattccttggccattgtcaacggagagctggccaagtcttcacaaacccttgcaacattgcctgaagtttatggaataagatgtattctcactcccttgatctcaagggcgtaactctggaagcacagcttgactacacgtcatttttaccaatgattttcaggtgacctgggctaagtcatttaaactgggtctttataaaagtaaaaggccaacatttaattattttgcaaagcaacctaagagctaaagatgtaatttttcttgcaattgtaaatcttttgtgtctcctgaagacttcccttaaaattagctctgagtgaaaaatcaaaagagacaaaagacatcttcgaatccatatttcaagcctggtagaattggcttttctagcagaacctttccaaaagttttatattgagattcataacaacaccaagaattgattttgtagccaacattcattcaatactgttatatcagaggagtaggagagaggaaacatttgacttatctggaaaagcaaaatgtacttaagaataagaataacatggtccattcacctttatgttatagatatgtctttgtgtaaatcatttgttttgagttttcaaagaatagcccattgttcattcttgtgctgtacaatgaccactgttattgttactttgacttttcagagcacacccttcctctggtttttgtatatttattgatggatcaataataatgaggaaagcatgatatgtatattgctgagttgaaagcacttattggaaaatattaaaaggctaacattaaaagactaaaggaaaca

SEQ ID NO: 405828 - DNA, 5706 bp, Homo sapiens
ggttttttgtgtgttgtttgtgtgccggactgatgtccaaagttccgccaggagggctttattgttgtcgttgttcaacatcctgttctgcggcttcctggctctttttgcccgttatgccgaagagccgggcgttggcacggccaatacggagactagcgaaggctttgaaattcttctcttcctcagtgatgactcgagctttctccttctatagacgttccggacgggcatgaccggtccggtcagctgggtggccagtttcagttcttcagcagaactgtctcccttcttgggggccgagggcttcctggggaagaggatgagtttggagcggtactccttcagccgctgcacgttggcctgcagggactccgtggacttgttccgcctcctcggatccacagaaatgccgatggtccgggccaccttcttgtgaatgtatgggttcatagaagggcacgtggtgattccccggatccaccccaactccatctgtgcagcaaacaacacaggggtgtacatcctcacatccaacacctcccagtatgacacatattgcttcaatgcttcagctccacctgaagaagattgtacatcagtcacagacctgcccaatgcctttgatggaccaattaccataactattgttaaccgtgatggcacccgctatgtccagaaaggagaatacagaacgaatcctgaagacatctaccccagcaaccctactgatgatgacgtgagcagcggctcctccagtgaaaggagcagcacttcaggaggttacatcttttacaccttttctactgtacaccccatcccagacgaagacagtccctggatcaccgacagcacagacagaatccctgctaccagtacgtcttcaaataccatctcagcaggctgggagccaaatgaagaaaatgaagatgaaagagacagacacctcagtttttctggatcaggcattgatgatgatgaagattttatctccagcaccatttcaaccacaccacgggcttttgaccacacaaaacagaaccaggactggacccagtggaacccaagccattcaaatccggaagtgctacttcagacaaccacaaggatgactgcagatgtagacagaaatggcaccactgcttatgaaggaaactggaacccagaagcacaccctcccctcattcaccatgagcatcatgaggaagaagagaccccacattctacaagcacaatccaggcaactcctagtagtacaacggaagaaacagctacccagaaggaacagtggtttggcaacagatggcatgagggatatcgccaaacacccagagaagactcccattcgacaacagggacagctggggactgtggcagcatggcatgggtcaagaagtacttctccttcatcttcctttgatgtcggtaactcatcctttctgcactgcgggagttgttaatgcttttgtgtcctccagttcacatgctgattgctaagaagaaaatgagcatgagtgaacccaaagctgctgaaacattctgcgtttatgcaacttccttgccctctatacaaggaagatggtttcattgtcttgtctagagaataaagtcttttttaaaaataaaatcggtgtatccctgaccaagcgtccattaacactttgacaattgctcaaactgcatggtcacagcagcctcagctcataccagccatccaatgcaaggaaggacaacaccaagcccagaggacagttcctggactgatttcttcaacccaatctcacaccccatgggacgaggtcatcaagcaggaagaaggatggatatggactccagtcatagtacaacgcttcagcctactgcaaatccaaacacaggtttggtggaagatttggacaggacaggacctctttcaatgacaacgcagcagagtaattctcagagcttctctacatcacatgaaggcttggaagaagataaagaccatccaacaacttctactctgacatcaagcaataggaatgatgtcacaggtggaagaagagacccaaatcattctgaaggctcaactactttactggaaggttatacctctcattacccacacacgaaggaaagcaggaccttcatcccagtgacctcagctaagactgggtcctttggagttactgcagttactgttggagattccaactctaatgtcaatcgttccttatcaggagaccaagacacattccaccccagtggggggtcccataccactcatggatctgaatcagatggacactcacatgggagtcaagaaggtggagcaaacacaacctctggtcctataaggacaccccaaattccagaatggctgatcatcttggcatccctcttggccttggctttgattcttgcagtttgcattgcagtcaacagtcgaagaaggtgtgggcagaagaaaaagctagtgatcaacagtggcaatggagctgtggaggacagaaagccaagtggactcaacggagaggccagcaagtctcaggaaatggtgcatttggtgaacaaggagtcgtcagaaactccagaccagtttatgacagctgatgagacaaggaacctgcagaatgtggacatgaagattggggtgtaacacctacaccattatcttggaaagaaacaaccgttggaaacataaccattacagggagctgggacacttaacagatgcaatgtgctactgattgtttcattgcgaatcttttttagcataaaattttctactctttttgttttttgtgttttgttctttaaagtcaggtccaatttgtaaaaacagcattgctttctgaaattagggcccaattaataatcagcaagaatttgatcgttccagttcccacttggaggcctttcatccctcgggtgtgctatggatggcttctaacaaaaactacacatatgtattcctgatcgccaacctttcccccaccagctaaggacatttcccagggttaatagggcctggtccctgggaggaaatttgaatgggtccattttgcccttccatagcctaatccctgggcattgctttccactgaggttgggggttggggtgtactagttacacatcttcaacagaccccctctagaaatttttcagatgcttctgggagacacccaaagggtgaagctatttatctgtagtaaactatttatctgtgtttttgaaatattaaaccctggatcagtcctttgatcagtataattttttaaagttactttgtcagaggcacaaaagggtttaaactgattcataataaatatctgtacttcttcgatcttcaccttttgtgctgtgattcttcagtttctaaaccagcactgtctgggtccctacaatgtatcaggaagagctgagaatggtaaggagactcttctaagtcttcatctcagagaccctgagttcccactcagacccactcagccaaatctcatggaagaccaaggagggcagcactgtttttgttttttgttttttgtttttttttttttgacactgtccaaaggttttccatcctgtcctggaatcagagttggaagctgaggagcttcagcctcttttatggtttaatggccacctgttctctcctgtgaaaggctttgcaaagtcacattaagtttgcatgacctgttatccctggggccctatttcatagaggctggccctattagtgatttccaaaaacaatatggaagtgccttttgatgtcttacaataagagaagaagccaatggaaatgaaagagattggcaaaggggaaggatgatgccatgtagatcctgtttgacatttttatggctgtatttgtaaacttaaacacaccagtgtctgttcttgatgcagttgctatttaggatgagttaagtgcctggggagtccctcaaaaggttaaagggattcccatcattggaatcttatcaccagataggcaagtttatgaccaaacaagagagtactggctttatcctctaacctcatattttctcccacttggcaagtcctttgtggcatttattcatcagtcagggtgtccgattggtcctagaacttccaaaggctgcttgtcatagaagccattgcatctataaagcaacggctcctgttaaatggtatctcctttctgaggctcctactaaaagtcatttgttacctaaacttatgtgcttaacaggcaatgcttctcagaccacaaagcagaaagaagaagaaaagctcctgactaaatcagggctgggcttagacagagttgatctgtagaatatctttaaaggagagatgtcaactttctgcactattcccagcctctgctcctccctgtctaccctctcccctccctctctccctccacttcaccccacaatcttgaaaaacttcctttctcttctgtgaacatcattggccagatccattttcagtggtctggatttctttttattttcttttcaacttgaaagaaactggacattaggccactatgtgttgttactgccactagtgttcaagtgcctcttgttttcccagagatttcctgggtctgccagaggcccagacaggctcactcaagctctttaactgaaaagcaacaagccactccaggacaaggttcaaaatggttacaacagcctctacctgtcgccccagggagaaaggggtagtgatacaagtctcatagccagagatggttttccactccttctagatattcccaaaaagaggctgagacaggaggttattttcaattttattttggaattaaatacttttttccctttattactgttgtagtccctcacttggatatacctctgttttcacgatagaaataagggaggtctagagcttctattccttggccattgtcaacggagagctggccaagtcttcacaaacccttgcaacattgcctgaagtttatggaataagatgtattctcactcccttgatctcaagggcgtaactctggaagcacagcttgactacacgtcatttttaccaatgattttcaggtgacctgggctaagtcatttaaactgggtctttataaaagtaaaaggccaacatttaattattttgcaaagcaacctaagagctaaagatgtaatttttcttgcaattgtaaatcttttgtgtctcctgaagacttcccttaaaattagctctgagtgaaaaatcaaaagagacaaaagacatcttcgaatccatatttcaagcctggtagaattggcttttctagcagaacctttccaaaagttttatattgagattcataacaacaccaagaattgattttgtagccaacattcattcaatactgttatatcagaggagtaggagagaggaaacatttgacttatctggaaaagcaaaatgtacttaagaataagaataacatggtccattcacctttatgttatagatatgtctttgtgtaaatcatttgttttgagttttcaaagaatagcccattgttcattcttgtgctgtacaatgaccactgttattgttactttgacttttcagagcacacccttcctctggtttttgtatatttattgatggatcaataataatgaggaaagcatgatatgtatattgctgagttgaaagcacttattggaaaatattaaaaggctaacattaaaagactaaaggaaaca

SEQ ID NO: 405829 - DNA, 6259 bp, Homo sapiens
ggttttttgtgtgttgtttgtgtgccggactgatgtccaaagttccgccaggagggctttattgttgtcgttgttcaacatcctgttctgcggcttcctggctctttttgcccgttatgccgaagagccgggcgttggcacggccaatacggagactagcgaaggctttgaaattcttctcttcctcagtgatgactcgagctttctccttctatagacgttccggacgggcatgaccggtccggtcagctgggtggccagtttcagttcttcagcagaactgtctcccttcttgggggccgagggcttcctggggaagaggatgagtttggagcggtactccttcagccgctgcacgttggcctgcagggactccgtggacttgttccgcctcctcggatccacagaaatgccgatggtccgggccaccttcttgtgaatgtatgggttcatagaagggcacgtggtgattccccggatccaccccaactccatctgtgcagcaaacaacacaggggtgtacatcctcacatccaacacctcccagtatgacacatattgcttcaatgcttcagctccacctgaagaagattgtacatcagtcacagacctgcccaatgcctttgatggaccaattaccataactattgttaaccgtgatggcacccgctatgtccagaaaggagaatacagaacgaatcctgaagacatctaccccagcaaccctactgatgatgacgtgagcagcggctcctccagtgaaaggagcagcacttcaggaggttacatcttttacaccttttctactgtacaccccatcccagacgaagacagtccctggatcaccgacagcacagacagaatccctgctaccactttgatgagcactagtgctacagcaactgagacagcaaccaagaggcaagaaacctgggattggttttcatggttgtttctaccatcagagtcaaagaatcatcttcacacaacaacacaaatggctggtaatgagttattattatctcatagcgtatgttttcttgacagccttgaataattttgattgacctctgggatgttattaaagcctaacgttccttctattctcacaaattttcgttatgacttcagaaggatcattaactctggtatctgtttgtttgcttgtatggcaccaataagcagatttcttctttctaatctatggattagtatagaccaggagaaggctaatacagagactatgaaacgggaataagtttttttaacgatatggcaaaattgtgactctgaaagatcattcatgtatattctaaaattaccacagtcataaaaagtcttggactttcatgaggaaatagcatagctagatatgaaaaaatatagaaaatcttcatcaatggaactattcttggggtagacactaatcatatgaaaagacaaatgctcattccctaagatagcctgaatctcatttaaaatgtagaaaacccctttttagtaaagagacatcttctacagtaaccactgagaagaagtggaagtttttcatctcctttttttattcaaaaagaaaaagaatttctcaatttctgaaccacagttcactttagttaacccctttgattgcctaataatgccaaaaatgatttctctgttaattggcttcacatttttgctctatgctgaagtagtattgggaactgcagtgtagcttccatctctgtttggaggtacactgatctgatctgatactagagaagataaaaaatgaattagcaaattgtgaacacaatgaaatgactgacgtaggtgtagattccaacatttttctgaaggtgtcttgaccaaaaaaaaaaaaaaaaaaggcacgtgtgaaacctttccattctgttcttgatggcttggctttaatggcatatggttaatgagttaataataaacatatctgaaagtgtgggggagttttcattagcctttaaaaacttatatggtgagattatgtccacacttattctttcagctttcttaaagagaatattcagttttaaagatcatagccacttgttttgagatttatgtattagcttcggagatcagaacataagaatttggggtatgcaagtcaactccctcactttcttttaaaaatcctgggaaatccattataccttctgtgcctgattttcttcctttgcaagtgggttgcttggcgtccagctcagccactaatgcaagtcaccacaacaggtacgtcttcaaataccatctcagcaggctgggagccaaatgaagaaaatgaagatgaaagagacagacacctcagtttttctggatcaggcattgatgatgatgaagattttatctccagcaccaatatggactccagtcatagtacaacgcttcagcctactgcaaatccaaacacaggtttggtggaagatttggacaggacaggacctctttcaatgacaacgcagcagagtaattctcagagcttctctacatcacatgaaggcttggaagaagataaagaccatccaacaacttctactctgacatcaagcaataggaatgatgtcacaggtggaagaagagacccaaatcattctgaaggctcaactactttactggaaggttatacctctcattacccacacacgaaggaaagcaggaccttcatcccagtgacctcagctaagactgggtcctttggagttactgcagttactgttggagattccaactctaatgtcaatcgttccttatcaggagaccaagacacattccaccccagtggggggtcccataccactcatggatctgaatcagatggacactcacatgggagtcaagaaggtggagcaaacacaacctctggtcctataaggacaccccaaattccagaatggctgatcatcttggcatccctcttggccttggctttgattcttgcagtttgcattgcagtcaacagtcgaagaaggtgtgggcagaagaaaaagctagtgatcaacagtggcaatggagctgtggaggacagaaagccaagtggactcaacggagaggccagcaagtctcaggaaatggtgcatttggtgaacaaggagtcgtcagaaactccagaccagtttatgacagctgatgagacaaggaacctgcagaatgtggacatgaagattggggtgtaacacctacaccattatcttggaaagaaacaaccgttggaaacataaccattacagggagctgggacacttaacagatgcaatgtgctactgattgtttcattgcgaatcttttttagcataaaattttctactctttttgttttttgtgttttgttctttaaagtcaggtccaatttgtaaaaacagcattgctttctgaaattagggcccaattaataatcagcaagaatttgatcgttccagttcccacttggaggcctttcatccctcgggtgtgctatggatggcttctaacaaaaactacacatatgtattcctgatcgccaacctttcccccaccagctaaggacatttcccagggttaatagggcctggtccctgggaggaaatttgaatgggtccattttgcccttccatagcctaatccctgggcattgctttccactgaggttgggggttggggtgtactagttacacatcttcaacagaccccctctagaaatttttcagatgcttctgggagacacccaaagggtgaagctatttatctgtagtaaactatttatctgtgtttttgaaatattaaaccctggatcagtcctttgatcagtataattttttaaagttactttgtcagaggcacaaaagggtttaaactgattcataataaatatctgtacttcttcgatcttcaccttttgtgctgtgattcttcagtttctaaaccagcactgtctgggtccctacaatgtatcaggaagagctgagaatggtaaggagactcttctaagtcttcatctcagagaccctgagttcccactcagacccactcagccaaatctcatggaagaccaaggagggcagcactgtttttgttttttgttttttgtttttttttttttgacactgtccaaaggttttccatcctgtcctggaatcagagttggaagctgaggagcttcagcctcttttatggtttaatggccacctgttctctcctgtgaaaggctttgcaaagtcacattaagtttgcatgacctgttatccctggggccctatttcatagaggctggccctattagtgatttccaaaaacaatatggaagtgccttttgatgtcttacaataagagaagaagccaatggaaatgaaagagattggcaaaggggaaggatgatgccatgtagatcctgtttgacatttttatggctgtatttgtaaacttaaacacaccagtgtctgttcttgatgcagttgctatttaggatgagttaagtgcctggggagtccctcaaaaggttaaagggattcccatcattggaatcttatcaccagataggcaagtttatgaccaaacaagagagtactggctttatcctctaacctcatattttctcccacttggcaagtcctttgtggcatttattcatcagtcagggtgtccgattggtcctagaacttccaaaggctgcttgtcatagaagccattgcatctataaagcaacggctcctgttaaatggtatctcctttctgaggctcctactaaaagtcatttgttacctaaacttatgtgcttaacaggcaatgcttctcagaccacaaagcagaaagaagaagaaaagctcctgactaaatcagggctgggcttagacagagttgatctgtagaatatctttaaaggagagatgtcaactttctgcactattcccagcctctgctcctccctgtctaccctctcccctccctctctccctccacttcaccccacaatcttgaaaaacttcctttctcttctgtgaacatcattggccagatccattttcagtggtctggatttctttttattttcttttcaacttgaaagaaactggacattaggccactatgtgttgttactgccactagtgttcaagtgcctcttgttttcccagagatttcctgggtctgccagaggcccagacaggctcactcaagctctttaactgaaaagcaacaagccactccaggacaaggttcaaaatggttacaacagcctctacctgtcgccccagggagaaaggggtagtgatacaagtctcatagccagagatggttttccactccttctagatattcccaaaaagaggctgagacaggaggttattttcaattttattttggaattaaatacttttttccctttattactgttgtagtccctcacttggatatacctctgttttcacgatagaaataagggaggtctagagcttctattccttggccattgtcaacggagagctggccaagtcttcacaaacccttgcaacattgcctgaagtttatggaataagatgtattctcactcccttgatctcaagggcgtaactctggaagcacagcttgactacacgtcatttttaccaatgattttcaggtgacctgggctaagtcatttaaactgggtctttataaaagtaaaaggccaacatttaattattttgcaaagcaacctaagagctaaagatgtaatttttcttgcaattgtaaatcttttgtgtctcctgaagacttcccttaaaattagctctgagtgaaaaatcaaaagagacaaaagacatcttcgaatccatatttcaagcctggtagaattggcttttctagcagaacctttccaaaagttttatattgagattcataacaacaccaagaattgattttgtagccaacattcattcaatactgttatatcagaggagtaggagagaggaaacatttgacttatctggaaaagcaaaatgtacttaagaataagaataacatggtccattcacctttatgttatagatatgtctttgtgtaaatcatttgttttgagttttcaaagaatagcccattgttcattcttgtgctgtacaatgaccactgttattgttactttgacttttcagagcacacccttcctctggtttttgtatatttattgatggatcaataataatgaggaaagcatgatatgtatattgctgagttgaaagcacttattggaaaatattaaaaggctaacattaaaagactaaaggaaaca

SEQ ID NO: 405830 - DNA, 5013 bp, Homo sapiens
ggttttttgtgtgttgtttgtgtgccggactgatgtccaaagttccgccaggagggctttattgttgtcgttgttcaacatcctgttctgcggcttcctggctctttttgcccgttatgccgaagagccgggcgttggcacggccaatacggagactagcgaaggctttgaaattcttctcttcctcagtgatgactcgagctttctccttctatagacgttccggacgggcatgaccggtccggtcagctgggtggccagtttcagttcttcagcagaactgtctcccttcttgggggccgagggcttcctggggaagaggatgagtttggagcggtactccttcagccgctgcacgttggcctgcagggactccgtggacttgttccgcctcctcggatccacagaaatgccgatggtccgggccaccttcttgtgaatgtatgggttcatagaagggcacgtggtgattccccggatccaccccaactccatctgtgcagcaaacaacacaggggtgtacatcctcacatccaacacctcccagtatgacacatattgcttcaatgcttcagctccacctgaagaagattgtacatcagtcacagacctgcccaatgcctttgatggaccaattaccataactattgttaaccgtgatggcacccgctatgtccagaaaggagaatacagaacgaatcctgaagacatctaccccagcaaccctactgatgatgacgtgagcagcggctcctccagtgaaaggagcagcacttcaggaggttacatcttttacaccttttctactgtacaccccatcccagacgaagacagtccctggatcaccgacagcacagacagaatccctgctaccactttgatgagcactagtgctacagcaactgagacagcaaccaagaggcaagaaacctgggattggttttcatggttgtttctaccatcagagtcaaagaatcatcttcacacaacaacacaaatggctggtacgtcttcaaataccatctcagcaggctgggagccaaatgaagaaaatgaagatgaaagagacagacacctcagtttttctggatcaggcattgatgatgatgaagattttatctccagcaccaatatggactccagtcatagtacaacgcttcagcctactgcaaatccaaacacaggtttggtggaagatttggacaggacaggacctctttcaatgacaacgcagcagagtaattctcagagcttctctacatcacatgaaggcttggaagaagataaagaccatccaacaacttctactctgacatcaagcaataggaatgatgtcacaggtggaagaagagacccaaatcattctgaaggctcaactactttactggaaggttatacctctcattacccacacacgaaggaaagcaggaccttcatcccagtgacctcagctaagactgggtcctttggagttactgcagttactgttggagattccaactctaatgtcaatcgttccttatcaggagaccaagacacattccaccccagtggggggtcccataccactcatggatctgaatcagatggacactcacatgggagtcaagaaggtggagcaaacacaacctctggtcctataaggacaccccaaattccagaatggctgatcatcttggcatccctcttggccttggctttgattcttgcagtttgcattgcagtcaacagtcgaagaaggtgtgggcagaagaaaaagctagtgatcaacagtggcaatggagctgtggaggacagaaagccaagtggactcaacggagaggccagcaagtctcaggaaatggtgcatttggtgaacaaggagtcgtcagaaactccagaccagtttatgacagctgatgagacaaggaacctgcagaatgtggacatgaagattggggtgtaacacctacaccattatcttggaaagaaacaaccgttggaaacataaccattacagggagctgggacacttaacagatgcaatgtgctactgattgtttcattgcgaatcttttttagcataaaattttctactctttttgttttttgtgttttgttctttaaagtcaggtccaatttgtaaaaacagcattgctttctgaaattagggcccaattaataatcagcaagaatttgatcgttccagttcccacttggaggcctttcatccctcgggtgtgctatggatggcttctaacaaaaactacacatatgtattcctgatcgccaacctttcccccaccagctaaggacatttcccagggttaatagggcctggtccctgggaggaaatttgaatgggtccattttgcccttccatagcctaatccctgggcattgctttccactgaggttgggggttggggtgtactagttacacatcttcaacagaccccctctagaaatttttcagatgcttctgggagacacccaaagggtgaagctatttatctgtagtaaactatttatctgtgtttttgaaatattaaaccctggatcagtcctttgatcagtataattttttaaagttactttgtcagaggcacaaaagggtttaaactgattcataataaatatctgtacttcttcgatcttcaccttttgtgctgtgattcttcagtttctaaaccagcactgtctgggtccctacaatgtatcaggaagagctgagaatggtaaggagactcttctaagtcttcatctcagagaccctgagttcccactcagacccactcagccaaatctcatggaagaccaaggagggcagcactgtttttgttttttgttttttgtttttttttttttgacactgtccaaaggttttccatcctgtcctggaatcagagttggaagctgaggagcttcagcctcttttatggtttaatggccacctgttctctcctgtgaaaggctttgcaaagtcacattaagtttgcatgacctgttatccctggggccctatttcatagaggctggccctattagtgatttccaaaaacaatatggaagtgccttttgatgtcttacaataagagaagaagccaatggaaatgaaagagattggcaaaggggaaggatgatgccatgtagatcctgtttgacatttttatggctgtatttgtaaacttaaacacaccagtgtctgttcttgatgcagttgctatttaggatgagttaagtgcctggggagtccctcaaaaggttaaagggattcccatcattggaatcttatcaccagataggcaagtttatgaccaaacaagagagtactggctttatcctctaacctcatattttctcccacttggcaagtcctttgtggcatttattcatcagtcagggtgtccgattggtcctagaacttccaaaggctgcttgtcatagaagccattgcatctataaagcaacggctcctgttaaatggtatctcctttctgaggctcctactaaaagtcatttgttacctaaacttatgtgcttaacaggcaatgcttctcagaccacaaagcagaaagaagaagaaaagctcctgactaaatcagggctgggcttagacagagttgatctgtagaatatctttaaaggagagatgtcaactttctgcactattcccagcctctgctcctccctgtctaccctctcccctccctctctccctccacttcaccccacaatcttgaaaaacttcctttctcttctgtgaacatcattggccagatccattttcagtggtctggatttctttttattttcttttcaacttgaaagaaactggacattaggccactatgtgttgttactgccactagtgttcaagtgcctcttgttttcccagagatttcctgggtctgccagaggcccagacaggctcactcaagctctttaactgaaaagcaacaagccactccaggacaaggttcaaaatggttacaacagcctctacctgtcgccccagggagaaaggggtagtgatacaagtctcatagccagagatggttttccactccttctagatattcccaaaaagaggctgagacaggaggttattttcaattttattttggaattaaatacttttttccctttattactgttgtagtccctcacttggatatacctctgttttcacgatagaaataagggaggtctagagcttctattccttggccattgtcaacggagagctggccaagtcttcacaaacccttgcaacattgcctgaagtttatggaataagatgtattctcactcccttgatctcaagggcgtaactctggaagcacagcttgactacacgtcatttttaccaatgattttcaggtgacctgggctaagtcatttaaactgggtctttataaaagtaaaaggccaacatttaattattttgcaaagcaacctaagagctaaagatgtaatttttcttgcaattgtaaatcttttgtgtctcctgaagacttcccttaaaattagctctgagtgaaaaatcaaaagagacaaaagacatcttcgaatccatatttcaagcctggtagaattggcttttctagcagaacctttccaaaagttttatattgagattcataacaacaccaagaattgattttgtagccaacattcattcaatactgttatatcagaggagtaggagagaggaaacatttgacttatctggaaaagcaaaatgtacttaagaataagaataacatggtccattcacctttatgttatagatatgtctttgtgtaaatcatttgttttgagttttcaaagaatagcccattgttcattcttgtgctgtacaatgaccactgttattgttactttgacttttcagagcacacccttcctctggtttttgtatatttattgatggatcaataataatgaggaaagcatgatatgtatattgctgagttgaaagcacttattggaaaatattaaaaggctaacattaaaagactaaaggaaaca

SEQ ID NO: 405831 - DNA, 4362 bp, Homo sapiens
ggttttttgtgtgttgtttgtgtgccggactgatgtccaaagttccgccaggagggctttattgttgtcgttgttcaacatcctgttctgcggcttcctggctctttttgcccgttatgccgaagagccgggcgttggcacggccaatacggagactagcgaaggctttgaaattcttctcttcctcagtgatgactcgagctttctccttctatagacgttccggacgggcatgaccggtccggtcagctgggtggccagtttcagttcttcagcagaactgtctcccttcttgggggccgagggcttcctggggaagaggatgagtttggagcggtactccttcagccgctgcacgttggcctgcagggactccgtggacttgttccgcctcctcggatccacagaaatgccgatggtccgggccaccttcttgtgaatgtatgggttcatagaagggcacgtggtgattccccggatccaccccaactccatctgtgcagcaaacaacacaggggtgtacatcctcacatccaacacctcccagtatgacacatattgcttcaatgcttcagctccacctgaagaagattgtacatcagtcacagacctgcccaatgcctttgatggaccaattaccataactattgttaaccgtgatggcacccgctatgtccagaaaggagaatacagaacgaatcctgaagacatctaccccagcaaccctactgatgatgacgtgagcagcggctcctccagtgaaaggagcagcacttcaggaggttacatcttttacaccttttctactgtacaccccatcccagacgaagacagtccctggatcaccgacagcacagacagaatccctgctaccagagaccaagacacattccaccccagtggggggtcccataccactcatggatctgaatcagatggacactcacatgggagtcaagaaggtggagcaaacacaacctctggtcctataaggacaccccaaattccagaatggctgatcatcttggcatccctcttggccttggctttgattcttgcagtttgcattgcagtcaacagtcgaagaaggtgtgggcagaagaaaaagctagtgatcaacagtggcaatggagctgtggaggacagaaagccaagtggactcaacggagaggccagcaagtctcaggaaatggtgcatttggtgaacaaggagtcgtcagaaactccagaccagtttatgacagctgatgagacaaggaacctgcagaatgtggacatgaagattggggtgtaacacctacaccattatcttggaaagaaacaaccgttggaaacataaccattacagggagctgggacacttaacagatgcaatgtgctactgattgtttcattgcgaatcttttttagcataaaattttctactctttttgttttttgtgttttgttctttaaagtcaggtccaatttgtaaaaacagcattgctttctgaaattagggcccaattaataatcagcaagaatttgatcgttccagttcccacttggaggcctttcatccctcgggtgtgctatggatggcttctaacaaaaactacacatatgtattcctgatcgccaacctttcccccaccagctaaggacatttcccagggttaatagggcctggtccctgggaggaaatttgaatgggtccattttgcccttccatagcctaatccctgggcattgctttccactgaggttgggggttggggtgtactagttacacatcttcaacagaccccctctagaaatttttcagatgcttctgggagacacccaaagggtgaagctatttatctgtagtaaactatttatctgtgtttttgaaatattaaaccctggatcagtcctttgatcagtataattttttaaagttactttgtcagaggcacaaaagggtttaaactgattcataataaatatctgtacttcttcgatcttcaccttttgtgctgtgattcttcagtttctaaaccagcactgtctgggtccctacaatgtatcaggaagagctgagaatggtaaggagactcttctaagtcttcatctcagagaccctgagttcccactcagacccactcagccaaatctcatggaagaccaaggagggcagcactgtttttgttttttgttttttgtttttttttttttgacactgtccaaaggttttccatcctgtcctggaatcagagttggaagctgaggagcttcagcctcttttatggtttaatggccacctgttctctcctgtgaaaggctttgcaaagtcacattaagtttgcatgacctgttatccctggggccctatttcatagaggctggccctattagtgatttccaaaaacaatatggaagtgccttttgatgtcttacaataagagaagaagccaatggaaatgaaagagattggcaaaggggaaggatgatgccatgtagatcctgtttgacatttttatggctgtatttgtaaacttaaacacaccagtgtctgttcttgatgcagttgctatttaggatgagttaagtgcctggggagtccctcaaaaggttaaagggattcccatcattggaatcttatcaccagataggcaagtttatgaccaaacaagagagtactggctttatcctctaacctcatattttctcccacttggcaagtcctttgtggcatttattcatcagtcagggtgtccgattggtcctagaacttccaaaggctgcttgtcatagaagccattgcatctataaagcaacggctcctgttaaatggtatctcctttctgaggctcctactaaaagtcatttgttacctaaacttatgtgcttaacaggcaatgcttctcagaccacaaagcagaaagaagaagaaaagctcctgactaaatcagggctgggcttagacagagttgatctgtagaatatctttaaaggagagatgtcaactttctgcactattcccagcctctgctcctccctgtctaccctctcccctccctctctccctccacttcaccccacaatcttgaaaaacttcctttctcttctgtgaacatcattggccagatccattttcagtggtctggatttctttttattttcttttcaacttgaaagaaactggacattaggccactatgtgttgttactgccactagtgttcaagtgcctcttgttttcccagagatttcctgggtctgccagaggcccagacaggctcactcaagctctttaactgaaaagcaacaagccactccaggacaaggttcaaaatggttacaacagcctctacctgtcgccccagggagaaaggggtagtgatacaagtctcatagccagagatggttttccactccttctagatattcccaaaaagaggctgagacaggaggttattttcaattttattttggaattaaatacttttttccctttattactgttgtagtccctcacttggatatacctctgttttcacgatagaaataagggaggtctagagcttctattccttggccattgtcaacggagagctggccaagtcttcacaaacccttgcaacattgcctgaagtttatggaataagatgtattctcactcccttgatctcaagggcgtaactctggaagcacagcttgactacacgtcatttttaccaatgattttcaggtgacctgggctaagtcatttaaactgggtctttataaaagtaaaaggccaacatttaattattttgcaaagcaacctaagagctaaagatgtaatttttcttgcaattgtaaatcttttgtgtctcctgaagacttcccttaaaattagctctgagtgaaaaatcaaaagagacaaaagacatcttcgaatccatatttcaagcctggtagaattggcttttctagcagaacctttccaaaagttttatattgagattcataacaacaccaagaattgattttgtagccaacattcattcaatactgttatatcagaggagtaggagagaggaaacatttgacttatctggaaaagcaaaatgtacttaagaataagaataacatggtccattcacctttatgttatagatatgtctttgtgtaaatcatttgttttgagttttcaaagaatagcccattgttcattcttgtgctgtacaatgaccactgttattgttactttgacttttcagagcacacccttcctctggtttttgtatatttattgatggatcaataataatgaggaaagcatgatatgtatattgctgagttgaaagcacttattggaaaatattaaaaggctaacattaaaagactaaaggaaaca

SEQ ID NO: 405832 - DNA, 5502 bp, Homo sapiens
ggttttttgtgtgttgtttgtgtgccggactgatgtccaaagttccgccaggagggctttattgttgtcgttgttcaacatcctgttctgcggcttcctggctctttttgcccgttatgccgaagagccgggcgttggcacggccaatacggagactagcgaaggctttgaaattcttctcttcctcagtgatgactcgagctttctccttctatagacgttccggacgggcatgaccggtccggtcagctgggtggccagtttcagttcttcagcagaactgtctcccttcttgggggccgagggcttcctggggaagaggatgagtttggagcggtactccttcagccgctgcacgttggcctgcagggactccgtggacttgttccgcctcctcggatccacagaaatgccgatggtccgggccaccttcttgtgaatgtatgggttcatagaagggcacgtggtgattccccggatccaccccaactccatctgtgcagcaaacaacacaggggtgtacatcctcacatccaacacctcccagtatgacacatattgcttcaatgcttcagctccacctgaagaagattgtacatcagtcacagacctgcccaatgcctttgatggaccaattaccataactattgttaaccgtgatggcacccgctatgtccagaaaggagaatacagaacgaatcctgaagacatctaccccagcaaccctactgatgatgacgtgagcagcggctcctccagtgaaaggagcagcacttcaggaggttacatcttttacaccttttctactgtacaccccatcccagacgaagacagtccctggatcaccgacagcacagacagaatccctgctaccagtacgtcttcaaataccatctcagcaggctgggagccaaatgaagaaaatgaagatgaaagagacagacacctcagtttttctggatcaggcattgatgatgatgaagattttatctccagcaccatttcaaccacaccacgggcttttgaccacacaaaacagaaccaggactggacccagtggaacccaagccattcaaatccggaagtgctacttcagacaaccacaaggatgactgcagatgtagacagaaatggcaccactgcttatgaaggaaactggaacccagaagcacaccctcccctcattcaccatgagcatcatgaggaagaagagaccccacattctacaagcacaatccaggcaactcctagtagtacaacggaagaaacagctacccagaaggaacagtggtttggcaacagatggcatgagggatatcgccaaacacccagagaagactcccattcgacaacagggacagctggggactgtggcagcatggcatgggtcaagaagtacttctccttcatcttcctttgatgtcggtaactcatcctttctgcactgcgggagttgttaatgcttttgtgtcctccagttcacatgctgattgctaagaagaaaatgagcatgagtgaacccaaagctgctgaaacattctgcgtttatgcaacttccttgccctctatacaaggaagatggtttcattgtcttgtctagagaataaagtcttttttaaaaataaaatcggtgtatccctgaccaagcgtccattaacactttgacaattgctcaaactgcatggtcacagcagcctcagctcataccagccatccaatgcaaggaaggacaacaccaagcccagaggacagttcctggactgatttcttcaacccaatctcacaccccatgggacgaggtcatcaagcaggaagaaggatggatatggactccagtcatagtacaacgcttcagcctactgcaaatccaaacacaggtttggtggaagatttggacaggacaggacctctttcaatgacaacgcagcagagtaattctcagagcttctctacatcacatgaaggcttggaagaagataaagaccatccaacaacttctactctgacatcaagcagagaccaagacacattccaccccagtggggggtcccataccactcatggatctgaatcagatggacactcacatgggagtcaagaaggtggagcaaacacaacctctggtcctataaggacaccccaaattccagaatggctgatcatcttggcatccctcttggccttggctttgattcttgcagtttgcattgcagtcaacagtcgaagaaggtgtgggcagaagaaaaagctagtgatcaacagtggcaatggagctgtggaggacagaaagccaagtggactcaacggagaggccagcaagtctcaggaaatggtgcatttggtgaacaaggagtcgtcagaaactccagaccagtttatgacagctgatgagacaaggaacctgcagaatgtggacatgaagattggggtgtaacacctacaccattatcttggaaagaaacaaccgttggaaacataaccattacagggagctgggacacttaacagatgcaatgtgctactgattgtttcattgcgaatcttttttagcataaaattttctactctttttgttttttgtgttttgttctttaaagtcaggtccaatttgtaaaaacagcattgctttctgaaattagggcccaattaataatcagcaagaatttgatcgttccagttcccacttggaggcctttcatccctcgggtgtgctatggatggcttctaacaaaaactacacatatgtattcctgatcgccaacctttcccccaccagctaaggacatttcccagggttaatagggcctggtccctgggaggaaatttgaatgggtccattttgcccttccatagcctaatccctgggcattgctttccactgaggttgggggttggggtgtactagttacacatcttcaacagaccccctctagaaatttttcagatgcttctgggagacacccaaagggtgaagctatttatctgtagtaaactatttatctgtgtttttgaaatattaaaccctggatcagtcctttgatcagtataattttttaaagttactttgtcagaggcacaaaagggtttaaactgattcataataaatatctgtacttcttcgatcttcaccttttgtgctgtgattcttcagtttctaaaccagcactgtctgggtccctacaatgtatcaggaagagctgagaatggtaaggagactcttctaagtcttcatctcagagaccctgagttcccactcagacccactcagccaaatctcatggaagaccaaggagggcagcactgtttttgttttttgttttttgtttttttttttttgacactgtccaaaggttttccatcctgtcctggaatcagagttggaagctgaggagcttcagcctcttttatggtttaatggccacctgttctctcctgtgaaaggctttgcaaagtcacattaagtttgcatgacctgttatccctggggccctatttcatagaggctggccctattagtgatttccaaaaacaatatggaagtgccttttgatgtcttacaataagagaagaagccaatggaaatgaaagagattggcaaaggggaaggatgatgccatgtagatcctgtttgacatttttatggctgtatttgtaaacttaaacacaccagtgtctgttcttgatgcagttgctatttaggatgagttaagtgcctggggagtccctcaaaaggttaaagggattcccatcattggaatcttatcaccagataggcaagtttatgaccaaacaagagagtactggctttatcctctaacctcatattttctcccacttggcaagtcctttgtggcatttattcatcagtcagggtgtccgattggtcctagaacttccaaaggctgcttgtcatagaagccattgcatctataaagcaacggctcctgttaaatggtatctcctttctgaggctcctactaaaagtcatttgttacctaaacttatgtgcttaacaggcaatgcttctcagaccacaaagcagaaagaagaagaaaagctcctgactaaatcagggctgggcttagacagagttgatctgtagaatatctttaaaggagagatgtcaactttctgcactattcccagcctctgctcctccctgtctaccctctcccctccctctctccctccacttcaccccacaatcttgaaaaacttcctttctcttctgtgaacatcattggccagatccattttcagtggtctggatttctttttattttcttttcaacttgaaagaaactggacattaggccactatgtgttgttactgccactagtgttcaagtgcctcttgttttcccagagatttcctgggtctgccagaggcccagacaggctcactcaagctctttaactgaaaagcaacaagccactccaggacaaggttcaaaatggttacaacagcctctacctgtcgccccagggagaaaggggtagtgatacaagtctcatagccagagatggttttccactccttctagatattcccaaaaagaggctgagacaggaggttattttcaattttattttggaattaaatacttttttccctttattactgttgtagtccctcacttggatatacctctgttttcacgatagaaataagggaggtctagagcttctattccttggccattgtcaacggagagctggccaagtcttcacaaacccttgcaacattgcctgaagtttatggaataagatgtattctcactcccttgatctcaagggcgtaactctggaagcacagcttgactacacgtcatttttaccaatgattttcaggtgacctgggctaagtcatttaaactgggtctttataaaagtaaaaggccaacatttaattattttgcaaagcaacctaagagctaaagatgtaatttttcttgcaattgtaaatcttttgtgtctcctgaagacttcccttaaaattagctctgagtgaaaaatcaaaagagacaaaagacatcttcgaatccatatttcaagcctggtagaattggcttttctagcagaacctttccaaaagttttatattgagattcataacaacaccaagaattgattttgtagccaacattcattcaatactgttatatcagaggagtaggagagaggaaacatttgacttatctggaaaagcaaaatgtacttaagaataagaataacatggtccattcacctttatgttatagatatgtctttgtgtaaatcatttgttttgagttttcaaagaatagcccattgttcattcttgtgctgtacaatgaccactgttattgttactttgacttttcagagcacacccttcctctggtttttgtatatttattgatggatcaataataatgaggaaagcatgatatgtatattgctgagttgaaagcacttattggaaaatattaaaaggctaacattaaaagactaaaggaaaca

SEQ ID NO: 405833 - DNA, 6098 bp, Homo sapiens
ggttttttgtgtgttgtttgtgtgccggactgatgtccaaagttccgccaggagggctttattgttgtcgttgttcaacatcctgttctgcggcttcctggctctttttgcccgttatgccgaagagccgggcgttggcacggccaatacggagactagcgaaggctttgaaattcttctcttcctcagtgatgactcgagctttctccttctatagacgttccggacgggcatgaccggtccggtcagctgggtggccagtttcagttcttcagcagaactgtctcccttcttgggggccgagggcttcctggggaagaggatgagtttggagcggtactccttcagccgctgcacgttggcctgcagggactccgtggacttgttccgcctcctcggatccacagaaatgccgatggtccgggccaccttcttgtgaatgtatgggttcatagaagggcacgtggtgattccccggatccaccccaactccatctgtgcagcaaacaacacaggggtgtacatcctcacatccaacacctcccagtatgacacatattgcttcaatgcttcagctccacctgaagaagattgtacatcagtcacagacctgcccaatgcctttgatggaccaattaccataactattgttaaccgtgatggcacccgctatgtccagaaaggagaatacagaacgaatcctgaagacatctaccccagcaaccctactgatgatgacgtgagcagcggctcctccagtgaaaggagcagcacttcaggaggttacatcttttacaccttttctactgtacaccccatcccagacgaagacagtccctggatcaccgacagcacagacagaatccctgctaccagtacgtcttcaaataccatctcagcaggctgggagccaaatgaagaaaatgaagatgaaagagacagacacctcagtttttctggatcaggcattgatgatgatgaagattttatctccagcaccatttcaaccacaccacgggcttttgaccacacaaaacagaaccaggactggacccagtggaacccaagccattcaaatccggaagtgctacttcagacaaccacaaggatgactgcagatgtagacagaaatggcaccactgcttatgaaggaaactggaacccagaagcacaccctcccctcattcaccatgagcatcatgaggaagaagagaccccacattctacaagcacaatccaggcaactcctagtagtacaacggaagaaacagctacccagaaggaacagtggtttggcaacagatggcatgagggatatcgccaaacacccagagaagactcccattcgacaacagggacagctgcagcctcagctcataccagccatccaatgcaaggaaggacaacaccaagcccagaggacagttcctggactgatttcttcaacccaatctcacaccccatgggacgaggtcatcaagcaggaagaaggatggatatggactccagtcatagtacaacgcttcagcctactgcaaatccaaacacaggtttggtggaagatttggacaggacaggacctctttcaatgacaacgcagcagagtaattctcagagcttctctacatcacatgaaggcttggaagaagataaagaccatccaacaacttctactctgacatcaagcaataggaatgatgtcacaggtggaagaagagacccaaatcattctgaaggctcaactactttactggaaggttatacctctcattacccacacacgaaggaaagcaggaccttcatcccagtgacctcagctaagactgggtcctttggagttactgcagttactgttggagattccaactctaatgtcaatcgttccttatcaggagaccaagacacattccaccccagtggggggtcccataccactcatggatctgaatcagatggacactcacatgggagtcaagaaggtggagcaaacacaacctctggtcctataaggacaccccaaattccagaatggctgatcatcttggcatccctcttggccttggctttgattcttgcagtttgcattgcagtcaacagtcgaagaaggtgtgggcagaagaaaaagctagtgatcaacagtggcaatggagctgtggaggacagaaagccaagtggactcaacggagaggccagcaagtctcaggaaatggtgcatttggtgaacaaggagtcgtcagaaactccagaccagtttatgacagctgatgagacaaggaacctgcagaatgtggacatgaagattggggtgtaacacctacaccattatcttggaaagaaacaaccgttggaaacataaccattacagggagctgggacacttaacagatgcaatgtgctactgattgtttcattgcgaatcttttttagcataaaattttctactctttttgttttttgtgttttgttctttaaagtcaggtccaatttgtaaaaacagcattgctttctgaaattagggcccaattaataatcagcaagaatttgatcgttccagttcccacttggaggcctttcatccctcgggtgtgctatggatggcttctaacaaaaactacacatatgtattcctgatcgccaacctttcccccaccagctaaggacatttcccagggttaatagggcctggtccctgggaggaaatttgaatgggtccattttgcccttccatagcctaatccctgggcattgctttccactgaggttgggggttggggtgtactagttacacatcttcaacagaccccctctagaaatttttcagatgcttctgggagacacccaaagggtgaagctatttatctgtagtaaactatttatctgtgtttttgaaatattaaaccctggatcagtcctttgatcagtataattttttaaagttactttgtcagaggcacaaaagggtttaaactgattcataataaatatctgtacttcttcgatcttcaccttttgtgctgtgattcttcagtttctaaaccagcactgtctgggtccctacaatgtatcaggaagagctgagaatggtaaggagactcttctaagtcttcatctcagagaccctgagttcccactcagacccactcagccaaatctcatggaagaccaaggagggcagcactgtttttgttttttgttttttgtttttttttttttgacactgtccaaaggttttccatcctgtcctggaatcagagttggaagctgaggagcttcagcctcttttatggtttaatggccacctgttctctcctgtgaaaggctttgcaaagtcacattaagtttgcatgacctgttatccctggggccctatttcatagaggctggccctattagtgatttccaaaaacaatatggaagtgccttttgatgtcttacaataagagaagaagccaatggaaatgaaagagattggcaaaggggaaggatgatgccatgtagatcctgtttgacatttttatggctgtatttgtaaacttaaacacaccagtgtctgttcttgatgcagttgctatttaggatgagttaagtgcctggggagtccctcaaaaggttaaagggattcccatcattggaatcttatcaccagataggcaagtttatgaccaaacaagagagtactggctttatcctctaacctcatattttctcccacttggcaagtcctttgtggcatttattcatcagtcagggtgtccgattggtcctagaacttccaaaggctgcttgtcatagaagccattgcatctataaagcaacggctcctgttaaatggtatctcctttctgaggctcctactaaaagtcatttgttacctaaacttatgtgcttaacaggcaatgcttctcagaccacaaagcagaaagaagaagaaaagctcctgactaaatcagggctgggcttagacagagttgatctgtagaatatctttaaaggagagatgtcaactttctgcactattcccagcctctgctcctccctgtctaccctctcccctccctctctccctccacttcaccccacaatcttgaaaaacttcctttctcttctgtgaacatcattggccagatccattttcagtggtctggatttctttttattttcttttcaacttgaaagaaactggacattaggccactatgtgttgttactgccactagtgttcaagtgcctcttgttttcccagagatttcctgggtctgccagaggcccagacaggctcactcaagctctttaactgaaaagcaacaagccactccaggacaaggttcaaaatggttacaacagcctctacctgtcgccccagggagaaaggggtagtgatacaagtctcatagccagagatggttttccactccttctagatattcccaaaaagaggctgagacaggaggttattttcaattttattttggaattaaatacttttttccctttattactgttgtagtccctcacttggatatacctctgttttcacgatagaaataagggaggtctagagcttctattccttggccattgtcaacggagagctggccaagtcttcacaaacccttgcaacattgcctgaagtttatggaataagatgtattctcactcccttgatctcaagggcgtaactctggaagcacagcttgactacacgtcatttttaccaatgattttcaggtgacctgggctaagtcatttaaactgggtctttataaaagtaaaaggccaacatttaattattttgcaaagcaacctaagagctaaagatgtaatttttcttgcaattgtaaatcttttgtgtctcctgaagacttcccttaaaattagctctgagtgaaaaatcaaaagagacaaaagacatcttcgaatccatatttcaagcctggtagaattggcttttctagcagaacctttccaaaagttttatattgagattcataacaacaccaagaattgattttgtagccaacattcattcaatactgttatatcagaggagtaggagagaggaaacatttgacttatctggaaaagcaaaatgtacttaagaataagaataacatggtccattcacctttatgttatagatatgtctttgtgtaaatcatttgttttgagttttcaaagaatagcccattgttcattcttgtgctgtacaatgaccactgttattgttactttgacttttcagagcacacccttcctctggtttttgtatatttattgatggatcaataataatgaggaaagcatgatatgtatattgctgagttgaaagcacttattggaaaatattaaaaggctaacattaaaagactaaaggaaacaaaaaaaaaaaaaaaaaaaaaaaaaaaaaaaaaaaaaaaaaaaaaaaaaaaaaaaaaaaaaaaaaaaaaaaaaaaaaaaaaaaaaaaaaaaaaaaaaaaaaaaaaaaaaaaaagaaaaaaagaacaaaaagagaacaacaaaaaagaaaaagaaaaagagcagaacaaaagaaaaagagaaacaagagcgaaaacagaaaaacaacagaagagaccgagaagcaaacaagcagacgcgagaaacaaaacgaagaaaagagcagcgacccacacgacaaaaagagcgaggactgcgcaacaagggacagacacaatagaaaaagaggaagcaagacaaacggagagagaaagaaagaagaagaaagatggagaaacacgaaacacagagagatcgaaggagcagagaacgaagaaagaaagaaagaaagaagacaaactagaggcacagcaaatgaggacagagaaagaaagagaaaagagcgcagagaccagacgaggcacggcgaacacggacaggacaacaagaccggaaggaagcagatgaggcgcggggggacgagggagcgaccggagagggaggagaacgcacgaagcgagacgaaaccagaggcgacggcggaagagggacacgagacacggcacggaagaggggacgagggaggagagaagaaggggatagcaaggacgacgcagaaaacaagaaagactaaccggacaact

SEQ ID NO: 405834 - DNA, 5722 bp, Homo sapiens
ggttttttgtgtgttgtttgtgtgccggactgatgtccaaagttccgccaggagggctttattgttgtcgttgttcaacatcctgttctgcggcttcctggctctttttgcccgttatgccgaagagccgggcgttggcacggccaatacggagactagcgaaggctttgaaattcttctcttcctcagtgatgactcgagctttctccttctatagacgttccggacgggcatgaccggtccggtcagctgggtggccagtttcagttcttcagcagaactgtctcccttcttgggggccgagggcttcctggggaagaggatgagtttggagcggtactccttcagccgctgcacgttggcctgcagggactccgtggacttgttccgcctcctcggatccacagaaatgccgatggtccgggccaccttcttgtgaatgtatgggttcatagaagggcacgtggtgattccccggatccaccccaactccatctgtgcagcaaacaacacaggggtgtacatcctcacatccaacacctcccagtatgacacatattgcttcaatgcttcagctccacctgaagaagattgtacatcagtcacagacctgcccaatgcctttgatggaccaattaccataactattgttaaccgtgatggcacccgctatgtccagaaaggagaatacagaacgaatcctgaagacatctaccccagcaaccctactgatgatgacgtgagcagcggctcctccagtgaaaggagcagcacttcaggaggttacatcttttacaccttttctactgtacaccccatcccagacgaagacagtccctggatcaccgacagcacagacagaatccctgctaccagtacgtcttcaaataccatctcagcaggctgggagccaaatgaagaaaatgaagatgaaagagacagacacctcagtttttctggatcaggcattgatgatgatgaagattttatctccagcaccatttcaaccacaccacgggcttttgaccacacaaaacagaaccaggactggacccagtggaacccaagccattcaaatccggaagtgctacttcagacaaccacaaggatgactgcagatgtagacagaaatggcaccactgcttatgaaggaaactggaacccagaagcacaccctcccctcattcaccatgagcatcatgaggaagaagagaccccacattctacaagcacaatccaggcaactcctagtagtacaacggaagaaacagctacccagaaggaacagtggtttggcaacagatggcatgagggatatcgccaaacacccagagaagactcccattcgacaacagggacagctgcagcctcagctcataccagccatccaatgcaaggaaggacaacaccaagcccagaggacagttcctggactgatttcttcaacccaatctcacaccccatgggacgaggtcatcaagcaggaagaaggatggatatggactccagtcatagtacaacgcttcagcctactgcaaatccaaacacaggtttggtggaagatttggacaggacaggacctctttcaatgacaacgcagcagagtaattctcagagcttctctacatcacatgaaggcttggaagaagataaagaccatccaacaacttctactctgacatcaagcaataggaatgatgtcacaggtggaagaagagacccaaatcattctgaaggctcaactactttactggaaggttatacctctcattacccacacacgaaggaaagcaggaccttcatcccagtgacctcagctaagactgggtcctttggagttactgcagttactgttggagattccaactctaatgtcaatcgttccttatcaggagaccaagacacattccaccccagtggggggtcccataccactcatggatctgaatcagatggacactcacatgggagtcaagaaggtggagcaaacacaacctctggtcctataaggacaccccaaattccagaatggctgatcatcttggcatccctcttggccttggctttgattcttgcagtttgcattgcagtcaacagtcgaagaaggtgtgggcagaagaaaaagctagtgatcaacagtggcaatggagctgtggaggacagaaagccaagtggactcaacggagaggccagcaagtctcaggaaatggtgcatttggtgaacaaggagtcgtcagaaactccagaccagtttatgacagctgatgagacaaggaacctgcagaatgtggacatgaagattggggtgtaacacctacaccattatcttggaaagaaacaaccgttggaaacataaccattacagggagctgggacacttaacagatgcaatgtgctactgattgtttcattgcgaatcttttttagcataaaattttctactctttttgttttttgtgttttgttctttaaagtcaggtccaatttgtaaaaacagcattgctttctgaaattagggcccaattaataatcagcaagaatttgatcgttccagttcccacttggaggcctttcatccctcgggtgtgctatggatggcttctaacaaaaactacacatatgtattcctgatcgccaacctttcccccaccagctaaggacatttcccagggttaatagggcctggtccctgggaggaaatttgaatgggtccattttgcccttccatagcctaatccctgggcattgctttccactgaggttgggggttggggtgtactagttacacatcttcaacagaccccctctagaaatttttcagatgcttctgggagacacccaaagggtgaagctatttatctgtagtaaactatttatctgtgtttttgaaatattaaaccctggatcagtcctttgatcagtataattttttaaagttactttgtcagaggcacaaaagggtttaaactgattcataataaatatctgtacttcttcgatcttcaccttttgtgctgtgattcttcagtttctaaaccagcactgtctgggtccctacaatgtatcaggaagagctgagaatggtaaggagactcttctaagtcttcatctcagagaccctgagttcccactcagacccactcagccaaatctcatggaagaccaaggagggcagcactgtttttgttttttgttttttgtttttttttttttgacactgtccaaaggttttccatcctgtcctggaatcagagttggaagctgaggagcttcagcctcttttatggtttaatggccacctgttctctcctgtgaaaggctttgcaaagtcacattaagtttgcatgacctgttatccctggggccctatttcatagaggctggccctattagtgatttccaaaaacaatatggaagtgccttttgatgtcttacaataagagaagaagccaatggaaatgaaagagattggcaaaggggaaggatgatgccatgtagatcctgtttgacatttttatggctgtatttgtaaacttaaacacaccagtgtctgttcttgatgcagttgctatttaggatgagttaagtgcctggggagtccctcaaaaggttaaagggattcccatcattggaatcttatcaccagataggcaagtttatgaccaaacaagagagtactggctttatcctctaacctcatattttctcccacttggcaagtcctttgtggcatttattcatcagtcagggtgtccgattggtcctagaacttccaaaggctgcttgtcatagaagccattgcatctataaagcaacggctcctgttaaatggtatctcctttctgaggctcctactaaaagtcatttgttacctaaacttatgtgcttaacaggcaatgcttctcagaccacaaagcagaaagaagaagaaaagctcctgactaaatcagggctgggcttagacagagttgatctgtagaatatctttaaaggagagatgtcaactttctgcactattcccagcctctgctcctccctgtctaccctctcccctccctctctccctccacttcaccccacaatcttgaaaaacttcctttctcttctgtgaacatcattggccagatccattttcagtggtctggatttctttttattttcttttcaacttgaaagaaactggacattaggccactatgtgttgttactgccactagtgttcaagtgcctcttgttttcccagagatttcctgggtctgccagaggcccagacaggctcactcaagctctttaactgaaaagcaacaagccactccaggacaaggttcaaaatggttacaacagcctctacctgtcgccccagggagaaaggggtagtgatacaagtctcatagccagagatggttttccactccttctagatattcccaaaaagaggctgagacaggaggttattttcaattttattttggaattaaatacttttttccctttattactgttgtagtccctcacttggatatacctctgttttcacgatagaaataagggaggtctagagcttctattccttggccattgtcaacggagagctggccaagtcttcacaaacccttgcaacattgcctgaagtttatggaataagatgtattctcactcccttgatctcaagggcgtaactctggaagcacagcttgactacacgtcatttttaccaatgattttcaggtgacctgggctaagtcatttaaactgggtctttataaaagtaaaaggccaacatttaattattttgcaaagcaacctaagagctaaagatgtaatttttcttgcaattgtaaatcttttgtgtctcctgaagacttcccttaaaattagctctgagtgaaaaatcaaaagagacaaaagacatcttcgaatccatatttcaagcctggtagaattggcttttctagcagaacctttccaaaagttttatattgagattcataacaacaccaagaattgattttgtagccaacattcattcaatactgttatatcagaggagtaggagagaggaaacatttgacttatctggaaaagcaaaatgtacttaagaataagaataacatggtccattcacctttatgttatagatatgtctttgtgtaaatcatttgttttgagttttcaaagaatagcccattgttcattcttgtgctgtacaatgaccactgttattgttactttgacttttcagagcacacccttcctctggtttttgtatatttattgatggatcaataataatgaggaaagcatgatatgtatattgctgagttgaaagcacttattggaaaatattaaaaggctaacattaaaagactaaaggaaacaaaaaaaaaaaaaaaaaacttagtcattgtggaagtatggcatgggtcaagaagtacttctccttcatcttcctttgatgtcggtaactcatcctttctgcactgcgggagttgttaatgcttttgggtcctccagttcacatgctgattgctaagaagaaaatgagcatgagtgaacccaaagctgctgaaacattctgcgtttatgcaacttccttgccctctatacaaggaagatggtttcattgtcttgtctagagaataaagtcttttttaaaaataaaatcggtgtatccctgaccagcgtccattaacacttgacattgctcactgcatggtcacag

SEQ ID NO: 405835 - DNA, 5089 bp, Homo sapiens
  misc_feature (5011)..(5011): n is a, c, g, or t
  misc_feature (5014)..(5014): n is a, c, g, or t
  misc_feature (5017)..(5018): n is a, c, g, or t
  misc_feature (5023)..(5023): n is a, c, g, or t
ggttttttgtgtgttgtttgtgtgccggactgatgtccaaagttccgccaggagggctttattgttgtcgttgttcaacatcctgttctgcggcttcctggctctttttgcccgttatgccgaagagccgggcgttggcacggccaatacggagactagcgaaggctttgaaattcttctcttcctcagtgatgactcgagctttctccttctatagacgttccggacgggcatgaccggtccggtcagctgggtggccagtttcagttcttcagcagaactgtctcccttcttgggggccgagggcttcctggggaagaggatgagtttggagcggtactccttcagccgctgcacgttggcctgcagggactccgtggacttgttccgcctcctcggatccacagaaatgccgatggtccgggccaccttcttgtgaatgtatgggttcatagaagggcacgtggtgattccccggatccaccccaactccatctgtgcagcaaacaacacaggggtgtacatcctcacatccaacacctcccagtatgacacatattgcttcaatgcttcagctccacctgaagaagattgtacatcagtcacagacctgcccaatgcctttgatggaccaattaccataactattgttaaccgtgatggcacccgctatgtccagaaaggagaatacagaacgaatcctgaagacatctaccccagcaaccctactgatgatgacgtgagcagcggctcctccagtgaaaggagcagcacttcaggaggttacatcttttacaccttttctactgtacaccccatcccagacgaagacagtccctggatcaccgacagcacagacagaatccctgctaccagtacgtcttcaaataccatctcagcaggctgggagccaaatgaagaaaatgaagatgaaagagacagacacctcagtttttctggatcaggcattgatgatgatgaagattttatctccagcaccatttcaaccacaccacgggcttttgaccacacaaaacagaaccaggactggacccagtggaacccaagccattcaaatccggaagtgctacttcagacaaccacaaggatgactgcagatgtagacagaaatggcaccactgcttatgaaggaaactggaacccagaagcacaccctcccctcattcaccatgagcatcatgaggaagaagagaccccacattctacaagcacaatccaggcaactcctagtagtacaacggaagaaacagctacccagaaggaacagtggtttggcaacagatggcatgagggatatcgccaaacacccagagaagactcccattcgacaacagggacagctgcagcctcagctcataccagccatccaatgcaaggaaggacaacaccaagcccagaggacagttcctggactgatttcttcaacccaatctcacaccccatgggacgaggtcatcaagcaggaagaaggatggatatggactccagtcatagtacaacgcttcagcctactgcaaatccaaacacaggtttggtggaagatttggacaggacaggacctctttcaatgacaacgcagcagagtaattctcagagcttctctacatcacatgaaggcttggaagaagataaagaccatccaacaacttctactctgacatcaagcaataggaatgatgtcacaggtggaagaagagacccaaatcattctgaaggctcaactactttactggaaggttatacctctcattacccacacacgaaggaaagcaggaccttcatcccagtgacctcagctaagactgggtcctttggagttactgcagttactgttggagattccaactctaatgtcaatcgttccttatcaggagaccaagacacattccaccccagtggggggtcccataccactcatggatctgaatcagatggacactcacatgggagtcaagaaggtggagcaaacacaacctctggtcctataaggacaccccaaattccagaatggctgatcatcttggcatccctcttggccttggctttgattcttgcagtttgcattgcagtcaacagtcgaagaaggtgtgggcagaagaaaaagctagtgatcaacagtggcaatggagctgtggaggacagaaagccaagtggactcaacggagaggccagcaagtctcaggaaatggtgcatttggtgaacaaggagtcgtcagaaactccagaccagtttatgacagctgatgagacaaggaacctgcagaatgtggacatgaagattggggtgtaacacctacaccattatcttggaaagaaacaaccgttggaaacataaccattacagggagctgggacacttaacagatgcaatgtgctactgattgtttcattgcgaatcttttttagcataaaattttctactctttttgttttttgtgttttgttctttaaagtcaggtccaatttgtaaaaacagcattgctttctgaaattagggcccaattaataatcagcaagaatttgatcgttccagttcccacttggaggcctttcatccctcgggtgtgctatggatggcttctaacaaaaactacacatatgtattcctgatcgccaacctttcccccaccagctaaggacatttcccagggttaatagggcctggtccctgggaggaaatttgaatgggtccattttgcccttccatagcctaatccctgggcattgctttccactgaggttgggggttggggtgtactagttacacatcttcaacagaccccctctagaaatttttcagatgcttctgggagacacccaaagggtgaagctatttatctgtagtaaactatttatctgtgtttttgaaatattaaaccctggatcagtcctttgatcagtataattttttaaagttactttgtcagaggcacaaaagggtttaaactgattcataataaatatctgtacttcttcgatcttcaccttttgtgctgtgattcttcagtttctaaaccagcactgtctgggtccctacaatgtatcaggaagagctgagaatggtaaggagactcttctaagtcttcatctcagagaccctgagttcccactcagacccactcagccaaatctcatggaagaccaaggagggcagcactgtttttgttttttgttttttgtttttttttttttgacactgtccaaaggttttccatcctgtcctggaatcagagttggaagctgaggagcttcagcctcttttatggtttaatggccacctgttctctcctgtgaaaggctttgcaaagtcacattaagtttgcatgacctgttatccctggggccctatttcatagaggctggccctattagtgatttccaaaaacaatatggaagtgccttttgatgtcttacaataagagaagaagccaatggaaatgaaagagattggcaaaggggaaggatgatgccatgtagatcctgtttgacatttttatggctgtatttgtaaacttaaacacaccagtgtctgttcttgatgcagttgctatttaggatgagttaagtgcctggggagtccctcaaaaggttaaagggattcccatcattggaatcttatcaccagataggcaagtttatgaccaaacaagagagtactggctttatcctctaacctcatattttctcccacttggcaagtcctttgtggcatttattcatcagtcagggtgtccgattggtcctagaacttccaaaggctgcttgtcatagaagccattgcatctataaagcaacggctcctgttaaatggtatctcctttctgaggctcctactaaaagtcatttgttacctaaacttatgtgcttaacaggcaatgcttctcagaccacaaagcagaaagaagaagaaaagctcctgactaaatcagggctgggcttagacagagttgatctgtagaatatctttaaaggagagatgtcaactttctgcactattcccagcctctgctcctccctgtctaccctctcccctccctctctccctccacttcaccccacaatcttgaaaaacttcctttctcttctgtgaacatcattggccagatccattttcagtggtctggatttctttttattttcttttcaacttgaaagaaactggacattaggccactatgtgttgttactgccactagtgttcaagtgcctcttgttttcccagagatttcctgggtctgccagaggcccagacaggctcactcaagctctttaactgaaaagcaacaagccactccaggacaaggttcaaaatggttacaacagcctctacctgtcgccccagggagaaaggggtagtgatacaagtctcatagccagagatggttttccactccttctagatattcccaaaaagaggctgagacaggaggttattttcaattttattttggaattaaatacttttttccctttattactgttgtagtccctcacttggatatacctctgttttcacgatagaaataagggaggtctagagcttctattccttggccattgtcaacggagagctggccaagtcttcacaaacccttgcaacattgcctgaagtttatggaataagatgtattctcactcccttgatctcaagggcgtaactctggaagcacagcttgactacacgtcatttttaccaatgattttcaggtgacctgggctaagtcatttaaactgggtctttataaaagtaaaaggccaacatttaattattttgcaaagcaacctaagagctaaagatgtaatttttcttgcaattgtaaatcttttgtgtctcctgaagacttcccttaaaattagctctgagtgaaaaatcaaaagagacaaaagacatcttcgaatccatatttcaagcctggtagaattggcttttctagcagaacctttccaaaagttttttgggattctacaccccgaattgtttgggcccctnctnccnngcttnccggggcggggaccttgtctttgggagcacgtttataaaatggcgcccttgtatctcgtgcaacgg

SEQ ID NO: 405836 - DNA, 3359 bp, Homo sapiens
ggttttttgtgtgttgtttgtgtgccggactgatgtccaaagttccgccaggagggctttattgttgtcgttgttcaacatcctgttctgcggcttcctggctctttttgcccgttatgccgaagagccgggcgttggcacggccaatacggagactagcgaaggctttgaaattcttctcttcctcagtgatgactcgagctttctccttctatagacgttccggacgggcatgaccggtccggtcagctgggtggccagtttcagttcttcagcagaactgtctcccttcttgggggccgagggcttcctggggaagaggatgagtttggagcggtactccttcagccgctgcacgttggcctgcagggactccgtggacttgttccgcctcctcggatccacagaaatgccgatggtccgggccaccttcttgtgaatgtatgggttcatagaagggcacgtggtgattccccggatccaccccaactccatctgtgcagcaaacaacacaggggtgtacatcctcacatccaacacctcccagtatgacacatattgcttcaatgcttcagctccacctgaagaagattgtacatcagtcacagacctgcccaatgcctttgatggaccaattaccataactattgttaaccgtgatggcacccgctatgtccagaaaggagaatacagaacgaatcctgaagacatctaccccagcaaccctactgatgatgacgtgagcagcggctcctccagtgaaaggagcagcacttcaggaggttacatcttttacaccttttctactgtacaccccatcccagacgaagacagtccctggatcaccgacagcacagacagaatccctgctaccagtacgtcttcaaataccatctcagcaggctgggagccaaatgaagaaaatgaagatgaaagagacagacacctcagtttttctggatcaggcattgatgatgatgaagattttatctccagcaccatttcaaccacaccacgggcttttgaccacacaaaacagaaccaggactggacccagtggaacccaagccattcaaatccggaagtgctacttcagacaaccacaaggatgactgcagatgtagacagaaatggcaccactgcttatgaaggaaactggaacccagaagcacaccctcccctcattcaccatgagcatcatgaggaagaagagaccccacattctacaagcacaatccaggcaactcctagtagtacaacggaagaaacagctacccagaaggaacagtggtttggcaacagatggcatgagggatatcgccaaacacccagagaagactcccattcgacaacagggacagctgcagcctcagctcataccagccatccaatgcaaggaaggacaacaccaagcccagaggacagttcctggactgatttcttcaacccaatctcacaccccatgggacgaggtcatcaagcaggaagaaggatggatatggactccagtcatagtacaacgcttcagcctactgcaaatccaaacacaggtttggtggaagatttggacaggacaggacctctttcaatgacaacgcagcagagtaattctcagagcttctctacatcacatgaaggcttggaagaagataaagaccatccaacaacttctactctgacatcaagcaataggaatgatgtcacaggtggaagaagagacccaaatcattctgaaggctcaactactttactggaaggttatacctctcattacccacacacgaaggaaagcaggaccttcatcccagtgacctcagctaagactgggtcctttggagttactgcagttactgttggagattccaactctaatgtcaatcgttccttatcaggagaccaagacacattccaccccagtggggggtcccataccactcatggatctgaatcagatggacactcacatgggagtcaagaaggtggagcaaacacaacctctggtcctataaggacaccccaaattccagaatggctgatcatcttggcatccctcttggccttggctttgattcttgcagtttgcattgcagtcaacagtcgaagaaggtgtgggcagaagaaaaagctagtgatcaacagtggcaatggagctgtggaggacagaaagccaagtggactcaacggagaggccagcaagtctcaggaaatggtgcatttggtgaacaaggagtcgtcagaaactccagaccagtttatgacagctgatgagacaaggaacctgcagaatgtggacatgaagattggggtgtaacacctacaccattatcttggaaagaaacaaccgttggaaacataaccattacagggagctgggacacttaacagatgcaatgtgctactgattgtttcattgcgaatcttttttagcataaaattttctactctttttgttttttgtgttttgttctttaaagtcaggtccaatttgtaaaaacagcattgctttctgaaattagggcccaattaataatcagcaagaatttgatcgttccagttcccacttggaggcctttcatccctcgggtgtgctatggatggcttctaacaaaaactacacatatgtattcctgatcgccaacctttcccccaccagctaaggacatttcccagggttaatagggcctggtccctgggaggaaatttgaatgggtccattttgcccttccatagcctaatccctgggcattgctttccactgaggttgggggttggggtgtactagttacacatcttcaacagaccccctctagaaatttttcagatgcttctgggagacacccaaagggtgaagctatttatctgtagtaaactatttatctgtgtttttgaaatattaaaccctggatcagtcctttgatcagtataattttttaaagttactttgtcagaggcacaaaagggtttaaactgattcataataaataaaaaaaaaaaaaaaaaaaaaaaaaaaaaaaaaaaaaaaaaaaaaaaaaacttagtcattgtggaagtatggcatgggtcaagaagtacttctccttcatcttcctttgatgtcggtaactcatcctttctgcactgcgggagttgttaatgcttttgggtcctccagttcacatgctgattgctaagaagaaaatgagcatgagtgaacccaaagctgctgaaacattctgcgtttatgcaacttccttgccctctatacaaggaagatggtttcattgtcttgtctagagaataaagtcttttttaaaaataaaatcggtgtatccctgaccagcgtccattaacacttgacattgctcactgcatggtcacag

SEQ ID NO: 405837 - DNA, 1429 bp, Homo sapiens
ggttttttgtgtgttgtttgtgtgccggactgatgtccaaagttccgccaggagggctttattgttgtcgttgttcaacatcctgttctgcggcttcctggctctttttgcccgttatgccgaagagccgggcgttggcacggccaatacggagactagcgaaggctttgaaattcttctcttcctcagtgatgactcgagctttctccttctatagacgttccggacgggcatgaccggtccggtcagctgggtggccagtttcagttcttcagcagaactgtctcccttcttgggggccgagggcttcctggggaagaggatgagtttggagcggtactccttcagccgctgcacgttggcctgcagggactccgtggacttgttccgcctcctcggatccacagaaatgccgatggtccgggccaccttcttgtgaatgtatgggttcatagaagggcacgtggtgattccccggatccaccccaactccatctgtgcagcaaacaacacaggggtgtacatcctcacatccaacacctcccagtatgacacatattgcttcaatgcttcagctccacctgaagaagattgtacatcagtcacagacctgcccaatgcctttgatggaccaattaccataactattgttaaccgtgatggcacccgctatgtccagaaaggagaatacagaacgaatcctgaagacatctaccccagcaaccctactgatgatgacgtgagcagcggctcctccagtgaaaggagcagcacttcaggaggttacatcttttacaccttttctactgtacaccccatcccagacgaagacagtccctggatcaccgacagcacagacagaatccctgctaccagagaccaagacacattccaccccagtggggggtcccataccactcatggatctgaatcagatggacactcacatgggagtcaagaaggtggagcaaacacaacctctggtcctataaggacaccccaaattccagaatggctgatcatcttggcatccctcttggccttggctttgattcttgcagtttgcattgcagtcaacagtcgaagaaggtgtgggcagaagaaaaagctagtgatcaacagtggcaatggagctgtggaggacagaaagccaagtggactcaacggagaggccagcaagtctcaggaaatggtgcatttggtgaacaaggagtcgtcagaaactccagaccagtttatgacagctgatgagacaaggaacctgcagaatgtggacatgaagattggggtgtaacacctacaccattatcttggaaagaaacaaccgttggaaacataaccattacagggagctgggacacttaacagatgcaatgtgctactgattgtttcattgcgaatcttttttagcataaaattttctactctt

SEQ ID NO: 405838 - DNA, 1705 bp, Homo sapiens
ggttttttgtgtgttgtttgtgtgccggactgatgtccaaagttccgccaggagggctttattgttgtcgttgttcaacatcctgttctgcggcttcctggctctttttgcccgttatgccgaagagccgggcgttggcacggccaatacggagactagcgaaggctttgaaattcttctcttcctcagtgatgactcgagctttctccttctatagacgttccggacgggcatgaccggtccggtcagctgggtggccagtttcagttcttcagcagaactgtctcccttcttgggggccgagggcttcctggggaagaggatgagtttggagcggtactccttcagccgctgcacgttggcctgcagggactccgtggacttgttccgcctcctcggatccacagaaatgccgatggtccgggccaccttcttgtgaatgtatgggttcatagaagggcacgtggtgattccccggatccaccccaactccatctgtgcagcaaacaacacaggggtgtacatcctcacatccaacacctcccagtatgacacatattgcttcaatgcttcagctccacctgaagaagattgtacatcagtcacagacctgcccaatgcctttgatggaccaattaccataactattgttaaccgtgatggcacccgctatgtccagaaaggagaatacagaacgaatcctgaagacatctaccccagcaaccctactgatgatgacgtgagcagcggctcctccagtgaaaggagcagcacttcaggaggttacatcttttacaccttttctactgtacaccccatcccagacgaagacagtccctggatcaccgacagcacagacagaatccctgctaccagagaccaagacacattccaccccagtggggggtcccataccactcatggatctgaatcagatggacactcacatgggagtcaagaaggtggagcaaacacaacctctggtcctataaggacaccccaaattccagaatggctgatcatcttggcatccctcttggccttggctttgattcttgcagtttgcattgcagtcaacagtcgaagaaggtgtgggcagaagaaaaagctagtgatcaacagtggcaatggagctgtggaggacagaaagccaagtggactcaacggagaggccagcaagtctcaggaaatggtgcatttggtgaacaaggagtcgtcagaaactccagaccagtttatgacagctgatgagacaaggaacctgcagaatgtggacatgaagattggggtgtaacacctacaccattatcttggaaagaaacaaccgttggaaacataaccattacaggggagccggagcacactacaacgcatgccactgtggctaccgatagaccccctgcccacctcaccaacaccaatcacacaataccccaccccaaaacggaacaacgcagcacggccaccaaaagcagctcacctgacacacacacgcacggacaagtacggaacaaacacggcccacaataactcaccaaccaagaattgcaaccaccacgaacccactcaggaagcatcaacaccggaggcgcaagagcgggcctaaagaccacccaccatgttcccgcaagcaaagtcacaacaagaaggccacccacggaaacagacgccggagcaccaacgaggccccaccacagaaacccga

SEQ ID NO: 405839 - DNA, 2217 bp, Homo sapiens
ggttttttgtgtgttgtttgtgtgccggactgatgtccaaagttccgccaggagggctttattgttgtcgttgttcaacatcctgttctgcggcttcctggctctttttgcccgttatgccgaagagccgggcgttggcacggccaatacggagactagcgaaggctttgaaattcttctcttcctcagtgatgactcgagctttctccttctatagacgttccggacgggcatgaccggtccggtcagctgggtggccagtttcagttcttcagcagaactgtctcccttcttgggggccgagggcttcctggggaagaggatgagtttggagcggtactccttcagccgctgcacgttggcctgcagggactccgtggacttgttccgcctcctcggatccacagaaatgccgatggtccgggccaccttcttgtgaatgtatgggttcatagaagggcacgtggtgattccccggatccaccccaactccatctgtgcagcaaacaacacaggggtgtacatcctcacatccaacacctcccagtatgacacatattgcttcaatgcttcagctccacctgaagaagattgtacatcagtcacagacctgcccaatgcctttgatggaccaattaccataactattgttaaccgtgatggcacccgctatgtccagaaaggagaatacagaacgaatcctgaagacatctaccccagcaaccctactgatgatgacgtgagcagcggctcctccagtgaaaggagcagcacttcaggaggttacatcttttacaccttttctactgtacaccccatcccagacgaagacagtccctggatcaccgacagcacagacagaatccctgctaccagtacgtcttcaaataccatctcagcaggctgggagccaaatgaagaaaatgaagatgaaagagacagacacctcagtttttctggatcaggcattgatgatgatgaagattttatctccagcaccatttcaaccacaccacgggcttttgaccacacaaaacagaaccaggactggacccagtggaacccaagccattcaaatccggaagtgctacttcagacaaccacaaggatgactgcagatgtagacagaaatggcaccactgcttatgaaggaaactggaacccagaagcacaccctcccctcattcaccatgagcatcatgaggaagaagagaccccacattctacaagcacaatccaggcaactcctagtagtacaacggaagaaacagctacccagaaggaacagtggtttggcaacagatggcatgagggatatcgccaaacacccagagaagactcccattcgacaacagggacagctgcagcctcagctcataccagccatccaatgcaaggaaggacaacaccaagcccagaggacagttcctggactgatttcttcaacccaatctcacaccccatgggacgaggtcatcaagcaggaagaaggatggatatggactccagtcatagtacaacgcttcagcctactgcaaatccaaacacaggtttggtggaagatttggacaggacaggacctctttcaatgacaacgcagcagagtaattctcagagcttctctacatcacatgaaggcttggaagaagataaagaccatccaacaacttctactctgacatcaagcaataggaatgatgtcacaggtggaagaagagacccaaatcattctgaaggctcaactactttactggaaggttatacctctcattacccacacacgaaggaaagcaggaccttcatcccagtgacctcagctaagactgggtcctttggagttactgcagttactgttggagattccaactctaatgtcaatcgttccttatcaggagaccaagacacattccaccccagtggggggtcccataccactcatggatctgaatcagatggacactcacatgggagtcaagaaggtggagcaaacacaacctctggtcctataaggacaccccaaattccagaatggctgatcatcttggcatccctcttggccttggctttgattcttgcagtttgcattgcagtcaacagtcgaagaaggatgttatcgcccaacacgaagggtgatggggtccagggtggccctctgcagaagctgcaggtacgtgaggttctcgtgcgtgttggggataacatcaggtaccgagccga

SEQ ID NO: 405840 - DNA, 2624 bp, Homo sapiens
ggttttttgtgtgttgtttgtgtgccggactgatgtccaaagttccgccaggagggctttattgttgtcgttgttcaacatcctgttctgcggcttcctggctctttttgcccgttatgccgaagagccgggcgttggcacggccaatacggagactagcgaaggctttgaaattcttctcttcctcagtgatgactcgagctttctccttctatagacgttccggacgggcatgaccggtccggtcagctgggtggccagtttcagttcttcagcagaactgtctcccttcttgggggccgagggcttcctggggaagaggatgagtttggagcggtactccttcagccgctgcacgttggcctgcagggactccgtggacttgttccgcctcctcggatccacagaaatgccgatggtccgggccaccttcttgtgaatgtatgggttcatagaagggcacgtggtgattccccggatccaccccaactccatctgtgcagcaaacaacacaggggtgtacatcctcacatccaacacctcccagtatgacacatattgcttcaatgcttcagctccacctgaagaagattgtacatcagtcacagacctgcccaatgcctttgatggaccaattaccataactattgttaaccgtgatggcacccgctatgtccagaaaggagaatacagaacgaatcctgaagacatctaccccagcaaccctactgatgatgacgtgagcagcggctcctccagtgaaaggagcagcacttcaggaggttacatcttttacaccttttctactgtacaccccatcccagacgaagacagtccctggatcaccgacagcacagacagaatccctgctaccagtacgtcttcaaataccatctcagcaggctgggagccaaatgaagaaaatgaagatgaaagagacagacacctcagtttttctggatcaggcattgatgatgatgaagattttatctccagcaccatttcaaccacaccacgggcttttgaccacacaaaacagaaccaggactggacccagtggaacccaagccattcaaatccggaagtgctacttcagacaaccacaaggatgactgcagatgtagacagaaatggcaccactgcttatgaaggaaactggaacccagaagcacaccctcccctcattcaccatgagcatcatgaggaagaagagaccccacattctacaagcacaatccaggcaactcctagtagtacaacggaagaaacagctacccagaaggaacagtggtttggcaacagatggcatgagggatatcgccaaacacccagagaagactcccattcgacaacagggacagctgcagcctcagctcataccagccatccaatgcaaggaaggacaacaccaagcccagaggacagttcctggactgatttcttcaacccaatctcacaccccatgggacgaggtcatcaagcaggaagaaggatggatatggactccagtcatagtacaacgcttcagcctactgcaaatccaaacacaggtttggtggaagatttggacaggacaggacctctttcaatgacaacgcagcagagtaattctcagagcttctctacatcacatgaaggcttggaagaagataaagaccatccaacaacttctactctgacatcaagcaataggaatgatgtcacaggtggaagaagagacccaaatcattctgaaggctcaactactttactggaaggttatacctctcattacccacacacgaaggaaagcaggaccttcatcccagtgacctcagctaagactgggtcctttggagttactgcagttactgttggagattccaactctaatgtcaatcgttccttatcaggtaatttggcatttattatctagtttgctttctctatatagagaaacaatatatagtttcatattacagaggacattttctgtgtagtctgggattggactagtttgtgatatggaaatatctttcattattggttatcaattctagtgcaaataaacttgggtatattttagataaaagaatgcttccttttgccagtgttttttccatttgtctgtgtttgcatgtgtgtgtgtgtgtgtgtgtgtgtgtgttgtgtgtacaagttggctgttatgatggaattgctttctttgtcttatcttgtgatatatgaagttgaaccacatgaaactgatatttttgcaggtgaaagtagtcgaattttagcaattccgtttaattcgactaatatactctacttattttgtaaggttttatcctacaggtgaataatttctatatactagtatctttgctctgaaattattatcttgttttggtaatagattgatcagttttacttttggtgatggataaacctcttctagttctgatgcacacttaaaatgttcatgatttaatctagtattaatgaatagggaccacttctcttattgtaatagtgaagagaggaacgaagataatttattcaatgaagtttgacacggacctagaataagtctttttttttctcaaataagtagtcatctctgcttctgcttttctttgcttctccatttgtattaagaa

SEQ ID NO: 405841 - DNA, 1036 bp, Homo sapiens
ggttttttgtgtgttgtttgtgtgccggactgatgtccaaagttccgccaggagggctttattgttgtcgttgttcaacatcctgttctgcggcttcctggctctttttgcccgttatgccgaagagccgggcgttggcacggccaatacggagactagcgaaggctttgaaattcttctcttcctcagtgatgactcgagctttctccttctatagacgttccggacgggcatgaccggtccggtcagctgggtggccagtttcagttcttcagcagaactgtctcccttcttgggggccgagggcttcctggggaagaggatgagtttggagcggtactccttcagccgctgcacgttggcctgcagggactccgtggacttgttccgcctcctcggatccacagaaatgccgatggtccgggccaccttcttgtgaatgtatgggttcatagaagggcacgtggtgattccccggatccaccccaactccatctgtgcagcaaacaacacaggggtgtacatcctcacatccaacacctcccagtatgacacatattgcttcaatgcttcagctccacctgaagaagattgtacatcagtcacagacctgcccaatgcctttgatggaccaattaccataactattgttaaccgtgatggcacccgctatgtccagaaaggagaatacagaacgaatcctgaagacatctaccccagcaaccctactgatgatgacgtgagcagcggctcctccagtgaaaggagcagcacttcaggaggttacatcttttacaccttttctactgtacaccccatcccagacgaagacagtccctggatcaccgacagcacagacagaatccctgctaccaatatggactccagtcatagtacaacgcttcagcctactgcaaatccaaacacaggtttggtggaagatttggacaggacaggacctctttcaatgacaacgcagcagagtaattctcagagcttctctacatcagagagagctgcaggtacagagctcgat

SEQ ID NO: 405842 - DNA, 1187 bp, Homo sapiens
ggttttttgtgtgttgtttgtgtgccggactgatgtccaaagttccgccaggagggctttattgttgtcgttgttcaacatcctgttctgcggcttcctggctctttttgcccgttatgccgaagagccgggcgttggcacggccaatacggagactagcgaaggctttgaaattcttctcttcctcagtgatgactcgagctttctccttctatagacgttccggacgggcatgaccggtccggtcagctgggtggccagtttcagttcttcagcagaactgtctcccttcttgggggccgagggcttcctggggaagaggatgagtttggagcggtactccttcagccgctgcacgttggcctgcagggactccgtggacttgttccgcctcctcggatccacagaaatgccgatggtccgggccaccttcttgtgaatgtatgggttcatagaagggcacgtggtgattccccggatccaccccaactccatctgtgcagcaaacaacacaggggtgtacatcctcacatccaacacctcccagtatgacacatattgcttcaatgcttcagctccacctgaagaagattgtacatcagtcacagacctgcccaatgcctttgatggaccaattaccataactattgttaaccgtgatggcacccgctatgtccagaaaggagaatacagaacgaatcctgaagacatctaccccagcaaccctactgatgatgacgtgagcagcggctcctccagtgaaaggagcagcacttcaggaggttacatcttttacaccttttctactgtacaccccatcccagacgaagacagtccctggatcaccgacagcacagacagaatccctgctaccagtacgtcttcaaataccatctcagcaggctgggagccaaatgaagaaaatgaagatgaaagagacagacacctcagtttttctggatcaggcattgatgatgatgaagattttatctccagcaccatttcaaccacaccacgggcttttgaccacacaaaacagaaccaggactggacccagtggaacccaagccattcaaatccggaagtgctacttcagacaaccacaaggatgactgatgtagacagaaatggcaccactgcttacgaagggggatgtacacacgaaggggatgacacgaaatcctgct

SEQ ID NO: 405843 - DNA, 1145 bp, Homo sapiens
ggttttttgtgtgttgtttgtgtgccggactgatgtccaaagttccgccaggagggctttattgttgtcgttgttcaacatcctgttctgcggcttcctggctctttttgcccgttatgccgaagagccgggcgttggcacggccaatacggagactagcgaaggctttgaaattcttctcttcctcagtgatgactcgagctttctccttctatagacgttccggacgggcatgaccggtccggtcagctgggtggccagtttcagttcttcagcagaactgtctcccttcttgggggccgagggcttcctggggaagaggatgagtttggagcggtactccttcagccgctgcacgttggcctgcagggactccgtggacttgttccgcctcctcggatccacagaaatgccgatggtccgggccaccttcttgtgaatgtatgggttcatagaagggcacgtggtgattccccggatccaccccaactccatctgtgcagcaaacaacacaggggtgtacatcctcacatccaacacctcccagtatgacacatattgcttcaatgcttcagctccacctgaagaagattgtacatcagtcacagacctgcccaatgcctttgatggaccaattaccataactattgttaaccgtgatggcacccgctatgtccagaaaggagaatacagaacgaatcctgaagacatctaccccagcaaccctactgatgatgacgtgagcagcggctcctccagtgaaaggagcagcacttcaggaggttacatcttttacaccttttctactgtacaccccatcccagacgaagacagtccctggatcaccgacagcacagacagaatccctgctaccagtaaggagaataaatcactgtgcttcccaatagcaattccctggcaaaatgtctctgaccttcctgagcattgcacactcacgtgctgattttctcgtctctagacagctggaagctggtgatgccattcagggaggtgggctcttgtggttgtcagtaaactgcctgcattgactactactgcctaccttttttcctcatctataactgtttttcttaccttagcataagaagtgccatattggaagttttattttggggagagccctc

SEQ ID NO: 405844 - DNA, 185 bp, Homo sapiens
ccactaatgcaagtcaccacaacaggtacgtcttcaaataccatctcagcaggctgggagccaaatgaagaaaatgaagatgaaagagacagacacctcagtttttctggatcaggcattgatgatgatgaagattttatctccagcaccagtaagaataatcaattacagtacagccatttatg

SEQ ID NO: 405845 - DNA, 1862 bp, Homo sapiens
ggcgccgggggcgggggtgggaggcggaggcggggccggggcgccgcgggcggggcgccgggggcggggcgagtccggaggactcctcggactgcgcggaacatggcgttctggggttggcgcgccgcggcagccctccggctgtggggccgggtagttgaacgggtcgaggccgggggaggcgtggggccgtttcaggcctgcggctgtcggctggtgcttggcggcagggacgatgtgagtgcggggctgagaggcagccatggggcccgcggtgagcccttggacccggcgcgccccttgcagaggcctcccagacccgaggtgcccagggcattccggaggcagccgagggcagcagctcccagtttcttcttttcgagtattaaaggtggaagaaggtccatatctttttctgtgggtgcttcaagtgttgttggaagtggaggcagcagtgacaaggggaagctttccctgcaggatgtagctgagctgattcgggccagagcctgccagagggtggtggtcatggtgggggccggcatcagcacacccagtggcattccagacttcagatcgccggggagtggcctgtacagcaacctccagcagtacgatctcccgtaccccgaggccatttttgaactcccattcttctttcacaaccccaagccctttttcactttggccaaggagctgtaccctggaaactacaagcccaacgtcactcactactttctccggctgcttcatgacaaggggctgcttctgcggctctacacgcagaacatcgatgggcttgagagagtgtcgggcatccctgcctcaaagctggttgaagctcatggaacctttgcctctgccacctgcacagtctgccaaagacccttcccaggggaggacattcgggctgacgtgatggcagacagggttccccgctgcccggtctgcaccggcgttgtgaagcccgacattgtgttctttggggagccgctgccccagaggttcttgctgcatgtggttgatttccccatggcagatctgctgctcatccttgggacctccctggaggtggagccttttgccagcttgaccgaggccgtgcggagctcagttccccgactgctcatcaaccgggacttggtggggcccttggcttggcatcctcgcagcagggacgtggcccagctgggggacgtggttcacggcgtggaaagcctagtggagcttctgggctggacagaagagatgcgggaccttgtgcagcgggaaactgggaagcttgatggaccagacaaataggatgatggctgcccccacacaataaatggtaacataggagacatccacatcccaattctgacaagacctcatgcctgaagacagcttgggcaggtgaaaccagaatatgtgaactgagtggacacccgaggctgccactggaatgtcttctcaggccatgagctgcagtgactggtagggctgtgtttacagtcagggccaccccgtcacatatacaaaggagctgcctgcctgtttgctgtgttgaactcttcactctgctgaagctcctaatggaaaaagctttcttctgactgtgaccctcttgaactgaatcagaccaactggaatcccagaccgagtctgctttctgtgcctagttgaacggcaagctcggcatctgttggttacaagatccagacttgggccgagcggtccccagccctcttcatgttccgaagtgtagtcttgaggccctggtgccgcacttctagcatgttggtctcctttagtggggctatttttaatgagagaaaatctgttctttccagcatgaaatacatttagtctcctcaaaggga

SEQ ID NO: 405846 - DNA, 895 bp, Homo sapiens
ctccggcgtttgcagcccacttcccgcgcacttggctgtgccattgaggcgttaaagagtgtgggcgcctgtggtcgaacccgctacggactagctttgtggtgtcagcctttgtgacccggaattgctcctgtcaaatgaggatcttcccagtagtgttttgcgaggattaggtgtaaatataatgcctgaccatagtaaaagcgctcagaaagtattaactatcaccgccatccgggttgaaaaagttcgtgtttagtaggagcacagtagctgtttggggaacgaccttaagtgaatagatgtctgaaatgctgtgtgaagtggggcgcttaataggtgtattaaaggtggaagaaggtccatatctttttctgtgggtgcttcaagtgttgttggaagtggaggcagcagtgacaaggggaagctttccctgcaggatgtagctgagctgattcgggccagagcctgccagagggtggtggtcatggtgggggccggcatcagcacacccagtggcattccagacttcagatcgccggggagtggcctgtacagcaacctccagcagtacgatctcccgtaccccgaggccatttttgaactcccattcttctttcacaaccccaagccctttttcactttggccaaggagctgtaccctggaaactacaagcccaacgtcactcactactttctccggctgcttcatgacaaggggctgcttctgcggctctacacgcagaacatcgatgggcttgagagagtgtcgggcatccctgcctcaaagctggttgaagctcatggaacctttgcctctgccacctgcacagtctgccaaagacccttcccaggggaggacattcgggtgagttatcctgctgttggttgtcct

SEQ ID NO: 405847 - DNA, 1716 bp, Homo sapiens
ggcgccgggggcgggggtgggaggcggaggcggggccggggcgccgcgggcggggcgccgggggcggggcgagtccggaggactcctcggactgcgcggaacatggcgttctggggttggcgcgccgcggcagccctccggctgtggggccgggtagttgaacgggtcgaggccgggggaggcgtggggccgtttcaggcctgcggctgtcggctggtgcttggcggcagggacgattattaaaggtggaagaaggtccatatctttttctgtgggtgcttcaagtgttgttggaagtggaggcagcagtgacaaggggaagctttccctgcaggatgtagctgagctgattcgggccagagcctgccagagggtggtggtcatggtgggggccggcatcagcacacccagtggcattccagacttcagatcgccggggagtggcctgtacagcaacctccagcagtacgatctcccgtaccccgaggccatttttgaactcccattcttctttcacaaccccaagccctttttcactttggccaaggagctgtaccctggaaactacaagcccaacgtcactcactactttctccggctgcttcatgacaaggggctgcttctgcggctctacacgcagaacatcgatgggcttgagagagtgtcgggcatccctgcctcaaagctggttgaagctcatggaacctttgcctctgccacctgcacagtctgccaaagacccttcccaggggaggacattcgggctgacgtgatggcagacagggttccccgctgcccggtctgcaccggcgttgtgaagcccgacattgtgttctttggggagccgctgccccagaggttcttgctgcatgtggttgatttccccatggcagatctgctgctcatccttgggacctccctggaggtggagccttttgccagcttgaccgaggccgtgcggagctcagttccccgactgctcatcaaccgggacttggtggggcccttggcttggcatcctcgcagcagggacgtggcccagctgggggacgtggttcacggcgtggaaagcctagtggagcttctgggctggacagaagagatgcgggaccttgtgcagcgggaaactgggaagcttgatggaccagacaaataggatgatggctgcccccacacaataaatggtaacataggagacatccacatcccaattctgacaagacctcatgcctgaagacagcttgggcaggtgaaaccagaatatgtgaactgagtggacacccgaggctgccactggaatgtcttctcaggccatgagctgcagtgactggtagggctgtgtttacagtcagggccaccccgtcacatatacaaaggagctgcctgcctgtttgctgtgttgaactcttcactctgctgaagctcctaatggaaaaagctttcttctgactgtgaccctcttgaactgaatcagaccaactggaatcccagaccgagtctgctttctgtgcctagttgaacggcaagctcggcatctgttggttacaagatccagacttgggccgagcggtccccagccctcttcatgttccgaagtgtagtcttgaggccctggtgccgcacttctagcatgttggtctcctttagtggggctatttttaatgagagaaaatctgttctttccagcatgaaatacatttagtctcctcaaaggga

SEQ ID NO: 405848 - DNA, 2490 bp, Homo sapiens
ggcgccgggggcgggggtgggaggcggaggcggggccggggcgccgcgggcggggcgccgggggcggggcgagtccggaggactcctcggactgcgcggaacatggcgttctggggttggcgcgccgcggcagccctccggctgtggggccgggtagttgaacgggtcgaggccgggggaggcgtggggccgtttcaggcctgcggctgtcggctggtgcttggcggcagggacgattattaaaggtggaagaaggtccatatctttttctgtgggtgcttcaagtgttgttggaagtggaggcagcagtgacaaggggaagctttccctgcaggatgtagctgagctgattcgggccagagcctgccagagggtggtggtcatggtgggggccggcatcagcacacccagtggcattccagacttcagatcgccggggagtggcctgtacagcaacctccagcagtacgatctcccgtaccccgaggccatttttgaactcccattcttctttcacaaccccaagccctttttcactttggccaaggagctgtaccctggaaactacaagcccaacgtcactcactactttctccggctgcttcatgacaaggggctgcttctgcggctctacacgcagaacatcgatgggcttgagagagtgtcgggcatccctgcctcaaagctggttgaagctcatggaacctttgcctctgccacctgcacagtctgccaaagacccttcccaggggaggacattcgggctgacgtgatggcagacagggttccccgctgcccggtctgcaccggcgttgtgaagcccgacattgtgttctttggggagccgctgccccagaggttcttgctgcatgtggttgatttccccatggcagatctgctgctcatccttgggacctccctggaggtggagccttttgccagcttgaccgaggccgtgcggagctcagttccccgactgctcatcaaccgggacttggtggggcccttggcttggcatcctcgcagcagggacgtggcccagctgggggacgtggttcacggcgtggaaagcctagtggagcttctgggctggacagaagagatgcgggaccttgtgcagcgggaaactgggaaggtacagactgctgaggaggaccatccaaggggctgcccttctcactgctctaggcttgatggaccagacaaataggatgatggctgcccccacacaataaatggtaacataggagacatccacatcccaattctgacaagacctcatgcctgaagacagcttgggcaggtgaaaccagaatatgtgaactgagtggacacccgaggctgccactggaatgtcttctcaggccatgagctgcagtgactggtagggctgtgtttacagtcagggccaccccgtcacatatacaaaggagctgcctgcctgtttgctgtgttgaactcttcactctgctgaagctcctaatggaaaaagctttcttctgactgtgaccctcttgaactgaatcagaccaactggaatcccagaccgagtctgctttctgtgcctagttgaacggcaagctcggcatctgttggttacaagatccagacttgggccgagcggtccccagccctcttcatgttccgaagtgtagtcttgaggccctggtgccgcacttctagcatgttggtctcctttagtggggctatttttaatgagagaaaatctgttctttccagcatgaaatacatttagtctcctcaaagggactgcaggtgttgacatgagttggaaagggaaccctgggatacgtggcgtcccctctattggaacagtctgaggactgaaggcatttgtccctggatttattggagacggcccagctcctccctctgaaggtggtcacattctgttgactctccatactcagcctctcctccagaaacagatctgttccagaacattccagcactttctatctggcctccttgtccccacactacgcccccccaccctcgccagggcttcctctagtgacactgttagagctaatctctgagacagggaaggcattactcacttaaaacccaggctgagtcctggccacctgctggattgtgacataggaggtggaatccactgaactgctacttctgcacaggctccttctcctggggctgtacccaggcccagccctgatggctcaccctgtcaggcaccagctgctccctcctgggctctcacccacctgcacatcctccttcctagcatcacattacctgcgtgtttccccagacaaaagcacttcccattcttgaaccttgcctaccctgggctgagctgacggcaatagatttaatgacagtgactcccaggaagggggtcctgtgactttgcgccttaataagaacaaaaggtggaattggtgacctaggaaaactgttgaattctaaaaagaatgaagttagtttctaaccctaaaaaaaaat

SEQ ID NO: 405849 - DNA, 1989 bp, Homo sapiens
ggcgccgggggcgggggtgggaggcggaggcggggccggggcgccgcgggcggggcgccgggggcggggcgagtccggaggactcctcggactgcgcggaacatggcgttctggggttggcgcgccgcggcagccctccggctgtggggccgggtagttgaacgggtcgaggccgggggaggcgtggggccgtttcaggcctgcggctgtcggctggtgcttggcggcagggacgatgtgagtgcggggctgagaggcagccatggggcccgcggtgagcccttggacccggcgcgccccttgcagaggcctcccagacccgaggtgcccagggcattccggaggcagccgagggcagcagctcccagtttcttcttttcgagtattaaaggtggaagaaggtccatatctttttctgtgggtgcttcaagtgttgttggaagtggaggcagcagtgacaaggggaagctttccctgcaggatgtagctgagctgattcgggccagagcctgccagagggtggtggtcatggtgggggccggcatcagcacacccagtggcattccagacttcaggtactgcccacagtcccacctgccttctgcgctcccctcccctgactcctgccctccccactgcccagtttattccacttccctgtcctcttccaaaggcctcagagcctttcttctctccctgcagatcgccggggagtggcctgtacagcaacctccagcagtacgatctcccgtaccccgaggccatttttgaactcccattcttctttcacaaccccaagccctttttcactttggccaaggagctgtaccctggaaactacaagcccaacgtcactcactactttctccggctgcttcatgacaaggggctgcttctgcggctctacacgcagaacatcgatgggcttgagagagtgtcgggcatccctgcctcaaagctggttgaagctcatggaacctttgcctctgccacctgcacagtctgccaaagacccttcccaggggaggacattcgggctgacgtgatggcagacagggttccccgctgcccggtctgcaccggcgttgtgaagcccgacattgtgttctttggggagccgctgccccagaggttcttgctgcatgtggttgatttccccatggcagatctgctgctcatccttgggacctccctggaggtggagccttttgccagcttgaccgaggccgtgcggagctcagttccccgactgctcatcaaccgggacttggtggggcccttggcttggcatcctcgcagcagggacgtggcccagctgggggacgtggttcacggcgtggaaagcctagtggagcttctgggctggacagaagagatgcgggaccttgtgcagcgggaaactgggaagcttgatggaccagacaaataggatgatggctgcccccacacaataaatggtaacataggagacatccacatcccaattctgacaagacctcatgcctgaagacagcttgggcaggtgaaaccagaatatgtgaactgagtggacacccgaggctgccactggaatgtcttctcaggccatgagctgcagtgactggtagggctgtgtttacagtcagggccaccccgtcacatatacaaaggagctgcctgcctgtttgctgtgttgaactcttcactctgctgaagctcctaatggaaaaagctttcttctgactgtgaccctcttgaactgaatcagaccaactggaatcccagaccgagtctgctttctgtgcctagttgaacggcaagctcggcatctgttggttacaagatccagacttgggccgagcggtccccagccctcttcatgttccgaagtgtagtcttgaggccctggtgccgcacttctagcatgttggtctcctttagtggggctatttttaatgagagaaaatctgttctttccagcatgaaatacatttagtctcctcaaaggga

SEQ ID NO: 405850 - DNA, 1805 bp, Homo sapiens
ggcgccgggggcgggggtgggaggcggaggcggggccggggcgccgcgggcggggcgccgggggcggggcgagtccggaggactcctcggactgcgcggaacatggcgttctggggttggcgcgccgcggcagccctccggctgtggggccgggtagttgaacgggtcgaggccgggggaggcgtggggccgtttcaggcctgcggctgtcggctggtgcttggcggcagggacgattattaaaggtggaagaaggtccatatctttttctgtgggtgcttcaagtgttgttggaagtggaggcagcagtgacaaggggaagctttccctgcaggatgtagctgagctgattcgggccagagcctgccagagggtggtggtcatggtgggggccggcatcagcacacccagtggcattccagacttcagatcgccggggagtggcctgtacagcaacctccagcagtacgatctcccgtaccccgaggccatttttgaactcccattcttctttcacaaccccaagccctttttcactttggccaaggagctgtaccctggaaactacaagcccaacgtcactcactactttctccggctgcttcatgacaaggggctgcttctgcggctctacacgcagaacatcgatgggcttgagagaggagtcctgccaagcccagaagttgtgctcttggccttgcgtgctcatctcggaggcggcagcaacacttcgctttggcttgaatttcagtgtcgggcatccctgcctcaaagctggttgaagctcatggaacctttgcctctgccacctgcacagtctgccaaagacccttcccaggggaggacattcgggctgacgtgatggcagacagggttccccgctgcccggtctgcaccggcgttgtgaagcccgacattgtgttctttggggagccgctgccccagaggttcttgctgcatgtggttgatttccccatggcagatctgctgctcatccttgggacctccctggaggtggagccttttgccagcttgaccgaggccgtgcggagctcagttccccgactgctcatcaaccgggacttggtggggcccttggcttggcatcctcgcagcagggacgtggcccagctgggggacgtggttcacggcgtggaaagcctagtggagcttctgggctggacagaagagatgcgggaccttgtgcagcgggaaactgggaagcttgatggaccagacaaataggatgatggctgcccccacacaataaatggtaacataggagacatccacatcccaattctgacaagacctcatgcctgaagacagcttgggcaggtgaaaccagaatatgtgaactgagtggacacccgaggctgccactggaatgtcttctcaggccatgagctgcagtgactggtagggctgtgtttacagtcagggccaccccgtcacatatacaaaggagctgcctgcctgtttgctgtgttgaactcttcactctgctgaagctcctaatggaaaaagctttcttctgactgtgaccctcttgaactgaatcagaccaactggaatcccagaccgagtctgctttctgtgcctagttgaacggcaagctcggcatctgttggttacaagatccagacttgggccgagcggtccccagccctcttcatgttccgaagtgtagtcttgaggccctggtgccgcacttctagcatgttggtctcctttagtggggctatttttaatgagagaaaatctgttctttccagcatgaaatacatttagtctcctcaaaggga

SEQ ID NO: 405851 - DNA, 2237 bp, Homo sapiens
ggcgccgggggcgggggtgggaggcggaggcggggccggggcgccgcgggcggggcgccgggggcggggcgagtccggaggactcctcggactgcgcggaacatggcgttctggggttggcgcgccgcggcagccctccggctgtggggccgggtagttgaacgggtcgaggccgggggaggcgtggggccgtttcaggcctgcggctgtcggctggtgcttggcggcagggacgattattaaaggtggaagaaggtccatatctttttctgtgggtgcttcaagtgttgttggaagtggaggcagcagtgacaaggggaagctttccctgcaggatgtagctgagctgattcgggccagagcctgccagagggtggtggtcatggtgggggccggcatcagcacacccagtggcattccagacttcagatcgccggggagtggcctgtacagcaacctccagcagtacgatctcccgtaccccgaggccatttttgaactcccattcttctttcacaaccccaagccctttttcactttggccaaggagctgtaccctggaaactacaagcccaacgtcactcactactttctccggctgcttcatgacaaggggctgcttctgcggctctacacgcagaacatcgatgggcttgagagagtgtcgggcatccctgcctcaaagctggttgaagctcatggaacctttgcctctgccacctgcacagtctgccaaagacccttcccaggggaggacattcgggctgacgtgatggcagacagggttccccgctgcccggtctgcaccggcgttgtgaagcccgacattgtgttctttggggagccgctgccccagaggttcttgctgcatgtggttgatttccccatggcagatctgctgctcatccttgggacctccctggaggtggagccttttgccagcttgaccgaggccgtgcggagctcagttccccgactgctcatcaaccgggacttggtggggcccttggcttggcatcctcgcagcagggacgtggcccagctgggggacgtggttcacggcgtggaaagcctagtggagcttctgggctggacagaagagatgcgggaccttgtgcagcgggaaactgggaagcttgatggaccagacaaataggatgatggctgcccccacacaataaatggtaacataggagacatccacatcccaattctgacaagacctcatgcctgaagacagcttgggcaggtgaaaccagaatatgtgaactgagtggacacccgaggctgccactggaatgtcttctcaggccatgagctgcagtgactggtagggctgtgtttacagtcagggccaccccgtcacatatacaaaggagctgcctgcctgtttgctgtgttgaactcttcactctgctgaagctcctaatggaaaaagctttcttctgactgtgaccctcttgaactgaatcagaccaactggaatcccagaccgagtctgctttctgtgcctagttgaacggcaagctcggcatctgttggttacaagatccagacttgggccgagcggtccccagccctcttcatgttccgaagtgtagtcttgaggccctggtgccgcacttctagcatgttggtctcctttagtggggctatttttaatgagagaaaatctgttctttccagcatgaaatacatttagtctcctcaaagggaaaaaaaaaaaaaaaaaaaaaaaaaaaaaaaaaaaaaaaaaggggggggccgacacaaagagagtctcgcgaggggggcggccaagtataaagcgagatacacagaggggctcggtgaccaaaggtggccccaaataggggagaccccgaataaaagcgactcagggcacgtggcccaggcggataacacacgactatagagacggggaaacactgtgtacagcgagggaagccacacgggggcagaaggggaccacccactaagactgctggggggggaggggggaaccacatattgtgtggggcaaaaagatgttatcctaacaaaggagaagaatatttaaagccgcccctcatggagcgcgaaaattttataaaaaagtttaacagaagcgctataccacggctgggtaaacaagcctagagcggtgatataatggttaagtacataaattagaagaaaattggtcgctatacgccggggatatgaactatgaggagacgagttttttcttcacgaga

SEQ ID NO: 405852 - DNA, 2450 bp, Homo sapiens
ggcgccgggggcgggggtgggaggcggaggcggggccggggcgccgcgggcggggcgccgggggcggggcgagtccggaggactcctcggactgcgcggaacatggcgttctggggttggcgcgccgcggcagccctccggctgtggggccgggtagttgaacgggtcgaggccgggggaggcgtggggccgtttcaggcctgcggctgtcggctggtgcttggcggcagggacgatgtgagtgcggggctgagaggcagccatggggcccgcggtgagcccttggacccggcgcgccccttgcagaggcctcccagacccgaggtgcccagggcattccggaggcagccgagggcagcagctcccagtttcttcttttcgagtattaaaggtggaagaaggtccatatctttttctgtgggtgcttcaagtgttgttggaagtggaggcagcagtgacaaggggaagctttccctgcaggatgtagctgagctgattcgggccagagcctgccagagggtggtggtcatggtgggggccggcatcagcacacccagtggcattccagacttcagatcgccggggagtggcctgtacagcaacctccagcagtacgatctcccgtaccccgaggccatttttgaactcccattcttctttcacaaccccaagccctttttcactttggccaaggagctgtaccctggaaactacaagcccaacgtcactcactactttctccggctgcttcatgacaaggggctgcttctgcggctctacacgcagaacatcgatgggcttgagagaggtgatacgggcatgaaaaccaggcttgaggacatcacaaccccaaggggctgtgcctccttccaggagtcctgccaagcccagaagttgtgctcttggccttgcgtgctcatgtttgggacctccctggaggtggagccttttgccagcttgaccgaggccgtgcggagctcagttccccgactgctcatcaaccgggacttggtggggcccttggcttggcatcctcgcagcagggacgtggcccagctgggggacgtggttcacggcgtggaaagcctagtggagcttctgggctggacagaagagatgcgggaccttgtgcagcgggaaactgggaagcttgatggaccagacaaataggatgatggctgcccccacacaataaatggtaacataggagacatccacatcccaattctgacaagacctcatgcctgaagacagcttgggcaggtgaaaccagaatatgtgaactgagtggacacccgaggctgccactggaatgtcttctcaggccatgagctgcagtgactggtagggctgtgtttacagtcagggccaccccgtcacatatacaaaggagctgcctgcctgtttgctgtgttgaactcttcactctgctgaagctcctaatggaaaaagctttcttctgactgtgaccctcttgaactgaatcagaccaactggaatcccagaccgagtctgctttctgtgcctagttgaacggcaagctcggcatctgttggttacaagatccagacttgggccgagcggtccccagccctcttcatgttccgaagtgtagtcttgaggccctggtgccgcacttctagcatgttggtctcctttagtggggctatttttaatgagagaaaatctgttctttccagcatgaaatacatttagtctcctcaaagggactgcaggtgttgacatgagttggaaagggaaccctgggatacgtggcgtcccctctattggaacagtctgaggactgaaggcatttgtccctggatttattggagacggcccagctcctccctctgaaggtggtcacattctgttgactctccatactcagcctctcctccagaaacagatctgttccagaacattccagcactttctatctggcctccttgtccccacactacgcccccccaccctcgccagggcttcctctagtgacactgttagagctaatctctgagacagggaaggcattactcacttaaaacccaggctgagtcctggccacctgctggattgtgacataggaggtggaatccactgaactgctacttctgcacaggctccttctcctggggctgtacccaggcccagccctgatggctcaccctgtcaggcaccagctgctccctcctgggctctcacccacctgcacatcctccttcctagcatcacattacctgcgtgtttccccagacaaaagcacttcccattcttgaaccttgcctaccctgggctgagctgacggcaatagatttaatgacagtgactcccaggaagggggtcctgtgactttgcgccttaataagaacaaaaggtggaattggtgacctaggaaaactgttgaattctaaaaagaatgaagttagtttctaaccctaaaaaaaaat

SEQ ID NO: 405853 - DNA, 1484 bp, Homo sapiens
ggcgccgggggcgggggtgggaggcggaggcggggccggggcgccgcgggcggggcgccgggggcggggcgagtccggaggactcctcggactgcgcggaacatggcgttctggggttggcgcgccgcggcagccctccggctgtggggccgggtagttgaacgggtcgaggccgggggaggcgtggggccgtttcaggcctgcggctgtcggctggtgcttggcggcagggacgattattaaaggtggaagaaggtccatatctttttctgtgggtgcttcaagtgttgttggaagtggaggcagcagtgacaaggggaagctttccctgcaggatgtagctgagctgattcgggccagagcctgccagagggtggtggtcatggtgggggccggcatcagcacacccagtggcattccagacttcagatcgccggggagtggcctgtacagcaacctccagcagtacgatctcccgtaccccgaggccatttttgaactcccattcttctttcacaaccccaagccctttttcactttggccaaggagctgtaccctggaaactacaagcccaacgtcactcactactttctccggctgcttcatgacaaggggctgcttctgcggctctacacgcagaacatcgatgggcttgagagagtgtcgggcatccctgcctcaaagctggttgaagctcatggaacctttgcctctgccacctgcacagtctgccaaagacccttcccaggggaggacattcgggctgacgtgatggcagacagggttccccgctgcccggtctgcaccggcgttgtgaagcccgacattgtgttctttggggagccgctgccccagaggttcttgctgcatgtggttgatttccccatggcagatctgctgctcatccttgggacctccctggaggtggagccttttgccagcttgaccgaggccgtgcggagctcagttccccgactgctcatcaaccgggacttggtggggcccttggcttggcatcctcgcagcagggacgtggcccagctgggggacgtggttcacggcgtggaaagcctagtggagcttctgggctggacagaagagatgcgggaccttgtgcagcgggaaactgggaagcttgatggaccagacaaataggatgatggctgcccccacacaataaatggtaacataggagacatccacatcccaattctgactgtgaccctcttgaactgaatcagaccaactggaatcccagaccgagtctgctttctgtgcctagttgaacggcaagctcggcatctgttggttacaagatccagacttgggccgagcggtccccagccctcttcatgttccgaagtgtagtcttgaggccctggtgccgcacttctagcatgttggtctcctttagtggggctatttttaatgagagaaaatctgttctttccagcatgaaatacatttagtctcctcaaaggga

SEQ ID NO: 405854 - DNA, 313 bp, Homo sapiens
agagggcagagccatgctcgttcttgctatcctgagattggttgctatctgtttcctttgctgctgtgtttttttctgtcagtattaaaggtggaagaaggtccatatctttttctgtgggtgcttcaagtgttgttggaagtggaggcagcagtgacaaggggaagctttccctgcaggatgtagctgagctgattcgggccagagcctgccagagggtggtggtcatggtgggggccggcatcagcacacccagtggcattccagacttcaggtactgcccacagtcccacctgccttctgcgctcccctc

SEQ ID NO: 405855 - DNA, 289 bp, Homo sapiens
ctccggcgtttgcagcccacttcccgcgcacttggctgtgccattgaggcgttaaagagtgtgggcgcctgtggtcgaacccgctacggactagctttgtggtgtcagcctttgtgacccggaattgctcctgtcaaatgaggatcttcccagtagtgttttgcgaggattaggtgtaaatataatgcctgaccatagtaaaagcgctcagaaagtattaactatcaccgccatccgggttgaaaaaggtgtgagcgcagggtacagaaatgctggctccaggtttgac

SEQ ID NO: 405856 - DNA, 2436 bp, Homo sapiens
ggcgccgggggcgggggtgggaggcggaggcggggccggggcgccgcgggcggggcgccgggggcggggcgagtccggaggactcctcggactgcgcggaacatggcgttctggggttggcgcgccgcggcagccctccggctgtggggccgggtagttgaacgggtcgaggccgggggaggcgtggggccgtttcaggcctgcggctgtcggctggtgcttggcggcagggacgattattaaaggtggaagaaggtccatatctttttctgtgggtgcttcaagtgttgttggaagtggaggcagcagtgacaaggggaagctttccctgcaggatgtagctgagctgattcgggccagagcctgccagagggtggtggtcatggtgggggccggcatcagcacacccagtggcattccagacttcagatcgccggggagtggcctgtacagcaacctccagcagtacgatctcccgtaccccgaggccatttttgaactcccattcttctttcacaaccccaagccctttttcactttggccaaggagctgtaccctggaaactacaagcccaacgtcactcactactttctccggctgcttcatgacaaggggctgcttctgcggctctacacgcagaacatcgatgggcttgagagagtgtcgggcatccctgcctcaaagctggttgaagctcatggaacctttgcctctgccacctgcacagtctgccaaagacccttcccaggggaggacattcgggctgacgtgatggcagacagggttccccgctgcccggtctgcaccggcgttgtgaagcccgacattgtgttctttggggagccgctgccccagaggttcttgctgcatgtggttgatttccccatggcagatctgctgctcatccttgggacctccctggaggtggagccttttgccagcttgaccgaggccgtgcggagctcagttccccgactgctcatcaaccgggacttggtggggcccttggcttggcatcctcgcagcagggacgtggcccagctgggggacgtggttcacggcgtggaaagcctagtggagcttctgggctggacagaagagatgcgggaccttgtgcagcgggaaactgggaagcttgatggaccagacaaataggatgatggctgcccccacacaataaatggtaacataggagacatccacatcccaattctgacaagacctcatgcctgaagacagcttgggcaggtgaaaccagaatatgtgaactgagtggacacccgaggctgccactggaatgtcttctcaggccatgagctgcagtgactggtagggctgtgtttacagtcagggccaccccgtcacatatacaaaggagctgcctgcctgtttgctgtgttgaactcttcactctgctgaagctcctaatggaaaaagctttcttctgactgtgaccctcttgaactgaatcagaccaactggaatcccagaccgagtctgctttctgtgcctagttgaacggcaagctcggcatctgttggttacaagatccagacttgggccgagcggtccccagccctcttcatgttccgaagtgtagtcttgaggccctggtgccgcacttctagcatgttggtctcctttagtggggctatttttaatgagagaaaatctgttctttccagcatgaaatacatttagtctcctcaaagggactgcaggtgttgacatgagttggaaagggaaccctgggatacgtggcgtcccctctattggaacagtctgaggactgaaggcatttgtccctggatttattggagacggcccagctcctccctctgaaggtggtcacattctgttgactctccatactcagcctctcctccagaaacagatctgttccagaacattccagcactttctatctggcctccttgtccccacactacgcccccccaccctcgccagggcttcctctagtgacactgttagagctaatctctgagacagggaaggcattactcacttaaaacccaggctgagtcctggccacctgctggattgtgacataggaggtggaatccactgaactgctacttctgcacaggctccttctcctggggctgtacccaggcccagccctgatggctcaccctgtcaggcaccagctgctccctcctgggctctcacccacctgcacatcctccttcctagcatcacattacctgcgtgtttccccagacaaaagcacttcccattcttgaaccttgcctaccctgggctgagctgacggcaatagatttaatgacagtgactcccaggaagggggtcctgtgactttgcgccttaataagaacaaaaggtggaattggtgacctaggaaaactgttgaattctaaaaagaatgaagttagtttctaaccctaaaaaaaaat

SEQ ID NO: 405857 - DNA, 1770 bp, Homo sapiens
ggcgccgggggcgggggtgggaggcggaggcggggccggggcgccgcgggcggggcgccgggggcggggcgagtccggaggactcctcggactgcgcggaacatggcgttctggggttggcgcgccgcggcagccctccggctgtggggccgggtagttgaacgggtcgaggccgggggaggcgtggggccgtttcaggcctgcggctgtcggctggtgcttggcggcagggacgattattaaaggtggaagaaggtccatatctttttctgtgggtgcttcaagtgttgttggaagtggaggcagcagtgacaaggggaagctttccctgcaggatgtagctgagctgattcgggccagagcctgccagagggtggtggtcatggtgggggccggcatcagcacacccagtggcattccagacttcagatcgccggggagtggcctgtacagcaacctccagcagtacgatctcccgtaccccgaggccatttttgaactcccattcttctttcacaaccccaagccctttttcactttggccaaggagctgtaccctggaaactacaagcccaacgtcactcactactttctccggctgcttcatgacaaggggctgcttctgcggctctacacgcagaacatcgatgggcttgagagagtgtcgggcatccctgcctcaaagctggttgaagctcatggaacctttgcctctgccacctgcacagtctgccaaagacccttcccaggggaggacattcgggctgacgtgatggcagacagggttccccgctgcccggtctgcaccggcgttgtgaagcccgacattgtgttctttggggagccgctgccccagaggttcttgctgcatgtggttgatttccccatggcagatctgctgctcatccttgggacctccctggaggtggagccttttgccagcttgaccgaggccgtgcggagctcagttccccgactgctcatcaaccgggacttggtggggcccttggcttggcatcctcgcagcagggacgtggcccagctgggggacgtggttcacggcgtggaaagcctagtggagcttctgggctggacagaagagatgcgggaccttgtgcagcgggaaactgggaaggtacagactgctgaggaggaccatccaaggggctgcccttctcactgctctaggcttgatggaccagacaaataggatgatggctgcccccacacaataaatggtaacataggagacatccacatcccaattctgacaagacctcatgcctgaagacagcttgggcaggtgaaaccagaatatgtgaactgagtggacacccgaggctgccactggaatgtcttctcaggccatgagctgcagtgactggtagggctgtgtttacagtcagggccaccccgtcacatatacaaaggagctgcctgcctgtttgctgtgttgaactcttcactctgctgaagctcctaatggaaaaagctttcttctgactgtgaccctcttgaactgaatcagaccaactggaatcccagaccgagtctgctttctgtgcctagttgaacggcaagctcggcatctgttggttacaagatccagacttgggccgagcggtccccagccctcttcatgttccgaagtgtagtcttgaggccctggtgccgcacttctagcatgttggtctcctttagtggggctatttttaatgagagaaaatctgttctttccagcatgaaatacatttagtctcctcaaaggga

SEQ ID NO: 405858 - DNA, 1727 bp, Homo sapiens
ctccggcgtttgcagcccacttcccgcgcacttggctgtgccattgaggcgttaaagagtgtgggcgcctgtggtcgaacccgctacggactagctttgtggtgtcagcctttgtgacccggaattgctcctgtcaaatgaggatcttcccagtagtgttttgcgaggattaggtgtaaatataatgcctgaccatagtaaaagcgctcagaaagtattaactatcaccgccatccgggttgaaaaagtattaaaggtggaagaaggtccatatctttttctgtgggtgcttcaagtgttgttggaagtggaggcagcagtgacaaggggaagctttccctgcaggatgtagctgagctgattcgggccagagcctgccagagggtggtggtcatggtgggggccggcatcagcacacccagtggcattccagacttcagatcgccggggagtggcctgtacagcaacctccagcagtacgatctcccgtaccccgaggccatttttgaactcccattcttctttcacaaccccaagccctttttcactttggccaaggagctgtaccctggaaactacaagcccaacgtcactcactactttctccggctgcttcatgacaaggggctgcttctgcggctctacacgcagaacatcgatgggcttgagagagtgtcgggcatccctgcctcaaagctggttgaagctcatggaacctttgcctctgccacctgcacagtctgccaaagacccttcccaggggaggacattcgggctgacgtgatggcagacagggttccccgctgcccggtctgcaccggcgttgtgaagcccgacattgtgttctttggggagccgctgccccagaggttcttgctgcatgtggttgatttccccatggcagatctgctgctcatccttgggacctccctggaggtggagccttttgccagcttgaccgaggccgtgcggagctcagttccccgactgctcatcaaccgggacttggtggggcccttggcttggcatcctcgcagcagggacgtggcccagctgggggacgtggttcacggcgtggaaagcctagtggagcttctgggctggacagaagagatgcgggaccttgtgcagcgggaaactgggaagcttgatggaccagacaaataggatgatggctgcccccacacaataaatggtaacataggagacatccacatcccaattctgacaagacctcatgcctgaagacagcttgggcaggtgaaaccagaatatgtgaactgagtggacacccgaggctgccactggaatgtcttctcaggccatgagctgcagtgactggtagggctgtgtttacagtcagggccaccccgtcacatatacaaaggagctgcctgcctgtttgctgtgttgaactcttcactctgctgaagctcctaatggaaaaagctttcttctgactgtgaccctcttgaactgaatcagaccaactggaatcccagaccgagtctgctttctgtgcctagttgaacggcaagctcggcatctgttggttacaagatccagacttgggccgagcggtccccagccctcttcatgttccgaagtgtagtcttgaggccctggtgccgcacttctagcatgttggtctcctttagtggggctatttttaatgagagaaaatctgttctttccagcatgaaatacatttagtctcctcaaaggga

SEQ ID NO: 405859 - DNA, 1604 bp, Homo sapiens
ctggggagacacacatgctcattctcgagggtggcggtggtgcagagggcagagccatgctcgttcttgctatcctgagattggttgctatctgtttcctttgctgctgtgtttttttctgtcagtattaaaggtggaagaaggtccatatctttttctgtgggtgcttcaagtgttgttggaagtggaggcagcagtgacaaggggaagctttccctgcaggatgtagctgagctgattcgggccagagcctgccagagggtggtggtcatggtgggggccggcatcagcacacccagtggcattccagacttcagatcgccggggagtggcctgtacagcaacctccagcagtacgatctcccgtaccccgaggccatttttgaactcccattcttctttcacaaccccaagccctttttcactttggccaaggagctgtaccctggaaactacaagcccaacgtcactcactactttctccggctgcttcatgacaaggggctgcttctgcggctctacacgcagaacatcgatgggcttgagagagtgtcgggcatccctgcctcaaagctggttgaagctcatggaacctttgcctctgccacctgcacagtctgccaaagacccttcccaggggaggacattcgggctgacgtgatggcagacagggttccccgctgcccggtctgcaccggcgttgtgaagcccgacattgtgttctttggggagccgctgccccagaggttcttgctgcatgtggttgatttccccatggcagatctgctgctcatccttgggacctccctggaggtggagccttttgccagcttgaccgaggccgtgcggagctcagttccccgactgctcatcaaccgggacttggtggggcccttggcttggcatcctcgcagcagggacgtggcccagctgggggacgtggttcacggcgtggaaagcctagtggagcttctgggctggacagaagagatgcgggaccttgtgcagcgggaaactgggaagcttgatggaccagacaaataggatgatggctgcccccacacaataaatggtaacataggagacatccacatcccaattctgacaagacctcatgcctgaagacagcttgggcaggtgaaaccagaatatgtgaactgagtggacacccgaggctgccactggaatgtcttctcaggccatgagctgcagtgactggtagggctgtgtttacagtcagggccaccccgtcacatatacaaaggagctgcctgcctgtttgctgtgttgaactcttcactctgctgaagctcctaatggaaaaagctttcttctgactgtgaccctcttgaactgaatcagaccaactggaatcccagaccgagtctgctttctgtgcctagttgaacggcaagctcggcatctgttggttacaagatccagacttgggccgagcggtccccagccctcttcatgttccgaagtgtagtcttgaggccctggtgccgcacttctagcatgttggtctcctttagtggggctatttttaatgagagaaaatctgttctttccagcatgaaatacatttagtctcctcaaaggga

SEQ ID NO: 405860 - DNA, 2358 bp, Homo sapiens
ggcgccgggggcgggggtgggaggcggaggcggggccggggcgccgcgggcggggcgccgggggcggggcgagtccggaggactcctcggactgcgcggaacatggcgttctggggttggcgcgccgcggcagccctccggctgtggggccgggtagttgaacgggtcgaggccgggggaggcgtggggccgtttcaggcctgcggctgtcggctggtgcttggcggcagggacgattattaaaggtggaagaaggtccatatctttttctgtgggtgcttcaagtgttgttggaagtggaggcagcagtgacaaggggaagctttccctgcaggatgtagctgagctgattcgggccagagcctgccagagggtggtggtcatggtgggggccggcatcagcacacccagtggcattccagacttcagatcgccggggagtggcctgtacagcaacctccagcagtacgatctcccgtaccccgaggccatttttgaactcccattcttctttcacaaccccaagccctttttcactttggccaaggagctgtaccctggaaactacaagcccaacgtcactcactactttctccggctgcttcatgacaaggggctgcttctgcggctctacacgcagaacatcgatgggcttgagagaggtgatacgggcatgaaaaccaggcttgaggacatcacaaccccaaggggctgtgcctccttccaggagtcctgccaagcccagaagttgtgctcttggccttgcgtgctcatgtttgggacctccctggaggtggagccttttgccagcttgaccgaggccgtgcggagctcagttccccgactgctcatcaaccgggacttggtggggcccttggcttggcatcctcgcagcagggacgtggcccagctgggggacgtggttcacggcgtggaaagcctagtggagcttctgggctggacagaagagatgcgggaccttgtgcagcgggaaactgggaaggtacagactgctgaggaggaccatccaaggggctgcccttctcactgctctaggcttgatggaccagacaaataggatgatggctgcccccacacaataaatggtaacataggagacatccacatcccaattctgacaagacctcatgcctgaagacagcttgggcaggtgaaaccagaatatgtgaactgagtggacacccgaggctgccactggaatgtcttctcaggccatgagctgcagtgactggtagggctgtgtttacagtcagggccaccccgtcacatatacaaaggagctgcctgcctgtttgctgtgttgaactcttcactctgctgaagctcctaatggaaaaagctttcttctgactgtgaccctcttgaactgaatcagaccaactggaatcccagaccgagtctgctttctgtgcctagttgaacggcaagctcggcatctgttggttacaagatccagacttgggccgagcggtccccagccctcttcatgttccgaagtgtagtcttgaggccctggtgccgcacttctagcatgttggtctcctttagtggggctatttttaatgagagaaaatctgttctttccagcatgaaatacatttagtctcctcaaagggactgcaggtgttgacatgagttggaaagggaaccctgggatacgtggcgtcccctctattggaacagtctgaggactgaaggcatttgtccctggatttattggagacggcccagctcctccctctgaaggtggtcacattctgttgactctccatactcagcctctcctccagaaacagatctgttccagaacattccagcactttctatctggcctccttgtccccacactacgcccccccaccctcgccagggcttcctctagtgacactgttagagctaatctctgagacagggaaggcattactcacttaaaacccaggctgagtcctggccacctgctggattgtgacataggaggtggaatccactgaactgctacttctgcacaggctccttctcctggggctgtacccaggcccagccctgatggctcaccctgtcaggcaccagctgctccctcctgggctctcacccacctgcacatcctccttcctagcatcacattacctgcgtgtttccccagacaaaagcacttcccattcttgaaccttgcctaccctgggctgagctgacggcaatagatttaatgacagtgactcccaggaagggggtcctgtgactttgcgccttaataagaacaaaaggtggaattggtgacctaggaaaactgttgaattctaaaaagaatgaagttagtttctaaccctaaaaaaaaat

SEQ ID NO: 405861 - DNA, 3099 bp, Homo sapiens
gagagagagagagagagagagagagagagagagagataggacttcctccccgattcgcaaagtgaagtcacttcccaaaattagctgaaaaaaaagtttcatccggttaactgtctctttcgctccgctacaacaacaaacgtgcacaggggagtgagggcagggcgctcgcagggggcacgcagggagggcccagggcgccagggaggccgcgccgggctaatccgaaggggctgcgaggtcaggctgtaaccgggtcaatgtgtggaatattggggggctcggctgcagacttggccaaatggacgggactattaaggaggctctgtcggtggtgagcgacgaccagtccctctttgactcagcgtacggagcggcagcccatctccccaaggccgacatgactgcctcggggagtcctgactacgggcagccccacaagatcaaccccctcccaccacagcaggagtggatcaatcagccagtgagggtcaacgtcaagcgggagtatgaccacatgaatggatccagggagtctccggtggactgcagcgttagcaaatgcagcaagctggtgggcggaggcgagtccaaccccatgaactacaacagctatatggacgagaagaatggcccccctcctcccaacatgaccaccaacgagaggagagtcatcgtccccgcagaccccacactgtggacacaggagcatgtgaggcaatggctggagtgggccataaaggagtacagcttgatggagatcgacacatcctttttccagaacatggatggcaaggaactgtgtaaaatgaacaaggaggacttcctccgcgccaccaccctctacaacacggaagtgctgttgtcacacctcagttacctcagggaaagttcactgctggcctataatacaacctcccacaccgaccaatcctcacgattgagtgtcaaagaagacccttcttatgactcagtcagaagaggagcttggggcaataacatgaattctggcctcaacaaaagtcctccccttggaggggcacaaacgatcagtaagaatacagagcaacggccccagccagatccgtatcagatcctgggcccgaccagcagtcgcctagccaaccctggaagcgggcagatccagctgtggcaattcctcctggagctgctctccgacagcgccaacgccagctgtatcacctgggaggggaccaacggggagttcaaaatgacggaccccgatgaggtggccaggcgctggggcgagcggaaaagcaagcccaacatgaattacgacaagctgagccgggccctccgttattactatgataaaaacattatgaccaaagtgcacggcaaaagatatgcttacaaatttgacttccacggcattgcccaggctctgcagccacatccgaccgagtcgtccatgtacaagtacccttctgacatctcctacatgccttcctaccatgcccaccagcagaaggtgaactttgtccctccccatccatcctccatgcctgtcacttcctccagcttctttggagccgcatcacaatactggacctcccccacggggggaatctaccccaaccccaacgtcccccgccatcctaacacccacgtgccttcacacttaggcagctactactagaagcttactcatcagtggccttctagctgaagcccatcctgcacacttactggatgctttggactcaacaggacatatgtggccttgaagggaagacaaaactggatgttctttcttgttggatagaacctttgtatttgttctttaaaaacattttttttaatgttggtaacttttgcttcctctacctgaacaaagagatgaataattccatgggccagtatgccagtttgaattctcagtctcctagcatcttgtgagttgcatattaagattactggaatggttaagtcatggttctgagaaagaagctgtacgttttctttatgtttttatgaccaaagcagtttcttgtcaatacacggggttcagtatgacacagaatcatggacttaacccgtcatgttctggtttgagatttagtgacaaatagaggtgggaagcttataatctaattttaggaggaccaaattcagtggatggcaactggaacattgattgtaaggccagtgaagttttcacccaactggaatttgatggaaagaaggtttgtgtgtttaagacgccaagggcattgcagaatccctctcagtggacagtatgcactcagctgaccactctctctagaaatagtcaagatatgaactaagaaattttaatgcaaatacatacattcctgaaagacggggaattaaattactaatttttttttttttttaaatgatgacagtggtcccagaacttggaaaagttgtagggatttctaaactcaagcagattcgcaagtgctgtgcgcttgtcagaccatcagaccagggccaaccaatcagaaggcaacttactgtataaattatgcagagttattttcctatatctcacagtattaaaaataaataattaaaaattaagaataaataaacgagttgacctcggtcacaaaagcagttttactatcgaatcaatcgctgttattttttttaatgtaatttgtacatcttttttcaatctgtacatttgggctgtctgtatgtttttatagctggtttttaaaaagcataatatgcctatagctgaaaaggaaacagggctgtttaagtcactgacttatgagaaagcaaagcactggtacagttatttaacaggcatacacaagcagggaaaagataatccatttagatctttaatgctttggaaatgcgtgtaacagtactgcaataatcacagctctgggaaaaacaacgaaactttcccttgtggagaggagggattttcctgctctatataagcaacatatttttagacattaaaatatatataattttgcaggtaattgttgacttttttaactatattaagtgttaagctgacaactgtcaaagaagaccatgttgtaaaataatttgactaaataaatggttccttctctcaaaaaaaaaaaa

SEQ ID NO: 405862 - DNA, 520 bp, Homo sapiens
ataggaatgttcgggtgactactgattaatgtagtgaagatgatctgtcacttgccagaccaacaggagttggaaagagaaacctagccatggtgtctgccacagagggaccctctaaagtgctaggaggagggtggggggcagtcgccacctgtgggatgccatgaacagcctctgcaactggccagcaccaggaaggggggcctcctggtggtggagttggagtcctttctggctgaatgaggagcaatgtggctggggtgtgcgggtttctggtgaggtccgggtgggaagccgtctctccgcattctcctgaaagctctgttgtagtttgaaggtcggtagagccttttttcgcctctgtggacacccttttgaaattttttcttccaattgacttggatctcctctggattttttttccctctttcccccgtcggactcttaaataaaagtgagcaagtccaaagcgtggtccggagagcgtggacaaggtaacctgttttggatgtccgggaga

SEQ ID NO: 405863 - DNA, 3270 bp, Homo sapiens
  misc_feature (538)..(539): n is a, c, g, or t
gagagagagagagagagagagagagagagagagagataggacttcctccccgattcgcaaagtgaagtcacttcccaaaattagctgaaaaaaaagtttcatccggttaactgtctctttcgctccgctacaacaacaaacgtgcacaggggagtgagggcagggcgctcgcagggggcacgcagggagggcccagggcgccagggaggccgcgccgggctaatccgaaggggctgcgaggtcaggctgtaaccgggtcaatgtgtggaatattggggggctcggctgcagacttggccaaatggacgggactattaaggaggctctgtcggtggtgagcgacgaccagtccctctttgactcagcgtacggagcggcagcccatctccccaaggccgacatgactgcctcggggagtcctgactacgggcagccccacaagatcaaccccctcccaccacagcaggagtggatcaatcagccagtgagggtcaacgtcaagcgggagtatgaccacatgaatggatccaggcgccanntgcctcattaaagagcagccttttatgctgggcttcacctgtacccaccctgagcggcagccgtggagccccatggccgcacgcagggcttgcgctggctggaggaggcacggtgcttgggagctgcaagaatggagggaggactggcaggcgagcgggcgagggagtctccggtggactgcagcgttagcaaatgcagcaagctggtgggcggaggcgagtccaaccccatgaactacaacagctatatggacgagaagaatggcccccctcctcccaacatgaccaccaacgagaggagagtcatcgtccccgcagaccccacactgtggacacaggagcatgtgaggcaatggctggagtgggccataaaggagtacagcttgatggagatcgacacatcctttttccagaacatggatggcaaggaactgtgtaaaatgaacaaggaggacttcctccgcgccaccaccctctacaacacggaagtgctgttgtcacacctcagttacctcagggaaagttcactgctggcctataatacaacctcccacaccgaccaatcctcacgattgagtgtcaaagaagacccttcttatgactcagtcagaagaggagcttggggcaataacatgaattctggcctcaacaaaagtcctccccttggaggggcacaaacgatcagtaagaatacagagcaacggccccagccagatccgtatcagatcctgggcccgaccagcagtcgcctagccaaccctggaagcgggcagatccagctgtggcaattcctcctggagctgctctccgacagcgccaacgccagctgtatcacctgggaggggaccaacggggagttcaaaatgacggaccccgatgaggtggccaggcgctggggcgagcggaaaagcaagcccaacatgaattacgacaagctgagccgggccctccgttattactatgataaaaacattatgaccaaagtgcacggcaaaagatatgcttacaaatttgacttccacggcattgcccaggctctgcagccacatccgaccgagtcgtccatgtacaagtacccttctgacatctcctacatgccttcctaccatgcccaccagcagaaggtgaactttgtccctccccatccatcctccatgcctgtcacttcctccagcttctttggagccgcatcacaatactggacctcccccacggggggaatctaccccaaccccaacgtcccccgccatcctaacacccacgtgccttcacacttaggcagctactactagaagcttactcatcagtggccttctagctgaagcccatcctgcacacttactggatgctttggactcaacaggacatatgtggccttgaagggaagacaaaactggatgttctttcttgttggatagaacctttgtatttgttctttaaaaacattttttttaatgttggtaacttttgcttcctctacctgaacaaagagatgaataattccatgggccagtatgccagtttgaattctcagtctcctagcatcttgtgagttgcatattaagattactggaatggttaagtcatggttctgagaaagaagctgtacgttttctttatgtttttatgaccaaagcagtttcttgtcaatacacggggttcagtatgacacagaatcatggacttaacccgtcatgttctggtttgagatttagtgacaaatagaggtgggaagcttataatctaattttaggaggaccaaattcagtggatggcaactggaacattgattgtaaggccagtgaagttttcacccaactggaatttgatggaaagaaggtttgtgtgtttaagacgccaagggcattgcagaatccctctcagtggacagtatgcactcagctgaccactctctctagaaatagtcaagatatgaactaagaaattttaatgcaaatacatacattcctgaaagacggggaattaaattactaatttttttttttttttaaatgatgacagtggtcccagaacttggaaaagttgtagggatttctaaactcaagcagattcgcaagtgctgtgcgcttgtcagaccatcagaccagggccaaccaatcagaaggcaacttactgtataaattatgcagagttattttcctatatctcacagtattaaaaataaataattaaaaattaagaataaataaacgagttgacctcggtcacaaaagcagttttactatcgaatcaatcgctgttattttttttaatgtaatttgtacatcttttttcaatctgtacatttgggctgtctgtatgtttttatagctggtttttaaaaagcataatatgcctatagctgaaaaggaaacagggctgtttaagtcactgacttatgagaaagcaaagcactggtacagttatttaacaggcatacacaagcagggaaaagataatccatttagatctttaatgctttggaaatgcgtgtaacagtactgcaataatcacagctctgggaaaaacaacgaaactttcccttgtggagaggagggattttcctgctctatataagcaacatatttttagacattaaaatatatataattttgcaggtaattgttgacttttttaactatattaagtgttaagctgacaactgtcaaagaagaccatgttgtaaaataatttgactaaataaatggttccttctctcaaaaaaaaaaaa

SEQ ID NO: 405864 - DNA, 3018 bp, Homo sapiens
gagagagagagagagagagagagagagagagagagataggacttcctccccgattcgcaaagtgaagtcacttcccaaaattagctgaaaaaaaagtttcatccggttaactgtctctttcgctccgctacaacaacaaacgtgcacaggggagtgagggcagggcgctcgcagggggcacgcagggagggcccagggcgccagggaggccgcgccgggctaatccgaaggggctgcgaggtcaggctgtaaccgggtcaatgtgtggaatattggggggctcggctgcagacttggccaaatggacgggactattaaggaggctctgtcggtggtgagcgacgaccagtccctctttgactcagcgtacggagcggcagcccatctccccaaggccgacatgactgcctcggggagtcctgactacgggcagccccacaagatcaaccccctcccaccacagcaggagtggatcaatcagccagtgagggtcaacgtcaagcgggagtatgaccacatgaatggatccagggagtctccggtggactgcagcgttagcaaatgcagcaagctggtgggcggaggcgagtccaaccccatgaactacaacagctatatggacgagaagaatggcccccctcctcccaacatgaccaccaacgagaggagagtcatcgtccccgcagaccccacactgtggacacaggagcatgtgaggcaatggctggagtgggccataaaggagtacagcttgatggagatcgacacatcctttttccagaacatggatggcaaggaactgtgtaaaatgaacaaggaggacttcctccgcgccaccaccctctacaacacggaagtgctgttgtcacacctcagttacctcagggaaagttcactgctggcctataatacaacctcccacaccgaccaatcctcacgattgagtgtcaaagaagacccttcttatgactcagtcagaagaggagcttggggcaataacatgaattctggcctcaacaaaagtcctccccttggaggggcacaaacgatcagtaagaatacagagcaacggccccagccagatccgtatcagatcctgggcccgaccagcagtcgcctagccaaccctggaagcgggcagatccagctgtggcaattcctcctggagctgctctccgacagcgccaacgccagctgtatcacctgggaggggaccaacggggagttcaaaatgacggaccccgatgaggtggccaggcgctggggcgagcggaaaagcaagcccaacatgaattacgacaagctgagccgggccctccgttattactatgataaaaacattatgaccaaagtgcacggcaaaagatatgcttacaaatttgacttccacggcattgcccaggctctgcagccacatccgaccgagtcgtccatgtacaagtacccttctgacatctccagcttctttggagccgcatcacaatactggacctcccccacggggggaatctaccccaaccccaacgtcccccgccatcctaacacccacgtgccttcacacttaggcagctactactagaagcttactcatcagtggccttctagctgaagcccatcctgcacacttactggatgctttggactcaacaggacatatgtggccttgaagggaagacaaaactggatgttctttcttgttggatagaacctttgtatttgttctttaaaaacattttttttaatgttggtaacttttgcttcctctacctgaacaaagagatgaataattccatgggccagtatgccagtttgaattctcagtctcctagcatcttgtgagttgcatattaagattactggaatggttaagtcatggttctgagaaagaagctgtacgttttctttatgtttttatgaccaaagcagtttcttgtcaatacacggggttcagtatgacacagaatcatggacttaacccgtcatgttctggtttgagatttagtgacaaatagaggtgggaagcttataatctaattttaggaggaccaaattcagtggatggcaactggaacattgattgtaaggccagtgaagttttcacccaactggaatttgatggaaagaaggtttgtgtgtttaagacgccaagggcattgcagaatccctctcagtggacagtatgcactcagctgaccactctctctagaaatagtcaagatatgaactaagaaattttaatgcaaatacatacattcctgaaagacggggaattaaattactaatttttttttttttttaaatgatgacagtggtcccagaacttggaaaagttgtagggatttctaaactcaagcagattcgcaagtgctgtgcgcttgtcagaccatcagaccagggccaaccaatcagaaggcaacttactgtataaattatgcagagttattttcctatatctcacagtattaaaaataaataattaaaaattaagaataaataaacgagttgacctcggtcacaaaagcagttttactatcgaatcaatcgctgttattttttttaatgtaatttgtacatcttttttcaatctgtacatttgggctgtctgtatgtttttatagctggtttttaaaaagcataatatgcctatagctgaaaaggaaacagggctgtttaagtcactgacttatgagaaagcaaagcactggtacagttatttaacaggcatacacaagcagggaaaagataatccatttagatctttaatgctttggaaatgcgtgtaacagtactgcaataatcacagctctgggaaaaacaacgaaactttcccttgtggagaggagggattttcctgctctatataagcaacatatttttagacattaaaatatatataattttgcaggtaattgttgacttttttaactatattaagtgttaagctgacaactgtcaaagaagaccatgttgtaaaataatttgactaaataaatggttccttctctcaaaaaaaaaaaa

SEQ ID NO: 405865 - DNA, 3274 bp, Homo sapiens
ataggaatgttcgggtgactactgattaatgtagtgaagatgatctgtcacttgccagaccaacaggagttggaaagagaaacctagccatggtgtctgccacagagggaccctctaaagtgctaggaggagggtggggggcagtcgccacctgtgggatgccatgaacagcctctgcaactggccagcaccaggaaggggggcctcctggtggtggagttggagtcctttctggctgaatgaggagcaatgtggctggggtgtgcgggtttctggtgaggtccgggtgggaagccgtctctccgcattctcctgaaagctctgttgtagtttgaaggtcggtagagccttttttcgcctctgtggacacccttttgaaattttttcttccaattgacttggatctcctctggattttttttccctctttcccccgtcggactcttaaataaaagtgagcaagtccaaagcgtggtccggagagcgtggacaaggaggctctgtcggtggtgagcgacgaccagtccctctttgactcagcgtacggagcggcagcccatctccccaaggccgacatgactgcctcggggagtcctgactacgggcagccccacaagatcaaccccctcccaccacagcaggagtggatcaatcagccagtgagggtcaacgtcaagcgggagtatgaccacatgaatggatccagggagtctccggtggactgcagcgttagcaaatgcagcaagctggtgggcggaggcgagtccaaccccatgaactacaacagctatatggacgagaagaatggcccccctcctcccaacatgaccaccaacgagaggagagtcatcgtccccgcagaccccacactgtggacacaggagcatgtgaggcaatggctggagtgggccataaaggagtacagcttgatggagatcgacacatcctttttccagaacatggatggcaaggaactgtgtaaaatgaacaaggaggacttcctccgcgccaccaccctctacaacacggaagtgctgttgtcacacctcagttacctcagggaaagttcactgctggcctataatacaacctcccacaccgaccaatcctcacgattgagtgtcaaagaagacccttcttatgactcagtcagaagaggagcttggggcaataacatgaattctggcctcaacaaaagtcctccccttggaggggcacaaacgatcagtaagaatacagagcaacggccccagccagatccgtatcagatcctgggcccgaccagcagtcgcctagccaaccctggaagcgggcagatccagctgtggcaattcctcctggagctgctctccgacagcgccaacgccagctgtatcacctgggaggggaccaacggggagttcaaaatgacggaccccgatgaggtggccaggcgctggggcgagcggaaaagcaagcccaacatgaattacgacaagctgagccgggccctccgttattactatgataaaaacattatgaccaaagtgcacggcaaaagatatgcttacaaatttgacttccacggcattgcccaggctctgcagccacatccgaccgagtcgtccatgtacaagtacccttctgacatctcctacatgccttcctaccatgcccaccagcagaaggtgaactttgtccctccccatccatcctccatgcctgtcacttcctccagcttctttggagccgcatcacaatactggacctcccccacggggggaatctaccccaaccccaacgtcccccgccatcctaacacccacgtgccttcacacttaggcagctactactagaagcttactcatcagtggccttctagctgaagcccatcctgcacacttactggatgctttggactcaacaggacatatgtggccttgaagggaagacaaaactggatgttctttcttgttggatagaacctttgtatttgttctttaaaaacattttttttaatgttggtaacttttgcttcctctacctgaacaaagagatgaataattccatgggccagtatgccagtttgaattctcagtctcctagcatcttgtgagttgcatattaagattactggaatggttaagtcatggttctgagaaagaagctgtacgttttctttatgtttttatgaccaaagcagtttcttgtcaatacacggggttcagtatgacacagaatcatggacttaacccgtcatgttctggtttgagatttagtgacaaatagaggtgggaagcttataatctaattttaggaggaccaaattcagtggatggcaactggaacattgattgtaaggccagtgaagttttcacccaactggaatttgatggaaagaaggtttgtgtgtttaagacgccaagggcattgcagaatccctctcagtggacagtatgcactcagctgaccactctctctagaaatagtcaagatatgaactaagaaattttaatgcaaatacatacattcctgaaagacggggaattaaattactaatttttttttttttttaaatgatgacagtggtcccagaacttggaaaagttgtagggatttctaaactcaagcagattcgcaagtgctgtgcgcttgtcagaccatcagaccagggccaaccaatcagaaggcaacttactgtataaattatgcagagttattttcctatatctcacagtattaaaaataaataattaaaaattaagaataaataaacgagttgacctcggtcacaaaagcagttttactatcgaatcaatcgctgttattttttttaatgtaatttgtacatcttttttcaatctgtacatttgggctgtctgtatgtttttatagctggtttttaaaaagcataatatgcctatagctgaaaaggaaacagggctgtttaagtcactgacttatgagaaagcaaagcactggtacagttatttaacaggcatacacaagcagggaaaagataatccatttagatctttaatgctttggaaatgcgtgtaacagtactgcaataatcacagctctgggaaaaacaacgaaactttcccttgtggagaggagggattttcctgctctatataagcaacatatttttagacattaaaatatatataattttgcaggtaattgttgacttttttaactatattaagtgttaagctgacaactgtcaaagaagaccatgttgtaaaataatttgactaaataaatggttccttctctcaaaaaaaaaaaa

SEQ ID NO: 405866 - DNA, 1793 bp, Homo sapiens
acggcattgcccaggctctgccgtggaagtcaaattgttgaagcatatctttgccgtgcacttggtcataaatttgacttccacggcattgcccaggctctgcagccacatccgaccgagtcgtccatgtacaagtacccttctgacatctcctacatgccttcctaccatgcccaccagcagaaggtgaactttgtccctccccatccatcctccatgcctgtcacttcctccagcttctttggagccgcatcacaatactggacctcccccacggggggaatctaccccaaccccaacgtcccccgccatcctaacacccacgtgccttcacacttaggcagctactactagaagcttactcatcagtggccttctagctgaagcccatcctgcacacttactggatgctttggactcaacaggacatatgtggccttgaagggaagacaaaactggatgttctttcttgttggatagaacctttgtatttgttctttaaaaacattttttttaatgttggtaacttttgcttcctctacctgaacaaagagatgaataattccatgggccagtatgccagtttgaattctcagtctcctagcatcttgtgagttgcatattaagattactggaatggttaagtcatggttctgagaaagaagctgtacgttttctttatgtttttatgaccaaagcagtttcttgtcaatacacggggttcagtatgacacagaatcatggacttaacccgtcatgttctggtttgagatttagtgacaaatagaggtgggaagcttataatctaattttaggaggaccaaattcagtggatggcaactggaacattgattgtaaggccagtgaagttttcacccaactggaatttgatggaaagaaggtttgtgtgtttaagacgccaagggcattgcagaatccctctcagtggacagtatgcactcagctgaccactctctctagaaatagtcaagatatgaactaagaaattttaatgcaaatacatacattcctgaaagacggggaattaaattactaatttttttttttttttaaatgatgacagtggtcccagaacttggaaaagttgtagggatttctaaactcaagcagattcgcaagtgctgtgcgcttgtcagaccatcagaccagggccaaccaatcagaaggcaacttactgtataaattatgcagagttattttcctatatctcacagtattaaaaataaataattaaaaattaagaataaataaacgagttgacctcggtcacaaaagcagttttactatcgaatcaatcgctgttattttttttaatgtaatttgtacatcttttttcaatctgtacatttgggctgtctgtatgtttttatagctggtttttaaaaagcataatatgcctatagctgaaaaggaaacagggctgtttaagtcactgacttatgagaaagcaaagcactggtacagttatttaacaggcatacacaagcagggaaaagataatccatttagatctttaatgctttggaaatgcgtgtaacagtactgcaataatcacagctctgggaaaaacaacgaaactttcccttgtggagaggagggattttcctgctctatataagcaacatatttttagacattaaaatatatataattttgcaggtaattgttgacttttttaactatattaagtgttaagctgacaactgtcaaagaagaccatgttgtaaaataatttgactaaataaatggttccttctctcaaaaaaaaaaaa

SEQ ID NO: 405867 - DNA, 940 bp, Homo sapiens
gagagagagagagagagagagagagagagagagagataggacttcctccccgattcgcaaagtgaagtcacttcccaaaattagctgaaaaaaaagtttcatccggttaactgtctctttcgctccgctacaacaacaaacgtgcacaggggagtgagggcagggcgctcgcagggggcacgcagggagggcccagggcgccagggaggccgcgccgggctaatccgaaggggctgcgaggtcaggctgtaaccgggtcaatgtgtggaatattggggggctcggctgcagacttggccaaatggacgggactattaaggaggctctgtcggtggtgagcgacgaccagtccctctttgactcagcgtacggagcggcagcccatctccccaaggccgacatgactgcctcggggagtcctgactacgggcagccccacaagatcaaccccctcccaccacagcaggagtggatcaatcagccagtgagggtcaacgtcaagcgggagtatgaccacatgaatggatccagggagtctccggtggactgcagcgttagcaaatgcagcaagctggtgggcggaggcgagtccaaccccatgaactacaacagctatatggacgagaagaatggcccccctcctcccaacatgaccaccaacgagaggagagtcatcgtccccgcaggtaattcgagaaccaggctgcctgggcgccattcacttccccactctctgggggggcagggagcatctaaacctttatctgatactctattccctgtggaattgcaaaatggagaaagctgcacgccagccgggagtggtggctcgcgcctgtaatcccagcactttgagaggccaagacgggtgaatcacttgtcaggagttcaagaccagcctagccaacgtggtgaaacctcatctctactaaaaaaaaaa

SEQ ID NO: 405868 - DNA, 1016 bp, Homo sapiens
gagagagagagagagagagagagagagagagagagataggacttcctccccgattcgcaaagtgaagtcacttcccaaaattagctgaaaaaaaagtttcatccggttaactgtctctttcgctccgctacaacaacaaacgtgcacaggggagtgagggcagggcgctcgcagggggcacgcagggagggcccagggcgccagggaggccgcgccgggctaatccgaaggggctgcgaggtcaggctgtaaccgggtcaatgtgtggaatattggggggctcggctgcagacttggccaaatggacgggactattaaggaggctctgtcggtggtgagcgacgaccagtccctctttgactcagcgtacggagcggcagcccatctccccaaggccgacatgactgcctcggggagtcctgactacgggcagccccacaagatcaaccccctcccaccacagcaggagtggatcaatcagccagtgagggtcaacgtcaagcgggagtatgaccacatgaatggatccagggagtctccggtggactgcagcgttagcaaatgcagcaagctggtgggcggaggcgagtccaaccccatgaactacaacagctatatggacgagaagaatggcccccctcctcccaacatgaccaccaacgagaggagagtcatcgtccccgcagaccccacactgtggacacaggagcatgtgaggcaatggctggagtgggccataaaggagtacagcttgatggagatcgacacatcctttttccagaacatggatggcaaggaactgtgtaaaatgaacaaggaggacttcctccgcgccaccaccctctacaacacggaagtgctgttgtcacacctcagttacctcagggaaagttcactgtgggctataaataaaactcccaacgagcaatcctccccgattgagtgtcaagaaaaccctcttttgaatcagccggaaaggagctggggcataaactgatttgggcccacaaaaggcc

SEQ ID NO: 405869 - DNA, 3045 bp, Homo sapiens
gagagagagagagagagagagagagagagagagagataggacttcctccccgattcgcaaagtgaagtcacttcccaaaattagctgaaaaaaaagtttcatccggttaactgtctctttcgctccgctacaacaacaaacgtgcacaggggagtgagggcagggcgctcgcagggggcacgcagggagggcccagggcgccagggaggccgcgccgggctaatccgaaggggctgcgaggtcaggctgtaaccgggtcaatgtgtggaatattggggggctcggctgcagacttggccaaatggacgggactattaaggaggctctgtcggtggtgagcgacgaccagtccctctttgactcagcgtacggagcggcagcccatctccccaaggccgacatgactgcctcggggagtcctgactacgggcagccccacaagatcaaccccctcccaccacagcaggagtggatcaatcagccagtgagggtcaacgtcaagcgggagtatgaccacatgaatggatccagggagtctccggtggactgcagcgttagcaaatgcagcaagctggtgggcggaggcgagtccaaccccatgaactacaacagctatatggacgagaagaatggcccccctcctcccaacatgaccaccaacgagaggagagtcatcgtccccgcagaccccacactgtggacacaggagcatgtgaggcaatggctggagtgggccataaaggagtacagcttgatggagatcgacacatcctttttccagaacatggatggcaaggaactgtgtaaaatgaacaaggaggacttcctccgcgccaccaccctctacaacacggaagtgctgttgtcacacctcagttacctcagggaaagttcactgctggcctataatacaacctcccacaccgaccaatcctcacgattgagtgtcaaagaagacccttcttatgactcagtcagaagaggagcttggggcaataacatgaattctggcctcaacaaaagtcctccccttggaggggcacaaacgatcagtaagaatacagagcaacggccccagccagatccgtatcagatcctgggcccgaccagcagtcgcctagccaaccctggaagcgggcagatccagctgtggcaattcctcctggagctgctctccgacagcgccaacgccagctgtatcacctgggaggggaccaacggggagttcaaaatgacggaccccgatgaggtggccaggcgctggggcgagcggaaaagcaagcccaacatgaattacgacaagctgagccgggccctccgttattactatgataaaaacattatgaccaaagtgcacggcaaaagatatgcttacaaatttgacttccacggcattgcccaggctctgcagccacatccgaccgagtcgtccatgtacaagtacccttctgacatctcctacatgccttcctaccatgcccaccagcagaaggtgaactttgtccctccccatccatcctccatgcctgtcacttcctccagcttctttggagccgcatcacaatactggacctcccccacggggggaatctaccccaaccccaacgtcccccgccatcctaacacccacgtgccttcacacttaggcagctactactagaagcttactcatcagtggccttctagctgaagcccatcctgcacacttactggatgctttggactcaacaggacatatgtggccttgaagggaagacaaaactggatgttctttcttgttggatagaacctttgtatttgttctttatgaataattccatgggccagtatgccagtttgaattctcagtctcctagcatcttgtgagttgcatattaagattactggaatggttaagtcatggttctgagaaagaagctgtacgttttctttatgtttttatgaccaaagcagtttcttgtcaatacacggggttcagtatgacacagaatcatggacttaacccgtcatgttctggtttgagatttagtgacaaatagaggtgggaagcttataatctaattttaggaggaccaaattcagtggatggcaactggaacattgattgtaaggccagtgaagttttcacccaactggaatttgatggaaagaaggtttgtgtgtttaagacgccaagggcattgcagaatccctctcagtggacagtatgcactcagctgaccactctctctagaaatagtcaagatatgaactaagaaattttaatgcaaatacatacattcctgaaagacggggaattaaattactaatttttttttttttttaaatgatgacagtggtcccagaacttggaaaagttgtagggatttctaaactcaagcagattcgcaagtgctgtgcgcttgtcagaccatcagaccagggccaaccaatcagaaggcaacttactgtataaattatgcagagttattttcctatatctcacagtattaaaaataaataattaaaaattaagaataaataaacgagttgacctcggtcacaaaagcagttttactatcgaatcaatcgctgttattttttttaatgtaatttgtacatcttttttcaatctgtacatttgggctgtctgtatgtttttatagctggtttttaaaaagcataatatgcctatagctgaaaaggaaacagggctgtttaagtcactgacttatgagaaagcaaagcactggtacagttatttaacaggcatacacaagcagggaaaagataatccatttagatctttaatgctttggaaatgcgtgtaacagtactgcaataatcacagctctgggaaaaacaacgaaactttcccttgtggagaggagggattttcctgctctatataagcaacatatttttagacattaaaatatatataattttgcaggtaattgttgacttttttaactatattaagtgttaagctgacaactgtcaaagaagaccatgttgtaaaataatttgactaaataaatggttccttctctcaaaaaaaaaaaa

SEQ ID NO: 405870 - DNA, 2102 bp, Homo sapiens
cccactagttacccaccccaaactggatcctacagccaagctccaagtcaatatagccaacagagcagcagctacgggcagcagaatccgtatcagatcctgggcccgaccagcagtcgcctagccaaccctggaagcgggcagatccagctgtggcaattcctcctggagctgctctccgacagcgccaacgccagctgtatcacctgggaggggaccaacggggagttcaaaatgacggaccccgatgaggtggccaggcgctggggcgagcggaaaagcaagcccaacatgaattacgacaagctgagccgggccctccgttattactatgataaaaacattatgaccaaagtgcacggcaaaagatatgcttacaaatttgacttccacggcattgcccaggctctgcagccacatccgaccgagtcgtccatgtacaagtacccttctgacatctcctacatgccttcctaccatgcccaccagcagaaggtgaactttgtccctccccatccatcctccatgcctgtcacttcctccagcttctttggagccgcatcacaatactggacctcccccacggggggaatctaccccaaccccaacgtcccccgccatcctaacacccacgtgccttcacacttaggcagctactactagaagcttactcatcagtggccttctagctgaagcccatcctgcacacttactggatgctttggactcaacaggacatatgtggccttgaagggaagacaaaactggatgttctttcttgttggatagaacctttgtatttgttctttaaaaacattttttttaatgttggtaacttttgcttcctctacctgaacaaagagatgaataattccatgggccagtatgccagtttgaattctcagtctcctagcatcttgtgagttgcatattaagattactggaatggttaagtcatggttctgagaaagaagctgtacgttttctttatgtttttatgaccaaagcagtttcttgtcaatacacggggttcagtatgacacagaatcatggacttaacccgtcatgttctggtttgagatttagtgacaaatagaggtgggaagcttataatctaattttaggaggaccaaattcagtggatggcaactggaacattgattgtaaggccagtgaagttttcacccaactggaatttgatggaaagaaggtttgtgtgtttaagacgccaagggcattgcagaatccctctcagtggacagtatgcactcagctgaccactctctctagaaatagtcaagatatgaactaagaaattttaatgcaaatacatacattcctgaaagacggggaattaaattactaatttttttttttttttaaatgatgacagtggtcccagaacttggaaaagttgtagggatttctaaactcaagcagattcgcaagtgctgtgcgcttgtcagaccatcagaccagggccaaccaatcagaaggcaacttactgtataaattatgcagagttattttcctatatctcacagtattaaaaataaataattaaaaattaagaataaataaacgagttgacctcggtcacaaaagcagttttactatcgaatcaatcgctgttattttttttaatgtaatttgtacatcttttttcaatctgtacatttgggctgtctgtatgtttttatagctggtttttaaaaagcataatatgcctatagctgaaaaggaaacagggctgtttaagtcactgacttatgagaaagcaaagcactggtacagttatttaacaggcatacacaagcagggaaaagataatccatttagatctttaatgctttggaaatgcgtgtaacagtactgcaataatcacagctctgggaaaaacaacgaaactttcccttgtggagaggagggattttcctgctctatataagcaacatatttttagacattaaaatatatataattttgcaggtaattgttgacttttttaactatattaagtgttaagctgacaactgtcaaagaagaccatgttgtaaaataatttgactaaataaatggttccttctctcaaaaaaaaaaaa

SEQ ID NO: 405871 - DNA, 2338 bp, Homo sapiens
gagagagagagagagagagagagagagagagagagataggacttcctccccgattcgcaaagtgaagtcacttcccaaaattagctgaaaaaaaagtttcatccggttaactgtctctttcgctccgctacaacaacaaacgtgcacaggggagtgagggcagggcgctcgcagggggcacgcagggagggcccagggcgccagggaggccgcgccgggctaatccgaaggggctgcgaggtcaggctgtaaccgggtcaatgtgtggaatattggggggctcggctgcagacttggccaaatggacgggactattaaggaggctctgtcggtggtgagcgacgaccagtccctctttgactcagcgtacggagcggcagcccatctccccaaggccgacatgactgcctcggggagtcctgactacgggcagccccacaagatcaaccccctcccaccacagcaggagtggatcaatcagccagtgagggtcaacgtcaagcgggagtatgaccacatgaatggatccagggagtctccggtggactgcagcgttagcaaatgcagcaagctggtgggcggaggcgagtccaaccccatgaactacaacagctatatggacgagaagaatggcccccctcctcccaacatgaccaccaacgagaggagagtcatcgtccccgcagaccccacactgtggacacaggagcatgtgaggcaatggctggagtgggccataaaggagtacagcttgatggagatcgacacatcctttttccagaacatggatggcaaggaactgtgtaaaatgaacaaggaggacttcctccgcgccaccaccctctacaacacggaagtgctgttgtcacacctcagttacctcagggaaagttcactgctggcctataatacaacctcccacaccgaccaatcctcacgattgagtgtcaaagaagacccttcttatgactcagtcagaagaggagcttggggcaataacatgaattctggcctcaacaaaagtcctccccttggaggggcacaaacgatcagtaagaatacagagcaacggccccagccagatccgtatcagatcctgggcccgaccagcagtcgcctagccaaccctggaagcgggcagatccagctgtggcaattcctcctggagctgctctccgacagcgccaacgccagctgtatcacctgggaggggaccaacggggagttcaaaatgacggaccccgatgaggtggccaggcgctggggcgagcggaaaagcaagcccaacatgaattacgacaagctgagccgggccctccgttattactatgataaaaacattatgaccaaagtgcacggcaaaagatatgcttacaaatttgacttccacggcattgcccaggctctgcagccacatccgaccgagtcgtccatgtacaagtacccttctgacatctcctacatgccttcctaccatgcccaccagcagaaggtgaactttgtccctccccatccatcctccatgcctgtcacttcctccagcttctttggagccgcatcacaatactggacctcccccacggggggaatctaccccaaccccaacgtcccccgccatcctaacacccacgtgccttcacacttaggcagctactactagaagcttactcatcagtggccttctagctgaagcccatcctgcacacttactggatgctttggactcaacaggacatatgtggccttgaagggaagacaaaactggatgttctttcttgttggatagaacctttgtatttgttctttatgaataattccatgggccagtatgccagtttgaattctcagtctcctagcatcttgtgagttgcatattaagattactggaatggttaagtcatggttctgagaaagaagctgtacgttttctttatgtttttatgaccaaagcagtttcttgtcaatacacggggttcagtatgacacagaatcatggacttaacccgtcatgttctggtttgagatttagtgacaaatagaggtgggaagcttataatctaattttaggaggaccaaattcagtggatggcaactgtacattatctgatgccattaagcgttatccaacttcactgtcatgaaacacgattttcctttataacccaagactttcataatcctctatcgacacattcactcacgtaccctcttctacactacgaacattaactacaactttattcattcactcttcctaaatacatgaattaatactacctctatttcttaaatatacatagcccaaccttaaaccgtcggcttctaactaaccactcct

SEQ ID NO: 405872 - DNA, 603 bp, Homo sapiens
agagaaagtcgacatgttctcgcaggctgccgggcgtcccggggttgcctcttgcctgtgaccctgacgggagacagagcgcgggcggccgcggcgtccctgtcagcgcccgcggcgaggaccccggggctggggcggacggcgtgcccctgaggggggtccccgcgggagcgcggagccggcgactggtgcttcccacgtgcgccggtgtcgcgagggcccgggaggacgcagagcacggccgggagaagcatgggaaggaggccgagccgggatctcaggtcctcgggggcggcggccacgccaaggacggcatttatgacattaacagagaacaggactatgtcaagaattctgagggtatacttggtgaaaatgaattaagaccaccctcccagctacattctctcttagagaagatcgagacagggtccctatcagaaaagatttttgagacagtgtccttgagttcagactctctcttccagagggcagtttcactcctccatacttcttacttggactcttcatctgagcatggttttcagtacagtcaagtgactttggtgaaaaatgacattttcttaaatgaggtgaggtgct

SEQ ID NO: 405873 - DNA, 797 bp, Homo sapiens
caaagtggaatattatttggcataaaaaggtatgaaatattgatatatgctttaacatggatgaacttcaaaaacaggctaagtgaaagaagccaatcatgaaggaccgcgtgctgtatgactctgtttataggaaatggtctggaataggcaaatctgtagagaccgaaagtaaattatggtttcctaggcctaggaaccagtgaggggtgaggaggatagctaaggggtagaaggtttctttggggataatgaaaatactctaaaattgattgtggtgaaggttgcacaattctgtggatatactaagcacaattctgtggatatactaaaagcaattgaattgtacactttatgtgggtgaattgtatgccgtatgaattatatctcaacattgtattagaaaataaaattaatgaagcatagaagttacggagaactactggaaagaagaaatacaagaactcaaggaagagacagccagacaacagtagagtgtgaaatgggaaccagcagaaaaaaagaaatagagaaaaatgatcaagccatttcagaagtacacaagggagactagacaccatggcaaagatcataaaagtagaaatgaaattttatggtaagtatattttaccacaattttgataatgcaaagaaagaaaacaaaagatagacaggagaaaaatgagtaaaacaggtacacatttatttttattgatgcgtaatagatgtacacagttttaggatacatgtgataatacagtcatataatttgtagagatcaagtcagtgtagttggg

SEQ ID NO: 405874 - DNA, 607 bp, Homo sapiens
tttttgtatttttagtagagacggggtttcaccgagttagccaggatggtctccatctcctgaccttctgatccacccgcctcagcctcccaaagttgctgggattacaggcgtgagccaccgtgcctggcaaataactcataaatagcataattttttttaattccttattcctgtatacataatttttttgacacatctagatactttgtctgtactgaaaatacatgtattgagaagatgtgaacatatttgcagaccatggtttatgggtcatatatttgaaaatctgtactacttaaaaatacacatattatttaacctggagcttatcaacttaaggtcttttttgtggttatatttttgtttacatttatattagaaaaccaaaacttaagaaaatttagatccactgtttattattctgcttgatactgttgtgttgtttttcagaccgcaggaactagattttaaatatgtaatgaaagtgtcttccttgaaaaaaagactaccagaggctgccttcagaaaacagaattacttggaggagaaattttctgctctcttccaaacactcacacatgcacacttctgtttcatcataagt

SEQ ID NO: 405875 - DNA, 1758 bp, Homo sapiens
agagaaagtcgacatgttctcgcaggctgccgggcgtcccggggttgcctcttgcctgtgaccctgacgggagacagagcgcgggcggccgcggcgtccctgtcagcgcccgcggcgaggagaagcatgggaaggaggccgagccgggatctcaggtcctcgggggcggcggccacgccaaggacggtacaaaactttttaccaacaaaaaaaagcaagtagttatactcaggaagaacttcaagacacttacgggtttcttctgtttgatactgagcggcaggcaaaattggtatgtcagtgtggactccgtgttggcagcagtgctgttaccactctgggtgatccagccaaaggtgtatacatttccaaatactccgactgtcttcattcaagaccatggtatcatgggaaatctggttatgttgtaatttttaatataattaaggtaaagcttaaatgtgctgttacgtgatttccttttaaagtttaaggttatctacctttgatattctctgtagatattagttgaacatagttctcaccaaagttagctatccaaattcaggaaaagcaaaactatttttccttttctttaaaaagaaaactttgattcatttactagattgtaaacttttttttaacttcaaaaataataaaagggtatgcagggaaaaatcttcctctcacctgtcagagctactttttaaatatgaaataagagaaaacaagtagctgcttataaggtgatgtgattacacttataaaagatgaatttagaaaacaacattcattgtctaatttaaatggtcaatagaatctttattttctttctccataagacatccagcttcacagcttcatgtgctacctagaactgatgatgccacaaatccttaaatgtcctaaatggtactgttaagtgaatcgtgcaattagaattttcacccaaacagaagggaaactgattttagatgtgattgggcttcttgaggacatttctgtggtctcgttttattgtttttttttttagctttgttactatcttaaattctttggttatcagcctagcactaaatgacctttaattaaaaaaaaaaaaaaacaagagcctgtgaattcttaatattgtaaagtttgttcccaaagtgctgggttacagttgtgagccactgtgcccagctgcttgcttttttctttttttttggagagacatgtaacccttgatggagagaactctgtaatggaaaatactgctgactgttcagcaaccaggaccagctgcctgctaagaactttgctacatatttgctccttgttaacttgctgggccctgtcataatagaagtatctcagtttataatttacaactgatcatagttcagattggaaactcatcttttgaaattttagattttgtcctcttttacattacagtcaccaaagagccattcagtgaccgtaacataaaagatggtgggctatagtttttcttttaaggaaatggctctcttaaatttagggtgattcgtatatttctttgatattgtgataaaaactatggatatttgtctcagacgcccaaatgtccaaaatttttgagtccatttttaagggttcatggataatcaaaactatttttggccttaagataattgttttctaagaagtatagttcttaatacagttactgttaggggacacatatctgcatccttgttagactacttctaaatgaatcctagagtaaaggttatt

SEQ ID NO: 405876 - DNA, 1089 bp, Homo sapiens
taacatttatactatatgaccagtacttccagtgctatataaatcattctcttctccttattgtttataaatactaggtttgtaaaaccccccaaccttaataaagagaatagaaagagtacaaataggagagtgaacagttaaaatggttagatgcaagagtgtccgtaggtcattaggctcagttcttgctaaagtagagacttgtaaaatcaaaaggcacaaagagtcagtcaacataattactggatccagtcggtaattctcaattaggaaacgtgcctctcatgggaagggtgtatcacagtccctcaaagctatctcacatgggtatggtttgaaaaaagcaccttcaaaaaattgtaagtgcagctctgttgtataaaatgaaagaaagtgattttataatacaactcacaggaagtaaaactcaatagactcttcttgacgggtgaggaaatcccagagatacaatgatttctattgtgtctggtgagtgggcaatagtaggtcccttaaaaggaacctagctgacttagggatttaatgaaaatatgtaaagagtaagtttatcaagtgtggcgtatatatttaaaaaaaaaagaatagaaacaaaggatgaaaaaaactaaagaatgagaaattgctctaaaagtctaagcagctcctgaccaccaccttgacactacagttgtatccacttttgaccaactacagttatagtacacagctttcaaccaaaagacataccaggtctggcaggacatattttagctcctgtaaggtcttttaaattttgttaagacagtacaaatatttcttagttatataggaaaggaataggtgatgttttgagtgatattcagtgtgtctcccttaaccccatcctttggaatcttaaatagctgcgttatttttgtttgtgttttacagtttttgagacagtgtccttgagttcagactctctcttccagagggcagtttcactcctccatacttcttacttggactcttcatctgagcatggttttcagtacagtcaagtgactttggtgaaaaatgacattttcttaaatgaggtgaggtgct

SEQ ID NO: 405877 - DNA, 2321 bp, Homo sapiens
caaagtggaatattatttggcataaaaaggtatgaaatattgatatatgctttaacatggatgaacttcaaaaacaggctaagtgaaagaagccaatcatgaaggaccgcgtgctgtatgactctgtttataggaaatggtctggaataggcaaatctgtagagaccgaaagtaaattatggtttcctaggcctaggaaccagtgaggggtgaggaggatagctaaggggtagaaggtttctttggggataatgaaaatactctaaaattgattgtggtgaaggttgcacaattctgtggatatactaagcacaattctgtggatatactaaaagcaattgaattgtacactttatgtgggtgaattgtatgccgtatgaattatatctcaacattgtattagaaaataaaattaatgaagcatagaagttacggagaactactggaaagaagaaatacaagaactcaaggaagagacagccagacaacagtagagtgtgaaatgggaaccagcagaaaaaaagaaatagagaaaaatgatcaagccatttcagaagtacacaagggagactagacaccatggcaaagatcataaaagtagaaatgaaattttatgcatttatgacattaacagagaacaggactatgtcaagaattctgagggtatacttggtgaaaatgaattaagaccaccctcccagctacattctctcttagagaagatcgagacagggtccctatcagaaaagatacaaaactttttaccaacaaaaaaaagcaagtagttatactcaggaagaacttcaagacacttacgggtttcttctgtttgatactgagcggcaggcaaaattggtatgtcagtgtggactccgtgttggcagcagtgctgttaccactctgggtgatccagccaaaggtgtatacatttccaaatactccgactgtcttcattcaagaccatggtatcatgggaaatctggttatgttgtaatttttaatataattaaggtaaagcttaaatgtgctgttacgtgatttccttttaaagtttaaggttatctacctttgatattctctgtagatattagttgaacatagttctcaccaaagttagctatccaaattcaggaaaagcaaaactatttttccttttctttaaaaagaaaactttgattcatttactagattgtaaacttttttttaacttcaaaaataataaaagggtatgcagggaaaaatcttcctctcacctgtcagagctactttttaaatatgaaataagagaaaacaagtagctgcttataaggtgatgtgattacacttataaaagatgaatttagaaaacaacattcattgtctaatttaaatggtcaatagaatctttattttctttctccataagacatccagcttcacagcttcatgtgctacctagaactgatgatgccacaaatccttaaatgtcctaaatggtactgttaagtgaatcgtgcaattagaattttcacccaaacagaagggaaactgattttagatgtgattgggcttcttgaggacatttctgtggtctcgttttattgtttttttttttagctttgttactatcttaaattctttggttatcagcctagcactaaatgacctttaattaaaaaaaaaaaaaaacaagagcctgtgaattcttaatattgtaaagtttgttcccaaagtgctgggttacagttgtgagccactgtgcccagctgcttgcttttttctttttttttggagagacatgtaacccttgatggagagaactctgtaatggaaaatactgctgactgttcagcaaccaggaccagctgcctgctaagaactttgctacatatttgctccttgttaacttgctgggccctgtcataatagaagtatctcagtttataatttacaactgatcatagttcagattggaaactcatcttttgaaattttagattttgtcctcttttacattacagtcaccaaagagccattcagtgaccgtaacataaaagatggtgggctatagtttttcttttaaggaaatggctctcttaaatttagggtgattcgtatatttctttgatattgtgataaaaactatggatatttgtctcagacgcccaaatgtccaaaatttttgagtccatttttaagggttcatggataatcaaaactatttttggccttaagataattgttttctaagaagtatagttcttaatacagttactgttaggggacacatatctgcatccttgttagactacttctaaatgaatcctagagtaaaggttatt

SEQ ID NO: 405878 - DNA, 1884 bp, Homo sapiens
agagaaagtcgacatgttctcgcaggctgccgggcgtcccggggttgcctcttgcctgtgaccctgacgggagacagagcgcgggcggccgcggcgtccctgtcagcgcccgcggcgaggaccccggggctggggcggacggcgtgcccctgaggggggtccccgcgggagcgcggagccggcgactggtgcttcccacgtgcgccggtgtcgcgagggcccgggaggacgcagagcacggccgggagaagcatgggaaggaggccgagccgggatctcaggtcctcgggggcggcggccacgccaaggacggtacaaaactttttaccaacaaaaaaaagcaagtagttatactcaggaagaacttcaagacacttacgggtttcttctgtttgatactgagcggcaggcaaaattggtatgtcagtgtggactccgtgttggcagcagtgctgttaccactctgggtgatccagccaaaggtgtatacatttccaaatactccgactgtcttcattcaagaccatggtatcatgggaaatctggttatgttgtaatttttaatataattaaggtaaagcttaaatgtgctgttacgtgatttccttttaaagtttaaggttatctacctttgatattctctgtagatattagttgaacatagttctcaccaaagttagctatccaaattcaggaaaagcaaaactatttttccttttctttaaaaagaaaactttgattcatttactagattgtaaacttttttttaacttcaaaaataataaaagggtatgcagggaaaaatcttcctctcacctgtcagagctactttttaaatatgaaataagagaaaacaagtagctgcttataaggtgatgtgattacacttataaaagatgaatttagaaaacaacattcattgtctaatttaaatggtcaatagaatctttattttctttctccataagacatccagcttcacagcttcatgtgctacctagaactgatgatgccacaaatccttaaatgtcctaaatggtactgttaagtgaatcgtgcaattagaattttcacccaaacagaagggaaactgattttagatgtgattgggcttcttgaggacatttctgtggtctcgttttattgtttttttttttagctttgttactatcttaaattctttggttatcagcctagcactaaatgacctttaattaaaaaaaaaaaaaaacaagagcctgtgaattcttaatattgtaaagtttgttcccaaagtgctgggttacagttgtgagccactgtgcccagctgcttgcttttttctttttttttggagagacatgtaacccttgatggagagaactctgtaatggaaaatactgctgactgttcagcaaccaggaccagctgcctgctaagaactttgctacatatttgctccttgttaacttgctgggccctgtcataatagaagtatctcagtttataatttacaactgatcatagttcagattggaaactcatcttttgaaattttagattttgtcctcttttacattacagtcaccaaagagccattcagtgaccgtaacataaaagatggtgggctatagtttttcttttaaggaaatggctctcttaaatttagggtgattcgtatatttctttgatattgtgataaaaactatggatatttgtctcagacgcccaaatgtccaaaatttttgagtccatttttaagggttcatggataatcaaaactatttttggccttaagataattgttttctaagaagtatagttcttaatacagttactgttaggggacacatatctgcatccttgttagactacttctaaatgaatcctagagtaaaggttatt

SEQ ID NO: 405879 - DNA, 884 bp, Homo sapiens
agagaaagtcgacatgttctcgcaggctgccgggcgtcccggggttgcctcttgcctgtgaccctgacgggagacagagcgcgggcggccgcggcgtccctgtcagcgcccgcggcgaggaccccggggctggggcggacggcgtgcccctgaggggggtccccgcgggagcgcggagccggcgactggtgcttcccacgtgcgccggtgtcgcgagggcccgggaggacgcagagcacggccgggagaagcatgggaaggaggccgagccgggatctcaggtcctcgggggcggcggccacgccaaggacggtacaaaactttttaccaacaaaaaaaagcaagtagttatactcaggaagaacttcaagacacttacgggtttcttctgtttgatactgagcggcaggcaaaattggtatgtcagtgtggactccgtgttggcagcagtgctgttaccactctgggtgatccagccaaagtattacttttacgaactttcaggcaacaccgttattgaacgacccagacagatctgtccttatgtaattgtagcttttcgatacagggaatctaaaactatggcaccaccagctcataaaagcatacttgaacgcagtgaaaatgttctcatgtctccatggaaagggaaattaattgttcaagaccgtatgctatgtgatatagctctttggtccacttacggtgcaatgattccaacacagctaccgcaggaactagattttaaatatgtaatgaaagtgtcttccttgaaaaaaagactaccagaggctgccttcagaaaacagaattacttggaggagaatctgttttcaagatttgtgcttcaatttgtatgaggtagaactgtcaaacagacaagg

SEQ ID NO: 405880 - DNA, 730 bp, Homo sapiens
aaatatatacgccacacttgataaacttactctttacatgattttataatacaactcacaggaagtaaaactcaatagactcttcttgacgggtgaggaaatcccagagatacaatgatttctattgtgtctggtgagtgggcaatagtaggtcccttaaaaggaacctagctgacttagggatttaatgaaaatatgtaaagagtaagtttatcaagtgtggcgtatatatttaaaaaaaaaagaatagaaacaaaggatgaaaaaaactaaagaatgagaaattgctctaaaagtctaagcagctcctgaccaccaccttgacactacagttgtatccacttttgaccaactacagttatagtacacagctttcaaccaaaagacataccaggtctggcaggacatattttagctcctgtaaggtcttttaaattttgttaagacagtacaaatatttcttagttatataggaaaggaataggtgatgttttgagtgatattcagtgtgtctcccttaaccccatcctttggaatcttaaatagctgcgttatttttgtttgtgttttacagtttttgagacagtgtccttgagttcagactctctcttccagagggcagtttcactcctccatacttcttacttggactcttcatctgagcatggttttcagtacagtcaagtgactttggtgaaaaatgacattttcttaaatgaggtgaggtgct

SEQ ID NO: 405881 - DNA, 282 bp, Homo sapiens
tttttttgcccccccctccccttttcttttcctttggccgcgaggttttgcttccggttgctagcgccggtcagagagaaagtcgacatgttctcgcaggctgccgggcgtcccggggttgcctcttgcctgtgaccctgacgggagacagagcgcgggcggccgcggcgtccctgtcagcgcccgcggcgaggaccccggggctggggcggacggcgtgcccctgaggggggtccccgcgggagcgcggagccggcgactggtgcttcccacgtgcgccgg

SEQ ID NO: 405882 - DNA, 465 bp, Homo sapiens
agagaaagtcgacatgttctcgcaggctgccgggcgtcccggggttgcctcttgcctgtgaccctgacgggagacagagcgcgggcggccgcggcgtccctgtcagcgcccgcggcgaggaccccggggctggggcggacggcgtgcccctgaggggggtccccgcgggagcgcggagccggcgactggtgcttcccacgtgcgccggtgtcgcgagggcccgggaggacgcagagcacggccgggagaagcatgggaaggaggccgagccgggatctcaggtcctcgggggcggcggccacgccaaggacgggtaagtccctcctcggcctgggcgcccgggaaccctgcgaggaggacggcgggtccccgaggccgagcgctcgggcagctgccggggcttggctgcgagggtcgacgcgttctccttgccttttgccgcgctccgggtgagggggtgggagg

SEQ ID NO: 405883 - DNA, 2018 bp, Homo sapiens
agagaaagtcgacatgttctcgcaggctgccgggcgtcccggggttgcctcttgcctgtgaccctgacgggagacagagcgcgggcggccgcggcgtccctgtcagcgcccgcggcgaggaccccggggctggggcggacggcgtgcccctgaggggggtccccgcgggagcgcggagccggcgactggtgcttcccacgtgcgccggtgtcgcgagggcccgggaggacgcagagcacggccgggagaagcatgggaaggaggccgagccgggatctcaggtcctcgggggcggcggccacgccaaggacggcatttatgacattaacagagaacaggactatgtcaagaattctgagggtatacttggtgaaaatgaattaagaccaccctcccagctacattctctcttagagaagatcgagacagggtccctatcagaaaagatacaaaactttttaccaacaaaaaaaagcaagtagttatactcaggaagaacttcaagacacttacgggtttcttctgtttgatactgagcggcaggcaaaattggtatgtcagtgtggactccgtgttggcagcagtgctgttaccactctgggtgatccagccaaaggtgtatacatttccaaatactccgactgtcttcattcaagaccatggtatcatgggaaatctggttatgttgtaatttttaatataattaaggtaaagcttaaatgtgctgttacgtgatttccttttaaagtttaaggttatctacctttgatattctctgtagatattagttgaacatagttctcaccaaagttagctatccaaattcaggaaaagcaaaactatttttccttttctttaaaaagaaaactttgattcatttactagattgtaaacttttttttaacttcaaaaataataaaagggtatgcagggaaaaatcttcctctcacctgtcagagctactttttaaatatgaaataagagaaaacaagtagctgcttataaggtgatgtgattacacttataaaagatgaatttagaaaacaacattcattgtctaatttaaatggtcaatagaatctttattttctttctccataagacatccagcttcacagcttcatgtgctacctagaactgatgatgccacaaatccttaaatgtcctaaatggtactgttaagtgaatcgtgcaattagaattttcacccaaacagaagggaaactgattttagatgtgattgggcttcttgaggacatttctgtggtctcgttttattgtttttttttttagctttgttactatcttaaattctttggttatcagcctagcactaaatgacctttaattaaaaaaaaaaaaaaacaagagcctgtgaattcttaatattgtaaagtttgttcccaaagtgctgggttacagttgtgagccactgtgcccagctgcttgcttttttctttttttttggagagacatgtaacccttgatggagagaactctgtaatggaaaatactgctgactgttcagcaaccaggaccagctgcctgctaagaactttgctacatatttgctccttgttaacttgctgggccctgtcataatagaagtatctcagtttataatttacaactgatcatagttcagattggaaactcatcttttgaaattttagattttgtcctcttttacattacagtcaccaaagagccattcagtgaccgtaacataaaagatggtgggctatagtttttcttttaaggaaatggctctcttaaatttagggtgattcgtatatttctttgatattgtgataaaaactatggatatttgtctcagacgcccaaatgtccaaaatttttgagtccatttttaagggttcatggataatcaaaactatttttggccttaagataattgttttctaagaagtatagttcttaatacagttactgttaggggacacatatctgcatccttgttagactacttctaaatgaatcctagagtaaaggttatt

SEQ ID NO: 405884 - DNA, 758 bp, Homo sapiens
agagaaagtcgacatgttctcgcaggctgccgggcgtcccggggttgcctcttgcctgtgaccctgacgggagacagagcgcgggcggccgcggcgtccctgtcagcgcccgcggcgaggagaagcatgggaaggaggccgagccgggatctcaggtcctcgggggcggcggccacgccaaggacggtacaaaactttttaccaacaaaaaaaagcaagtagttatactcaggaagaacttcaagacacttacgggtttcttctgtttgatactgagcggcaggcaaaattggtatgtcagtgtggactccgtgttggcagcagtgctgttaccactctgggtgatccagccaaagtattacttttacgaactttcaggcaacaccgttattgaacgacccagacagatctgtccttatgtaattgtagcttttcgatacagggaatctaaaactatggcaccaccagctcataaaagcatacttgaacgcagtgaaaatgttctcatgtctccatggaaagggaaattaattgttcaagaccgtatgctatgtgatatagctctttggtccacttacggtgcaatgattccaacacagctaccgcaggaactagattttaaatatgtaatgaaagtgtcttccttgaaaaaaagactaccagaggctgccttcagaaaacagaattacttggaggagaatctgttttcaagatttgtgcttcaatttgtatgaggtagaactgtcaaacagacaagg

SEQ ID NO: 405885 - DNA, 2682 bp, Homo sapiens
  misc_feature (1497)..(1497): n is a, c, g, or t
  misc_feature (1756)..(1756): n is a, c, g, or t
  misc_feature (2071)..(2071): n is a, c, g, or t
  misc_feature (2086)..(2086): n is a, c, g, or t
agacgtcattatcagtccacatctctgaaggatcacgtttctgaaggatggtcaacagcattagacatgctgacaaggaaccgtggcagcccagtgtcacctacagtcctggacatgtgggggcaagaaggtacacatgagtgtgtggttatgagtcaggagcaccacgggatgaccttcagatcaggcatgacaaggtcctgcttagaggacggtctgggcttgtgtacctttatccggcagggacctacccagctggattgacctcactcatgccctctggtttccctgcaggagccagagcctgcagggtgggtgtcgggacatgctgatcttccctcaagacaggtgagtggcctgggtttagcttggggacatcctctcccacataggacagcagagtgttctggtgggcctggcgggtgggggtgacagggatggactggccctggacactgtgtgctcctggtccttctcaccctgggtaggcacagcccctgggctggacagggtggatgtgagggcctcctgccaccagcttgggtttgttactggcctgaatatgggcagcagccactggtttgatgtctggctttagggacaagcctgtttggggctggctgacgaggttgctggtcagtgttggtttggacattcactgggtctgctcttcacctgcctgagctaggatgccagccgcagtggcatccagtattggcacagcctgctgggccaggccattcgcttgccccccagagactggagccacagggacagaggatagtcctggaggccaggcacacaaaactttgtttgaaaaggtctgatagtaagtaattcaattttgcaggccttatggtctctgtcacagctgcagttctctgccattgtaggatgaaaatggctgcagacagcccataactgaatagtctgaatgtactctgatcacagccgtaggccatgtgtactggcccgtggcctcaggtgttatctgtgtttggggttcctctgcttatcatggctgctagctccagtgggactgaggcatagcgcctgggaagcatggcagggttggaggctgagtggtccatgtcccccaggaccctctgaaggatggtaaggcataccctgctcacatccacgctgccagagttttgccacgatgggtgctgttcagcagagtgggtgatggcttaagagaatggctcctggccattcttgttcctccagtccccaccctggccatctgcctgtccccccaaaaagcagtctctgtgggaggcatggctgacagccctgtggtttctcagtgacaattagtgcccattgtggaggcatggcccagccagtgctgtgcctaagtggtagggagaaggccatggcctccggatgcctgagtgacctaggctgagggatctagggcagatgggagggacaggatgactgactccttgcctgttcccaagtccttgggcatggaaagctgccggccgggcnagcctagtgggagctgggtctgctgccgcctggctgtgtgggaggaccagcgtctggccgagaatgtcactgctcaggccatttggccatgcagggtcttctgggttgggacaaagaagctcaggcagggtacttggcttgcttgtggcacaggtgacagggcatctcagggtggcaggaggggctgtcccactgcccttaactcctcgtaggtcaccacacttcagggaggccaggtcagccagacaccaaacgacanccctggtaacagggtccgcaggagggtggttggctgggcaggtccgaggctgcccaggcacacttgctcactctccctcctgttgcttgctcctttcttgtcccttcttttccctcccccctccagttcttggtcttctctatgtttctctgtggccctctctgtgcctctttctctgcctttccccatctcctatcctgcccatctggaatgtggtgattgcttattcctgtctgctgtggtgattggtttttcatgtctgccctgggcactggtgcgatgggtgatggcatttgtgccatctctgctctggcntgggcaacctgggcnctggcttgcggctgcctgctctgctgggccctggggtgtggtcctgtccacagcgggaggcagctggggagggagcctcagggctcagctgggacaggggctgatgtaaacacccatgtgtcaccacactcagcacccactcacccagcctcatgctgggtcctgggcatcacaggcacatcaggcccagccctgcccctgaggagctcccagcctggttgaggagatccacaacacacagaggaaccagtggccaactgtggggttacaagatggtgatgagtagcatggctcccttaggagggggagctgggagggtgtgatggggtggtgcgtgctgagaccaggcctgagtgagaagggctggcggggacacagatgccctgccgtttcccatagctggccagcagtggtgtcctctcagagaccagcaccagcctggcctcctccatcagccgccgtgtgcctgcagggggttgcggcttcgtctcctgcggccgcctggcccctatgacaggccttctcttgggttttgatgtgtttctcagccattgtatgagtctttgtatattaaagatattaattcttcactcctc

SEQ ID NO: 405886 - DNA, 1256 bp, Homo sapiens
  misc_feature (560)..(560): n is a, c, g, or t
tgtgtcggccctggcgtctgctgttcggctagtgctcgcggtgggccgggctgggcggcgtgggcggtgtttctgtgtgcgtgtgtgcctcagccccctgtcgtgtgttgcgtgtgcgccgctgcgcgtctggctgcgtgctgtctacgcgccgcggtcgtgctctcttccgttggtcgtttgtgctgctcctacctcttcacgcctcactcctgcctgttgcttgctttctgacgtcctcccgctgctccctccgcccgccttagtttgtgtcgccggcgtccgcctggacgtaactagataacgacgtgcccagtttttcacatcttcaagccgcccgcggagaaaaagtgtgttctacggatcaatcacgtccgtgggggcgcaaaatcttcttccatggggccggctaagtatatactgcggcggtggggtgaccacgcctaaaagacacgtcccgaaatttgttaattatttgcgcccccctgaagggcgcggttatcattatctcctctgtagtgtaggtggttggtcgctcgcagatttggttcggccccgcnacagtagtagtagggggtcgtctcttcccgcacaaaggatcctccaccagaagtgcagacatttgtttctcccctgcgccacgtgtgggttagtaaacaccgcgccgccgcctttttataaccgccccttatagggggcccccttttacaaaaaaagggggggggcggagtgggggccccccggggggagtatttttggggcggcgcccccccctttttttttttttttttttttttttttttttttttttttttttttttttttttttttttagctagccagtgttagtaaagaagtcatgattgagtcttaaaaaagaacaatccagtgttgcagttcagagaggttagcatgtcagggcgcaggcctcggccgaggtgtgctttgcatttaggacacagcccggagccgcagaaggtcagcaggagcacgtctggcaccttcagtaccaggctgggtgagagagcccgagaggggggccggggggggcagtcagggccctgcttcgctgcctgggcccttgtagatggccttctccaggccgtccaccacctccctgtattccaggaacgattggtagtgtgtgcactcaaaacaagttgctttcggtcaccttttgataggaaaatcttgatcaccctggctatataatagtgttcacccaaaagaattgtcctctttttgaataaggcccc

SEQ ID NO: 405887 - DNA, 283 bp, Homo sapiens
agcgtcccaggacatcatcccccagctgaagaagaattatgatgtcctgggacgctcaaccacaagggtgaccttgtccttcatgccagcgaaatccaccatccgctgggtgatggcggcacagtcggggttgatctcgatggtgatgagcctcgcccctggtgacagcaggcgggccatgcgcacagctgagtagccacagtaggcccccagctccagcagcacggagggctggtgctcctgaatcacggcgtccacgatcttgcctgtgcagggttgggga

SEQ ID NO: 405888 - DNA, 7669 bp, Homo sapiens
  misc_feature (6736)..(6736): n is a, c, g, or t
gcggccgaggcgccggagccgagcctggtccagccaccgcctcccccgctgctggccagcgccccccgagtcccggcccgatgccggccgaactcagacaggagcagagcccaggcagccaggcctcactggccacgatgccggaggcacctgatgtgctggaggagaccgtgacggtggaggaggaccccggcacacccacttcccatgtgtctattgtcacatccgaagatggcacaacccggcgcaccgagaccaaggtcaccaagactgtcaagacggtgaccactcggacagtacgccaggtgcccgtgggcccagatggactccccctgctggatggcggccccccactaggcccttttgcagatggtgccctggaccggcatttcctgctgcgtggtggtggcccagtggccacactctctcgagcctacctcagcagtgggggtggctttcccgaaggccccgagccccgggacagccccagctatggcagcctgtcccgagggctgggcatgcggcccccacgtgctggcccccttggcccaggccctggtgatggctgcttcacactgcctggccaccgggaagccttcccggtgggtcctgagcctgggccaccaggtggccgctccctgcccgagcgcttccaggcagagccgtatggcttggaggatgacacgcgcagcctggccgctgatgacgagggtggccctgagctggagcctgactatggcacggccacaaggaggaggcctgagtgtgggcggggccttcataccagggcctacgaggacacagcagatgatggcggcgagctggcggacgagcggcctgcgttcccaatggtgacggcgcccctggcccagcctgaacggggcagcatgggcagcctggaccggctggtgcggcgctcgccctcagtggatagcgcccgcaaggagccgcgctggcgggaccctgagctgcctgaggtgctggccatgctgcggcaccccgtggaccccgtgaaggccaatgcggccgcctacctgcagcatctgtgctttgagaacgagggtgtcaagcggcgtgtacggcagttgcgggggctgccgctgcttgtggcactgctggaccacccgcgggctgaggtgcggcgccgggcctgtggggcactgcgcaacctctcctatggccgcgacactgacaacaaggccgccatccgggactgcggtggtgtgcctgccctggtgcgcctgctgagggctgcccgggacaacgaggtccgtgagcttgtcactggcaccctgtggaacctgtcatcctatgagcccctgaagatggtcatcattgaccatggcctgcagacgctgacccacgaggtgatcgtgccccactcaggatgggagcgtgagcccaacgaggactccaagccacgggacgccgagtggacaactgtcttcaagaacacgtcgggctgcctgaggaatgtgagctccgatggtgctgaggcccggcggcgactccgggagtgtgaagggctggtggacgcgctcctgcatgccctgcagtcggctgtgggccggaaggacactgacaacaagtcggtggagaactgcgtgtgcatcatgcggaacctgtcctaccacgtgcacaaggaggtgcccggggccgacaggtaccaggaggccgagcccgggcccctgggcagtgctgtaggctcccagcgccggaggcgggatgatgccagctgctttggaggcaagaaggccaaaggaaagaaggatggtgagatggaccggaactttgacacgctagacctgcccaagcgaactgaggccgccaaaggctttgagctgctgtaccagcccgaggtggtacgtctctacctctccctcctcacggagagccggaacttcaacaccctggaggctgccgccggcgctctgcagaacctcagtgccggcaactggatgtgggccacgtacatccgcgccacagtgcgcaaagagcgcgggctgccggtgcttgtggaactgctgcagtctgagaccgacaaggtggtgcgcgccgtcgccatcgctctgcgcaacctctcgctggaccggcgcaacaaagacctcatcgggagctacgccatggctgagcttgtgcggaatgtgcgcaatgcacaggctccgccgcgaccgggggcctgcctggaggaagacaccgtggtggcggtgctcaacaccatccacgaaatcgtgtccgacagcctggataacgcgcgctcgctcctgcaggcacgcggggtgccagcgttggtggctctcgtggcctccagccaatcggtacgcgaagcgaaggcggcgtcacacgtgctgcagacagtgtggagctacaaggagctgcgtggtaccttgcagaaagatggttggaccaaggcgcgcttccagtcagctgctgctactgccaaggggcctaagggagcactgagtcctgggggcttcgatgacagcacgctgccactggtggacaagagccttgagggcgagaaaactggcagccgggatgtgatccccatggatgcgctgggcccagacggatactccacggtggaccagagggagcggaggccacggggcgccagctctgcaggagaggcctctgagaaggaacccttgaaactcgaccccagcaggaaggcccctccccccgggcccagcaggcccgcggtcaggctggtggacgccgtaggggacgctaagcctcagcccgttgattcctgggtctagcttgcatgcctgggcccaggcccagcctcttgttcttagggcttggatcgtggaagaagggccaccctgagcagatcgtgccgtggagcttggagccccctggcggcaggggttggcagcgcctcgccccagccaagcctgactttggggacaccctcctgcccccccaccccactccccccatcctacctaactccctaggcctgagttagctgtttactgacatggtgctgtgtgtgagcgagtgacagaaggcccgaggaggccgactgggctgctggggcagggcccagggaggtggcagggaagggtgcctggctgggctttggggctggtgggataggagggtgcccctgggaacacagtgccccagtggtgcgggccaggtctggcgccaggggcaggcagctaggcagggagggggctgggaaagaacttggacttctaaaggcggagggtctccctgggcaccctgcaggcaggcagaccacagtgtggggggtgccccacaaggctcagccctgggcaaggaagctttggaagcagcaaggtgggggtcaggctacaggtgccccacctccccagagccctgcagtcacgtgaggcccctgtgcagtagagagcctttctccagcccatgctggctgtggccggggctgccgcatctgcctggagcctgggcagcacctccgggactgaccttcggcagtggctgggggactgctttcagtgcctgctgttcgtgactcagaaacagaagaaaaacactgagaaaaagcattaaaaataagccaaaataagactattggtaaacacctaaatttttgtaagaaaatttaaaaattaaagcagcaaaggaactttttgctttctgccactcaggtctggcacaagtggctggcttctcccttgtgtcgggcctctgcgcgtctggggcagggccctgggtggaggtggtcccaggtgcccatctgctgtgtcctgcagaggctctgtttctggtccctgggtggccccaaacttgtccacttgggctcactggtctgtctatccataggagtgggctggctgggggctagccaggccttgagcccaggagtagaatcttggctaggggctggtctcggtgcaggtgaactcagctagcacagggttgattcctgtcctgggcctgggaactgggcccttggagcctctgaggtggctagcagtctgaccccttggaggagatggggacagctctaggtgtaggtggacagaaaccagcactgcatcctcactcatgggccagggaggcaactacagggatgcgggagctggtctgagccattgcctcttctgtaagcaaggcccagtggggagtagggaaggagatgcttccactctgtgccacatggggcccagaggggctggtgctgctgcggggtccacctgtccccagcgcctgcttggtcagaaaggtgtgaatgctggctgactcctcttcgtttcccaggctggcagtcgtccccatggggctaacaggtgcccctggcctagctgcaggagggctgacctctgcaccactgtggctgggaggccagtgggccaggcgtgccacccagaacccagccagctaggggccccgcccttagcgttagcgtccgtcaaggggagctttgaatgtttggtgcccaagtcaagggcagcaggggaatggcagttgagaaggatgtactaagtcgagttatatctaaatatttagattcttaatttctattttatatttttaaaacatgatattagtatataagataatatagctagccagtgttagtaaagaagtcatgattgagtcttaaaaaagaacaatccagtgttgcagttcagagaggttagcatgtcagggcgcaggcctcggccgaggtgtgctttgcatttaggacacagcccggagccgcagaaggtcagcaggagcacgtctggcaccttcagtaccaggctgggtgagagagcccgagaggggggccggggggggcagtcagggccctgcttcgctgcctgggcccttgtagatggccttctccaggccgtccaccacctccctgtattccaggaacgattggtagtgtgtgcactcaaagcagctgctcccgcgcacgtgtgctaggaagtctggcgcacctgggcagatcacgttgtcagccagtagcactgtccccttccgcagcaggccacattcctgcaaacagaccggggggtgggggaggtgagggtcagaggtgcccagagaacctgccccaaaccaggatgggtgctcctcactaggccacggcaccacgcctgtgcctagcccctggggccaggtttccactttctgcccagcgtgactcctgcaggaaaggactgtacaagacttgggtgccaccttcagaacatgggccccgtgaggacagggacctttctctcatcaactcctgtatccatctcaggagtatccatcccttagaacagcatgtggcacacagtaggtgctcaataaatgctagctgggtgagtggaaacaatggggccctcaacacccagtgccaggaactcaggcctatgagggagaggcacccaaggagaggggttgctggtatggtccctggagacaatattggcctgaccagggtgaccctgcagggctgaggtggggcagacctcccatcaacaagcctgccccttggggtcagttctggacatccccaagctcctgcatttgcagaccccccatcttcaccagtgcctgggccctgggaggacacagagttcctctgcctgggttctgtgcagaaggaaggagttgttactggacacgcagccatagggcatggcccgtggggtccactatcgggagaaacctcataggatgcttgcctatctatgctatcagaaaagggtttgcttacatcacataaacaagaaaccttgagaggaagtgtttgcctatggggaggaaggacctaccagggcaagggacaccccagtcaccttgtcttggaaatttgacttagtcaccaaacaaaagttaacaagcaatctcaaacatctaaagtataataaaatcaatttgcaggcaggtgccttgaaacactggtatccgaccccacatgcctctgggatgggcctggagagtcccacagggcttgcagctgtcctggtggtgggtggcggtcgtttccagcctgtatgctgcagagaaagcagggggctttcatgtgacagtatggacaccacacggctgcaaggtcagtgaggtcaggggacagccccaaggtccggagttgagcaggaagtaccaccatgaatcatgatgtgttttcatttagaaaaaaaaaaaaatgtcctagcaatgtcagctgaaaagacgtagaacaaagcgccacccgggaggaggacaatggcctaggccttgagcagggcggctgccttccagtctgggccagggaatgcatgagtgaggggcctgggctcctggacttctcgggttgcgccaggggactcaggagcccaatctggtcatcagggatacagaagacgtcagcggactgaaagacaccagaccactgcacctgcacgagttaaacaggaaagaaggagggaagggcagaaaggagcatgggtcacctttggaggctgccaggggcccactcctttacgaaactggtcaagaggggaaagaaggcagcacctgtcctgcctgtcgcccgacactgcaagcctcctaccagctactcagaccacctggagaactggctaaacatgcatcagcgtctgagcaggactgaaaatctaatgccatggagaagcgacagtgtcagaggagcaggtgacactatgctgaggtggttttcatctggcccaccctccttagactctcctcccttcaagagttggagcctcacagaggttgcagggagccaagatcgcgccactgcactccagcctgggcnacagagcgagagactgtctcgagaaacaacaacaaaaagttggagcctcagaccaagcacacacctgtactcccagcactttgggaggttgaggcaagaggatcgcttgaggccaggagtttgagaccagtctgggcaacatagggagaccccatttctacaaaaaatttttaaattagccaggtgtagtggtgcatgcctttagtcctagctactcaggaggctgaggtgggaggatcactggagctcaggagtttgaggctacagtgagctatgatgtcatcactgcactccagcctgggcacagagcaagactctgtctttttctttttttttttttttttaagggggaactcattcctcttcctttgggcatgggctggacttggtgactacagcagcccggtggagaggcctcctcaaagcagcccttgattttgaattgcaacctgctcctgagcccctcaccccccgtgcctccgatgctcacagaacccactgaggggatggctagaccctcacaagagccaggttgtcccctaaccctccacaagggggcacagggccccagccctgagtgtgcagatgtgcgtttaacaaggacacccattcccaattcatgacttcccacttcatgactttgcttcttttgagataattaccagctttgcgcaagcagcactgagaaaactattagtttcctagttactaaactgcaatgtttgctacttttctatgaaggcaggcccctgtaattagcacccacatcacagctgctgaaactcggccgcagtaacgcaggcccagctgtgggtgtctttcctgcccaagtgaagcccatctggctgagtgccagctctctgccatcaatacccaattgccagcatcatgctcctttgtcaggggtgagcccccctccagctaccctgtctt

SEQ ID NO: 405889 - DNA, 8154 bp, Homo sapiens
  misc_feature (7221)..(7221): n is a, c, g, or t
gagggactgttttgtctggacatcggtaacattgcagtcgagacttagacttggagtcagacctatattggattagaaacctagttctgtccttcctatgcaggtggccctggatgagtcacggtagtcattggatattcggtttgcacatctgtaagatggggtaaaaagaattgcatttgggatcatgagtattataagtttatagctgaggacttctgatgatggaggtgggcattgtcctaaatgccacatgtccatgactccatcgacttctcagggtgcactgacacgggttgggattaccaggggcccctggtatccccaccccactgagcttactctgctttgcctgcagctggcgggcgctctggtcatggaggactgcaatgtgcactcggccgccagcatcctggcctcggtgaaggagcaggaggcccgcttcgagaggctgacacgggcactggagcaggagcggcgccatgttgccctacagctggagcgtgcccagcagcctggcatggtcagtggtggcatgggcagtgggcagcccctgccaatggcctggcaacagctggtcctccaggagcagagcccaggcagccaggcctcactggccacgatgccggaggcacctgatgtgctggaggagaccgtgacggtggaggaggaccccggcacacccacttcccatgtgtctattgtcacatccgaagatggcacaacccggcgcaccgagaccaaggtcaccaagactgtcaagacggtgaccactcggacagtacgccaggtgcccgtgggcccagatggactccccctgctggatggcggccccccactaggcccttttgcagatggtgccctggaccggcatttcctgctgcgtggtggtggcccagtggccacactctctcgagcctacctcagcagtgggggtggctttcccgaaggccccgagccccgggacagccccagctatggcagcctgtcccgagggctgggcatgcggcccccacgtgctggcccccttggcccaggccctggtgatggctgcttcacactgcctggccaccgggaagccttcccggtgggtcctgagcctgggccaccaggtggccgctccctgcccgagcgcttccaggcagagccgtatggcttggaggatgacacgcgcagcctggccgctgatgacgagggtggccctgagctggagcctgactatggcacggccacaaggaggaggcctgagtgtgggcggggccttcataccagggcctacgaggacacagcagatgatggcggcgagctggcggacgagcggcctgcgttcccaatggtgacggcgcccctggcccagcctgaacggggcagcatgggcagcctggaccggctggtgcggcgctcgccctcagtggatagcgcccgcaaggagccgcgctggcgggaccctgagctgcctgaggtgctggccatgctgcggcaccccgtggaccccgtgaaggccaatgcggccgcctacctgcagcatctgtgctttgagaacgagggtgtcaagcggcgtgtacggcagttgcgggggctgccgctgcttgtggcactgctggaccacccgcgggctgaggtgcggcgccgggcctgtggggcactgcgcaacctctcctatggccgcgacactgacaacaaggccgccatccgggactgcggtggtgtgcctgccctggtgcgcctgctgagggctgcccgggacaacgaggtccgtgagcttgtcactggcaccctgtggaacctgtcatcctatgagcccctgaagatggtcatcattgaccatggcctgcagacgctgacccacgaggtgatcgtgccccactcaggatgggagcgtgagcccaacgaggactccaagccacgggacgccgagtggacaactgtcttcaagaacacgtcgggctgcctgaggaatgtgagctccgatggtgctgaggcccggcggcgactccgggagtgtgaagggctggtggacgcgctcctgcatgccctgcagtcggctgtgggccggaaggacactgacaacaagtcggtggagaactgcgtgtgcatcatgcggaacctgtcctaccacgtgcacaaggaggtgcccggggccgacaggtaccaggaggccgagcccgggcccctgggcagtgctgtaggctcccagcgccggaggcgggatgatgccagctgctttggaggcaagaaggccaaaggaaagaaggatggtgagatggaccggaactttgacacgctagacctgcccaagcgaactgaggccgccaaaggctttgagctgctgtaccagcccgaggtggtacgtctctacctctccctcctcacggagagccggaacttcaacaccctggaggctgccgccggcgctctgcagaacctcagtgccggcaactggatgtgggccacgtacatccgcgccacagtgcgcaaagagcgcgggctgccggtgcttgtggaactgctgcagtctgagaccgacaaggtggtgcgcgccgtcgccatcgctctgcgcaacctctcgctggaccggcgcaacaaagacctcatcgggagctacgccatggctgagcttgtgcggaatgtgcgcaatgcacaggctccgccgcgaccgggggcctgcctggaggaagacaccgtggtggcggtgctcaacaccatccacgaaatcgtgtccgacagcctggataacgcgcgctcgctcctgcaggcacgcggggtgccagcgttggtggctctcgtggcctccagccaatcggtacgcgaagcgaaggcggcgtcacacgtgctgcagacagtgtggagctacaaggagctgcgtggtaccttgcagaaagatggttggaccaaggcgcgcttccagtcagctgctgctactgccaaggggcctaagggagcactgagtcctgggggcttcgatgacagcacgctgccactggtggacaagagccttgagggcgagaaaactggcagccgggatgtgatccccatggatgcgctgggcccagacggatactccacggtggaccagagggagcggaggccacggggcgccagctctgcaggagaggcctctgagaaggaacccttgaaactcgaccccagcaggaaggcccctccccccgggcccagcaggcccgcggtcaggctggtggacgccgtaggggacgctaagcctcagcccgttgattcctgggtctagcttgcatgcctgggcccaggcccagcctcttgttcttagggcttggatcgtggaagaagggccaccctgagcagatcgtgccgtggagcttggagccccctggcggcaggggttggcagcgcctcgccccagccaagcctgactttggggacaccctcctgcccccccaccccactccccccatcctacctaactccctaggcctgagttagctgtttactgacatggtgctgtgtgtgagcgagtgacagaaggcccgaggaggccgactgggctgctggggcagggcccagggaggtggcagggaagggtgcctggctgggctttggggctggtgggataggagggtgcccctgggaacacagtgccccagtggtgcgggccaggtctggcgccaggggcaggcagctaggcagggagggggctgggaaagaacttggacttctaaaggcggagggtctccctgggcaccctgcaggcaggcagaccacagtgtggggggtgccccacaaggctcagccctgggcaaggaagctttggaagcagcaaggtgggggtcaggctacaggtgccccacctccccagagccctgcagtcacgtgaggcccctgtgcagtagagagcctttctccagcccatgctggctgtggccggggctgccgcatctgcctggagcctgggcagcacctccgggactgaccttcggcagtggctgggggactgctttcagtgcctgctgttcgtgactcagaaacagaagaaaaacactgagaaaaagcattaaaaataagccaaaataagactattggtaaacacctaaatttttgtaagaaaatttaaaaattaaagcagcaaaggaactttttgctttctgccactcaggtctggcacaagtggctggcttctcccttgtgtcgggcctctgcgcgtctggggcagggccctgggtggaggtggtcccaggtgcccatctgctgtgtcctgcagaggctctgtttctggtccctgggtggccccaaacttgtccacttgggctcactggtctgtctatccataggagtgggctggctgggggctagccaggccttgagcccaggagtagaatcttggctaggggctggtctcggtgcaggtgaactcagctagcacagggttgattcctgtcctgggcctgggaactgggcccttggagcctctgaggtggctagcagtctgaccccttggaggagatggggacagctctaggtgtaggtggacagaaaccagcactgcatcctcactcatgggccagggaggcaactacagggatgcgggagctggtctgagccattgcctcttctgtaagcaaggcccagtggggagtagggaaggagatgcttccactctgtgccacatggggcccagaggggctggtgctgctgcggggtccacctgtccccagcgcctgcttggtcagaaaggtgtgaatgctggctgactcctcttcgtttcccaggctggcagtcgtccccatggggctaacaggtgcccctggcctagctgcaggagggctgacctctgcaccactgtggctgggaggccagtgggccaggcgtgccacccagaacccagccagctaggggccccgcccttagcgttagcgtccgtcaaggggagctttgaatgtttggtgcccaagtcaagggcagcaggggaatggcagttgagaaggatgtactaagtcgagttatatctaaatatttagattcttaatttctattttatatttttaaaacatgatattagtatataagataatatagctagccagtgttagtaaagaagtcatgattgagtcttaaaaaagaacaatccagtgttgcagttcagagaggttagcatgtcagggcgcaggcctcggccgaggtgtgctttgcatttaggacacagcccggagccgcagaaggtcagcaggagcacgtctggcaccttcagtaccaggctgggtgagagagcccgagaggggggccggggggggcagtcagggccctgcttcgctgcctgggcccttgtagatggccttctccaggccgtccaccacctccctgtattccaggaacgattggtagtgtgtgcactcaaagcagctgctcccgcgcacgtgtgctaggaagtctggcgcacctgggcagatcacgttgtcagccagtagcactgtccccttccgcagcaggccacattcctgcaaacagaccggggggtgggggaggtgagggtcagaggtgcccagagaacctgccccaaaccaggatgggtgctcctcactaggccacggcaccacgcctgtgcctagcccctggggccaggtttccactttctgcccagcgtgactcctgcaggaaaggactgtacaagacttgggtgccaccttcagaacatgggccccgtgaggacagggacctttctctcatcaactcctgtatccatctcaggagtatccatcccttagaacagcatgtggcacacagtaggtgctcaataaatgctagctgggtgagtggaaacaatggggccctcaacacccagtgccaggaactcaggcctatgagggagaggcacccaaggagaggggttgctggtatggtccctggagacaatattggcctgaccagggtgaccctgcagggctgaggtggggcagacctcccatcaacaagcctgccccttggggtcagttctggacatccccaagctcctgcatttgcagaccccccatcttcaccagtgcctgggccctgggaggacacagagttcctctgcctgggttctgtgcagaaggaaggagttgttactggacacgcagccatagggcatggcccgtggggtccactatcgggagaaacctcataggatgcttgcctatctatgctatcagaaaagggtttgcttacatcacataaacaagaaaccttgagaggaagtgtttgcctatggggaggaaggacctaccagggcaagggacaccccagtcaccttgtcttggaaatttgacttagtcaccaaacaaaagttaacaagcaatctcaaacatctaaagtataataaaatcaatttgcaggcaggtgccttgaaacactggtatccgaccccacatgcctctgggatgggcctggagagtcccacagggcttgcagctgtcctggtggtgggtggcggtcgtttccagcctgtatgctgcagagaaagcagggggctttcatgtgacagtatggacaccacacggctgcaaggtcagtgaggtcaggggacagccccaaggtccggagttgagcaggaagtaccaccatgaatcatgatgtgttttcatttagaaaaaaaaaaaaatgtcctagcaatgtcagctgaaaagacgtagaacaaagcgccacccgggaggaggacaatggcctaggccttgagcagggcggctgccttccagtctgggccagggaatgcatgagtgaggggcctgggctcctggacttctcgggttgcgccaggggactcaggagcccaatctggtcatcagggatacagaagacgtcagcggactgaaagacaccagaccactgcacctgcacgagttaaacaggaaagaaggagggaagggcagaaaggagcatgggtcacctttggaggctgccaggggcccactcctttacgaaactggtcaagaggggaaagaaggcagcacctgtcctgcctgtcgcccgacactgcaagcctcctaccagctactcagaccacctggagaactggctaaacatgcatcagcgtctgagcaggactgaaaatctaatgccatggagaagcgacagtgtcagaggagcaggtgacactatgctgaggtggttttcatctggcccaccctccttagactctcctcccttcaagagttggagcctcacagaggttgcagggagccaagatcgcgccactgcactccagcctgggcnacagagcgagagactgtctcgagaaacaacaacaaaaagttggagcctcagaccaagcacacacctgtactcccagcactttgggaggttgaggcaagaggatcgcttgaggccaggagtttgagaccagtctgggcaacatagggagaccccatttctacaaaaaatttttaaattagccaggtgtagtggtgcatgcctttagtcctagctactcaggaggctgaggtgggaggatcactggagctcaggagtttgaggctacagtgagctatgatgtcatcactgcactccagcctgggcacagagcaagactctgtctttttctttttttttttttttttaagggggaactcattcctcttcctttgggcatgggctggacttggtgactacagcagcccggtggagaggcctcctcaaagcagcccttgattttgaattgcaacctgctcctgagcccctcaccccccgtgcctccgatgctcacagaacccactgaggggatggctagaccctcacaagagccaggttgtcccctaaccctccacaagggggcacagggccccagccctgagtgtgcagatgtgcgtttaacaaggacacccattcccaattcatgacttcccacttcatgactttgcttcttttgagataattaccagctttgcgcaagcagcactgagaaaactattagtttcctagttactaaactgcaatgtttgctacttttctatgaaggcaggcccctgtaattagcacccacatcacagctgctgaaactcggccgcagtaacgcaggcccagctgtgggtgtctttcctgcccaagtgaagcccatctggctgagtgccagctctctgccatcaatacccaattgccagcatcatgctcctttgtcaggggtgagcccccctccagctaccctgtctt

SEQ ID NO: 405890 - DNA, 5771 bp, Homo sapiens
  misc_feature (4838)..(4838): n is a, c, g, or t
cttctcaccaccctcacacctgaggctgcgcgggctctgagaacctcagtgcggcactggatgtgggccacgtacatccgcgccacagtgcgcaaagagcgcgggctgccggtgcttgtggaactgctgcagtctgagaccgacaaggtggtgcgcgccgtcgccatcgctctgcgcaacctctcgctggaccggcgcaacaaagacctcatcgggagctacgccatggctgagcttgtgcggaatgtgcgcaatgcacaggctccgccgcgaccgggggcctgcctggaggaagacaccgtggtggcggtgctcaacaccatccacgaaatcgtgtccgacagcctggataacgcgcgctcgctcctgcaggcacgcggggtgccagcgttggtggctctcgtggcctccagccaatcggtacgcgaagcgaaggcggcgtcacacgtgctgcagacagtgtggagctacaaggagctgcgtggtaccttgcagaaagatggttggaccaaggcgcgcttccagtcagctgctgctactgccaaggggcctaagggagcactgagtcctgggggcttcgatgacagcacgctgccactggtggacaagagccttgagggcgagaaaactggcagccgggatgtgatccccatggatgcgctgggcccagacggatactccacggtggaccagagggagcggaggccacggggcgccagctctgcaggagaggcctctgagaaggaacccttgaaactcgaccccagcaggaaggcccctccccccgggcccagcaggcccgcggtcaggctggtggacgccgtaggggacgctaagcctcagcccgttgattcctgggtctagcttgcatgcctgggcccaggcccagcctcttgttcttagggcttggatcgtggaagaagggccaccctgagcagatcgtgccgtggagcttggagccccctggcggcaggggttggcagcgcctcgccccagccaagcctgactttggggacaccctcctgcccccccaccccactccccccatcctacctaactccctaggcctgagttagctgtttactgacatggtgctgtgtgtgagcgagtgacagaaggcccgaggaggccgactgggctgctggggcagggcccagggaggtggcagggaagggtgcctggctgggctttggggctggtgggataggagggtgcccctgggaacacagtgccccagtggtgcgggccaggtctggcgccaggggcaggcagctaggcagggagggggctgggaaagaacttggacttctaaaggcggagggtctccctgggcaccctgcaggcaggcagaccacagtgtggggggtgccccacaaggctcagccctgggcaaggaagctttggaagcagcaaggtgggggtcaggctacaggtgccccacctccccagagccctgcagtcacgtgaggcccctgtgcagtagagagcctttctccagcccatgctggctgtggccggggctgccgcatctgcctggagcctgggcagcacctccgggactgaccttcggcagtggctgggggactgctttcagtgcctgctgttcgtgactcagaaacagaagaaaaacactgagaaaaagcattaaaaataagccaaaataagactattggtaaacacctaaatttttgtaagaaaatttaaaaattaaagcagcaaaggaactttttgctttctgccactcaggtctggcacaagtggctggcttctcccttgtgtcgggcctctgcgcgtctggggcagggccctgggtggaggtggtcccaggtgcccatctgctgtgtcctgcagaggctctgtttctggtccctgggtggccccaaacttgtccacttgggctcactggtctgtctatccataggagtgggctggctgggggctagccaggccttgagcccaggagtagaatcttggctaggggctggtctcggtgcaggtgaactcagctagcacagggttgattcctgtcctgggcctgggaactgggcccttggagcctctgaggtggctagcagtctgaccccttggaggagatggggacagctctaggtgtaggtggacagaaaccagcactgcatcctcactcatgggccagggaggcaactacagggatgcgggagctggtctgagccattgcctcttctgtaagcaaggcccagtggggagtagggaaggagatgcttccactctgtgccacatggggcccagaggggctggtgctgctgcggggtccacctgtccccagcgcctgcttggtcagaaaggtgtgaatgctggctgactcctcttcgtttcccaggctggcagtcgtccccatggggctaacaggtgcccctggcctagctgcaggagggctgacctctgcaccactgtggctgggaggccagtgggccaggcgtgccacccagaacccagccagctaggggccccgcccttagcgttagcgtccgtcaaggggagctttgaatgtttggtgcccaagtcaagggcagcaggggaatggcagttgagaaggatgtactaagtcgagttatatctaaatatttagattcttaatttctattttatatttttaaaacatgatattagtatataagataatatagctagccagtgttagtaaagaagtcatgattgagtcttaaaaaagaacaatccagtgttgcagttcagagaggttagcatgtcagggcgcaggcctcggccgaggtgtgctttgcatttaggacacagcccggagccgcagaaggtcagcaggagcacgtctggcaccttcagtaccaggctgggtgagagagcccgagaggggggccggggggggcagtcagggccctgcttcgctgcctgggcccttgtagatggccttctccaggccgtccaccacctccctgtattccaggaacgattggtagtgtgtgcactcaaagcagctgctcccgcgcacgtgtgctaggaagtctggcgcacctgggcagatcacgttgtcagccagtagcactgtccccttccgcagcaggccacattcctgcaaacagaccggggggtgggggaggtgagggtcagaggtgcccagagaacctgccccaaaccaggatgggtgctcctcactaggccacggcaccacgcctgtgcctagcccctggggccaggtttccactttctgcccagcgtgactcctgcaggaaaggactgtacaagacttgggtgccaccttcagaacatgggccccgtgaggacagggacctttctctcatcaactcctgtatccatctcaggagtatccatcccttagaacagcatgtggcacacagtaggtgctcaataaatgctagctgggtgagtggaaacaatggggccctcaacacccagtgccaggaactcaggcctatgagggagaggcacccaaggagaggggttgctggtatggtccctggagacaatattggcctgaccagggtgaccctgcagggctgaggtggggcagacctcccatcaacaagcctgccccttggggtcagttctggacatccccaagctcctgcatttgcagaccccccatcttcaccagtgcctgggccctgggaggacacagagttcctctgcctgggttctgtgcagaaggaaggagttgttactggacacgcagccatagggcatggcccgtggggtccactatcgggagaaacctcataggatgcttgcctatctatgctatcagaaaagggtttgcttacatcacataaacaagaaaccttgagaggaagtgtttgcctatggggaggaaggacctaccagggcaagggacaccccagtcaccttgtcttggaaatttgacttagtcaccaaacaaaagttaacaagcaatctcaaacatctaaagtataataaaatcaatttgcaggcaggtgccttgaaacactggtatccgaccccacatgcctctgggatgggcctggagagtcccacagggcttgcagctgtcctggtggtgggtggcggtcgtttccagcctgtatgctgcagagaaagcagggggctttcatgtgacagtatggacaccacacggctgcaaggtcagtgaggtcaggggacagccccaaggtccggagttgagcaggaagtaccaccatgaatcatgatgtgttttcatttagaaaaaaaaaaaaatgtcctagcaatgtcagctgaaaagacgtagaacaaagcgccacccgggaggaggacaatggcctaggccttgagcagggcggctgccttccagtctgggccagggaatgcatgagtgaggggcctgggctcctggacttctcgggttgcgccaggggactcaggagcccaatctggtcatcagggatacagaagacgtcagcggactgaaagacaccagaccactgcacctgcacgagttaaacaggaaagaaggagggaagggcagaaaggagcatgggtcacctttggaggctgccaggggcccactcctttacgaaactggtcaagaggggaaagaaggcagcacctgtcctgcctgtcgcccgacactgcaagcctcctaccagctactcagaccacctggagaactggctaaacatgcatcagcgtctgagcaggactgaaaatctaatgccatggagaagcgacagtgtcagaggagcaggtgacactatgctgaggtggttttcatctggcccaccctccttagactctcctcccttcaagagttggagcctcacagaggttgcagggagccaagatcgcgccactgcactccagcctgggcnacagagcgagagactgtctcgagaaacaacaacaaaaagttggagcctcagaccaagcacacacctgtactcccagcactttgggaggttgaggcaagaggatcgcttgaggccaggagtttgagaccagtctgggcaacatagggagaccccatttctacaaaaaatttttaaattagccaggtgtagtggtgcatgcctttagtcctagctactcaggaggctgaggtgggaggatcactggagctcaggagtttgaggctacagtgagctatgatgtcatcactgcactccagcctgggcacagagcaagactctgtctttttctttttttttttttttttaagggggaactcattcctcttcctttgggcatgggctggacttggtgactacagcagcccggtggagaggcctcctcaaagcagcccttgattttgaattgcaacctgctcctgagcccctcaccccccgtgcctccgatgctcacagaacccactgaggggatggctagaccctcacaagagccaggttgtcccctaaccctccacaagggggcacagggccccagccctgagtgtgcagatgtgcgtttaacaaggacacccattcccaattcatgacttcccacttcatgactttgcttcttttgagataattaccagctttgcgcaagcagcactgagaaaactattagtttcctagttactaaactgcaatgtttgctacttttctatgaaggcaggcccctgtaattagcacccacatcacagctgctgaaactcggccgcagtaacgcaggcccagctgtgggtgtctttcctgcccaagtgaagcccatctggctgagtgccagctctctgccatcaatacccaattgccagcatcatgctcctttgtcaggggtgagcccccctccagctaccctgtctt

SEQ ID NO: 405891 - DNA, 4114 bp, Homo sapiens
gcggccgaggcgccggagccgagcctggtccagccaccgcctcccccgctgctggccagcgccccccgagtcccggcccgatgccggccgaactcagacaggagcagagcccaggcagccaggcctcactggccacgatgccggaggcacctgatgtgctggaggagaccgtgacggtggaggaggaccccggcacacccacttcccatgtgtctattgtcacatccgaagatggcacaacccggcgcaccgagaccaaggtcaccaagactgtcaagacggtgaccactcggacagtacgccaggtgcccgtgggcccagatggactccccctgctggatggcggccccccactaggcccttttgcagatggtgccctggaccggcatttcctgctgcgtggtggtggcccagtggccacactctctcgagcctacctcagcagtgggggtggctttcccgaaggccccgagccccgggacagccccagctatggcagcctgtcccgagggctgggcatgcggcccccacgtgctggcccccttggcccaggccctggtgatggctgcttcacactgcctggccaccgggaagccttcccggtgggtcctgagcctgggccaccaggtggccgctccctgcccgagcgcttccaggcagagccgtatggcttggaggatgacacgcgcagcctggccgctgatgacgagggtggccctgagctggagcctgactatggcacggccacaaggaggaggcctgagtgtgggcggggccttcataccagggcctacgaggacacagcagatgatggcggcgagctggcggacgagcggcctgcgttcccaatggtgacggcgcccctggcccagcctgaacggggcagcatgggcagcctggaccggctggtgcggcgctcgccctcagtggatagcgcccgcaaggagccgcgctggcgggaccctgagctgcctgaggtgctggccatgctgcggcaccccgtggaccccgtgaaggccaatgcggccgcctacctgcagcatctgtgctttgagaacgagggtgtcaagcggcgtgtacggcagttgcgggggctgccgctgcttgtggcactgctggaccacccgcgggctgaggtgcggcgccgggcctgtggggcactgcgcaacctctcctatggccgcgacactgacaacaaggccgccatccgggactgcggtggtgtgcctgccctggtgcgcctgctgagggctgcccgggacaacgaggtccgtgagcttgtcactggcaccctgtggaacctgtcatcctatgagcccctgaagatggtcatcattgaccatggcctgcagacgctgacccacgaggtgatcgtgccccactcaggatgggagcgtgagcccaacgaggactccaagccacgggacgccgagtggacaactgtcttcaagaacacgtcgggctgcctgaggaatgtgagctccgatggtgctgaggcccggcggcgactccgggagtgtgaagggctggtggacgcgctcctgcatgccctgcagtcggctgtgggccggaaggacactgacaacaagtcggtggagaactgcgtgtgcatcatgcggaacctgtcctaccacgtgcacaaggaggtgcccggggccgacaggtaccaggaggccgagcccgggcccctgggcagtgctgtaggctcccagcgccggaggcgggatgatgccagctgctttggaggcaagaaggccaaaggaaagaaggatggtgagatggaccggaactttgacacgctagacctgcccaagcgaactgaggccgccaaaggctttgagctgctgtaccagcccgaggtggtacgtctctacctctccctcctcacggagagccggaacttcaacaccctggaggctgccgccggcgctctgcagaacctcagtgccggcaactggatgtgggccacgtacatccgcgccacagtgcgcaaagagcgcgggctgccggtgcttgtggaactgctgcagtctgagaccgacaaggtggtgcgcgccgtcgccatcgctctgcgcaacctctcgctggaccggcgcaacaaagacctcatcgggagctacgccatggctgagcttgtgcggaatgtgcgcaatgcacaggctccgccgcgaccgggggcctgcctggaggaagacaccgtggtggcggtgctcaacaccatccacgaaatcgtgtccgacagcctggataacgcgcgctcgctcctgcaggcacgcggggtgccagcgttggtggctctcgtggcctccagccaatcggtacgcgaagcgaaggcggcgtcacacgtgctgcagacagtgtggagctacaaggagctgcgtggtaccttgcagaaagatggttggaccaaggcgcgcttccagtcagctgctgctactgccaaggggcctaagggagcactgagtcctgggggcttcgatgacagcacgctgccactggtggacaagagccttgagggcgagaaaactggcagccgggatgtgatccccatggatgcgctgggcccagacggatactccacggtggaccagagggagcggaggccacggggcgccagctctgcaggagaggcctctgagaaggaacccttgaaactcgaccccagcaggaaggcccctccccccgggcccagcaggcccgcggtcaggctggtggacgccgtaggggacgctaagcctcagcccgttgattcctgggtctagcttgcatgcctgggcccaggcccagcctcttgttcttagggcttggatcgtggaagaagggccaccctgagcagatcgtgccgtggagcttggagccccctggcggcaggggttggcagcgcctcgccccagccaagcctgactttggggacaccctcctgcccccccaccccactccccccatcctacctaactccctaggcctgagttagctgtttactgacatggtgctgtgtgtgagcgagtgacagaaggcccgaggaggccgactgggctgctggggcagggcccagggaggtggcagggaagggtgcctggctgggctttggggctggtgggataggagggtgcccctgggaacacagtgccccagtggtgcgggccaggtctggcgccaggggcaggcagctaggcagggagggggctgggaaagaacttggacttctaaaggcggagggtctccctgggcaccctgcaggcaggcagaccacagtgtggggggtgccccacaaggctcagccctgggcaaggaagctttggaagcagcaaggtgggggtcaggctacaggtgccccacctccccagagccctgcagtcacgtgaggcccctgtgcagtagagagcctttctccagcccatgctggctgtggccggggctgccgcatctgcctggagcctgggcagcacctccgggactgaccttcggcagtggctgggggactgctttcagtgcctgctgttcgtgactcagaaacagaagaaaaacactgagaaaaagcattaaaaataagccaaaataagactattggtaaacacctaaatttttgtaagaaaatttaaaaattaaagcagcaaaggaactttttgctttctgccactcaggtctggcacaagtggctggcttctcccttgtgtcgggcctctgcgcgtctggggcagggccctgggtggaggtggtcccaggtgcccatctgctgtgtcctgcagaggctctgtttctggtccctgggtggccccaaacttgtccacttgggctcactggtctgtctatccataggagtgggctggctgggggctagccaggccttgagcccaggagtagaatcttggctaggggctggtctcggtgcaggtgaactcagctagcacagggttgattcctgtcctgggcctgggaactgggcccttggaggactaaccagccatgcaaggactaaccagccatgcaagttcggacaaaccagccatgcaagttcggactaaccagccatgcaagttcgggcaaaccagccatgcaagttcggactaaccagcccatgcaaagttcggactaaccagccatgcaagttcgg

SEQ ID NO: 405892 - DNA, 3377 bp, Homo sapiens
gcggccgaggcgccggagccgagcctggtccagccaccgcctcccccgctgctggccagcgccccccgagtcccggcccgatgccggccgaactcagacaggagcagagcccaggcagccaggcctcactggccacgatgccggaggcacctgatgtgctggaggagaccgtgacggtggaggaggaccccggcacacccacttcccatgtgtctattgtcacatccgaagatggcacaacccggcgcaccgagaccaaggtcaccaagactgtcaagacggtgaccactcggacagtacgccaggtgcccgtgggcccagatggactccccctgctggatggcggccccccactaggcccttttgcagatggtgccctggaccggcatttcctgctgcgtggtggtggcccagtggccacactctctcgagcctacctcagcagtgggggtggctttcccgaaggccccgagccccgggacagccccagctatggcagcctgtcccgagggctgggcatgcggcccccacgtgctggcccccttggcccaggccctggtgatggctgcttcacactgcctggccaccgggaagccttcccggtgggtcctgagcctgggccaccaggtggccgctccctgcccgagcgcttccaggcagagccgtatggcttggaggatgacacgcgcagcctggccgctgatgacgagggtggccctgagctggagcctgactatggcacggccacaaggaggaggcctgagtgtgggcggggccttcataccagggcctacgaggacacagcagatgatggcggcgagctggcggacgagcggcctgcgttcccaatggtgacggcgcccctggcccagcctgaacggggcagcatgggcagcctggaccggctggtgcggcgctcgccctcagtggatagcgcccgcaaggagccgcgctggcgggaccctgagctgcctgaggtgctggccatgctgcggcaccccgtggaccccgtgaaggccaatgcggccgcctacctgcagcatctgtgctttgagaacgagggtgtcaagcggcgtgtacggcagttgcgggggctgccgctgcttgtggcactgctggaccacccgcgggctgaggtgcggcgccgggcctgtggggcactgcgcaacctctcctatggccgcgacactgacaacaaggccgccatccgggactgcggtggtgtgcctgccctggtgcgcctgctgagggctgcccgggacaacgaggtccgtgagcttgtcactggcaccctgtggaacctgtcatcctatgagcccctgaagatggtcatcattgaccatggcctgcagacgctgacccacgaggtgatcgtgccccactcaggatgggagcgtgagcccaacgaggactccaagccacgggacgccgagtggacaactgtcttcaagaacacgtcgggctgcctgaggaatgtgagctccgatggtgctgaggcccggcggcgactccgggagtgtgaagggctggtggacgcgctcctgcatgccctgcagtcggctgtgggccggaaggacactgacaacaagtcggtggagaactgcgtgtgcatcatgcggaacctgtcctaccacgtgcacaaggaggtgcccggggccgacaggtaccaggaggccgagcccgggcccctgggcagtgctgtaggctcccagcgccggaggcgggatgatgccagctgctttggaggcaagaaggccaaaggaaagaaggatggtgagatggaccggaactttgacacgctagacctgcccaagcgaactgaggccgccaaaggctttgagctgctgtaccagcccgaggtggtacgtctctacctctccctcctcacggagagccggaacttcaacaccctggaggctgccgccggcgctctgcagaacctcagtgccggcaactggatgtgggccacgtacatccgcgccacagtgcgcaaagagcgcgggctgccggtgcttgtggaactgctgcagtctgagaccgacaaggtggtgcgcgccgtcgccatcgctctgcgcaacctctcgctggaccggcgcaacaaagacctcatcgggagctacgccatggctgagcttgtgcggaatgtgcgcaatgcacaggctccgccgcgaccgggggcctgcctggaggaagacaccgtggtggcggtgctcaacaccatccacgaaatcgtgtccgacagcctggataacgcgcgctcgctcctgcaggcacgcggggtgccagcgttggtggctctcgtggcctccagccaatcggtacgcgaagcgaaggcggcgtcacacgtgctgcagacagtgtggagctacaaggagctgcgtggtaccttgcagaaagatggttggaccaaggcgcgcttccagtcagctgctgctactgccaaggggcctaagggagcactgagtcctgggggcttcgatgacagcacgctgccactggtggacaagagccttgagggcgagaaaactggcagccgggatgtgatccccatggatgcgctgggcccagacggatactccacggtggaccagagggagcggaggccacggggcgccagctctgcaggagaggcctctgagaaggaacccttgaaactcgaccccagcaggaaggcccctccccccgggcccagcaggcccgcggtcaggctggtggacgccgtaggggacgctaagcctcagcccgttgattcctgggtctagcttgcatgcctgggcccaggcccagcctcttgttcttagggcttggatcgtggaagaagggccaccctgagcagatcgtgccgtggagcttggagccccctggcggcaggggttggcagcgcctcgccccagccaagcctgactttggggacaccctcctgcccccccaccccactccccccatcctacctaactccctaggcctgagttagctgtttactgacatggtgctgtgtgtgagcgagtgacagaaggcccgaggaggccgactgggctgctgggcaaggaagctttggaagcagcaaggtgggggtcaggctacaggtgccccacctccccagagccctgcagtcacgtgaggcccctgtgcagtagagagcctttctccagcccatgctggctgtggccggggctgccgcatctgcctggagcctgggcagcacctccgggactgaccttcggcagtggctgggggactgctttcagtgcctgctgttcgtgactcagaaacagaagaaaaacactgagaaaaagcattaaaaataagccaaaataagactattggtaaacacctaaatttttgtaagaaaatttaaaaattaaagcagcaaagga

SEQ ID NO: 405893 - DNA, 3061 bp, Homo sapiens
  misc_feature (1497)..(1497): n is a, c, g, or t
  misc_feature (1756)..(1756): n is a, c, g, or t
  misc_feature (2071)..(2071): n is a, c, g, or t
  misc_feature (2086)..(2086): n is a, c, g, or t
agacgtcattatcagtccacatctctgaaggatcacgtttctgaaggatggtcaacagcattagacatgctgacaaggaaccgtggcagcccagtgtcacctacagtcctggacatgtgggggcaagaaggtacacatgagtgtgtggttatgagtcaggagcaccacgggatgaccttcagatcaggcatgacaaggtcctgcttagaggacggtctgggcttgtgtacctttatccggcagggacctacccagctggattgacctcactcatgccctctggtttccctgcaggagccagagcctgcagggtgggtgtcgggacatgctgatcttccctcaagacaggtgagtggcctgggtttagcttggggacatcctctcccacataggacagcagagtgttctggtgggcctggcgggtgggggtgacagggatggactggccctggacactgtgtgctcctggtccttctcaccctgggtaggcacagcccctgggctggacagggtggatgtgagggcctcctgccaccagcttgggtttgttactggcctgaatatgggcagcagccactggtttgatgtctggctttagggacaagcctgtttggggctggctgacgaggttgctggtcagtgttggtttggacattcactgggtctgctcttcacctgcctgagctaggatgccagccgcagtggcatccagtattggcacagcctgctgggccaggccattcgcttgccccccagagactggagccacagggacagaggatagtcctggaggccaggcacacaaaactttgtttgaaaaggtctgatagtaagtaattcaattttgcaggccttatggtctctgtcacagctgcagttctctgccattgtaggatgaaaatggctgcagacagcccataactgaatagtctgaatgtactctgatcacagccgtaggccatgtgtactggcccgtggcctcaggtgttatctgtgtttggggttcctctgcttatcatggctgctagctccagtgggactgaggcatagcgcctgggaagcatggcagggttggaggctgagtggtccatgtcccccaggaccctctgaaggatggtaaggcataccctgctcacatccacgctgccagagttttgccacgatgggtgctgttcagcagagtgggtgatggcttaagagaatggctcctggccattcttgttcctccagtccccaccctggccatctgcctgtccccccaaaaagcagtctctgtgggaggcatggctgacagccctgtggtttctcagtgacaattagtgcccattgtggaggcatggcccagccagtgctgtgcctaagtggtagggagaaggccatggcctccggatgcctgagtgacctaggctgagggatctagggcagatgggagggacaggatgactgactccttgcctgttcccaagtccttgggcatggaaagctgccggccgggcnagcctagtgggagctgggtctgctgccgcctggctgtgtgggaggaccagcgtctggccgagaatgtcactgctcaggccatttggccatgcagggtcttctgggttgggacaaagaagctcaggcagggtacttggcttgcttgtggcacaggtgacagggcatctcagggtggcaggaggggctgtcccactgcccttaactcctcgtaggtcaccacacttcagggaggccaggtcagccagacaccaaacgacanccctggtaacagggtccgcaggagggtggttggctgggcaggtccgaggctgcccaggcacacttgctcactctccctcctgttgcttgctcctttcttgtcccttcttttccctcccccctccagttcttggtcttctctatgtttctctgtggccctctctgtgcctctttctctgcctttccccatctcctatcctgcccatctggaatgtggtgattgcttattcctgtctgctgtggtgattggtttttcatgtctgccctgggcactggtgcgatgggtgatggcatttgtgccatctctgctctggcntgggcaacctgggcnctggcttgcggctgcctgctctgctgggccctggggtgtggtcctgtccacagcgggaggcagctggggagggagcctcagggctcagctgggacaggggctgatgtaaacacccatgtgtcaccacactcagcacccactcacccagcctcatgctgggtcctgggcatcacaggcacatcaggcccagccctgcccctgaggagctcccagcctggttgaggagatccacaacacacagaggaaccagtggccaactgtggggttacaagatggtgatgagtagcatggctcccttaggagggggagctgggagggtgtgatggggtggtgcgtgctgagaccaggcctgagtgagaagggctggcggggacacagatgccctgccgtttcccatagctggccagcagtggtgtcctctcagagaccagcaccagcctggcctcctccatcagccgccgtgtgcctgcagggggttgcggcttcgtctcctgcggccgcctggcccctatgacaggccttctcttgggttttgatgtgtttctcagccattgtatgagtctttgtatattaaagatattaattcttcactcctctttctgcctactgcacatttttctcacccttttagtttttgtttatgatcattttgatgtcaaaaatgtttcatattttgtggtgaagtgtgttggatttttccccatttttagatattccgtctctctgtgtagtcaactctccctagcatgcagccagataaagatgcacctgtcttttcttctagaaggtatttttactttagttttgtacacagcatttaatctgtctgtcttagtccattttgggctgctgtatcagaatacctgagactggctaattcctgaaaaacaaagacttatttctaacaattttggagatggggaagtccaggattgaggggccacatctggcgagggccttctttgtcgctacatc

SEQ ID NO: 405894 - DNA, 170 bp, Homo sapiens
ggactccaagccacgggacgccgagtggacaactgtcttcaagaacacgtcgggctgcctgaggtgtggaccagacctggtgctaaagcccacatgcacaccaggccccgtcctcgtggtcccagatagtgtggaagatggcggcgagcttaggagcgccagagcttagg

SEQ ID NO: 405895 - DNA, 4001 bp, Homo sapiens
cggtctcgggttgcgcgctgggcctggagggagggggcggcccccgcaccggtccgagttgcggccgcgtggactgcgacccgcgccgcgccgcaccgcgccgcgccctgggaacgccgctccccgcgcgccaacggacccggggaagcccttctggggtccgaggccgcgctgcggggccgcccacgctgcgctccaggagccagagcctgcagggtgggtgtcgggacatgctgatcttccctcaagacagctggcgggcgctctggtcatggaggactgcaatgtgcactcggccgccagcatcctggcctcggtgaaggagcaggaggcccgcttcgagaggctgacacgggcactggagcaggagcggcgccatgttgccctacagctggagcgtgcccagcagcctggcatggtcagtggtggcatgggcagtgggcagcccctgccaatggcctggcaacagctggtcctccaggagcagagcccaggcagccaggcctcactggccacgatgccggaggcacctgatgtgctggaggagaccgtgacggtggaggaggaccccggcacacccacttcccatgtgtctattgtcacatccgaagatggcacaacccggcgcaccgagaccaaggtcaccaagactgtcaagacggtgaccactcggacagtacgccaggtgcccgtgggcccagatggactccccctgctggatggcggccccccactaggcccttttgcagatggtgccctggaccggcatttcctgctgcgtggtggtggcccagtggccacactctctcgagcctacctcagcagtgggggtggctttcccgaaggccccgagccccgggacagccccagctatggcagcctgtcccgagggctgggcatgcggcccccacgtgctggcccccttggcccaggccctggtgatggctgcttcacactgcctggccaccgggaagccttcccggtgggtcctgagcctgggccaccaggtggccgctccctgcccgagcgcttccaggcagagccgtatggcttggaggatgacacgcgcagcctggccgctgatgacgagggtggccctgagctggagcctgactatggcacggccacaaggaggaggcctgagtgtgggcggggccttcataccagggcctacgaggacacagcagatgatggcggcgagctggcggacgagcggcctgcgttcccaatggtgacggcgcccctggcccagcctgaacggggcagcatgggcagcctggaccggctggtgcggcgctcgccctcagtggatagcgcccgcaaggagccgcgctggcgggaccctgagctgcctgaggtgctggccatgctgcggcaccccgtggaccccgtgaaggccaatgcggccgcctacctgcagcatctgtgctttgagaacgagggtgtcaagcggcgtgtacggcagttgcgggggctgccgctgcttgtggcactgctggaccacccgcgggctgaggtgcggcgccgggcctgtggggcactgcgcaacctctcctatggccgcgacactgacaacaaggccgccatccgggactgcggtggtgtgcctgccctggtgcgcctgctgagggctgcccgggacaacgaggtccgtgagcttgtcactggcaccctgtggaacctgtcatcctatgagcccctgaagatggtcatcattgaccatggcctgcagacgctgacccacgaggtgatcgtgccccactcaggatgggagcgtgagcccaacgaggactccaagccacgggacgccgagtggacaactgtcttcaagaacacgtcgggctgcctgaggaatgtgagctccgatggtgctgaggcccggcggcgactccgggagtgtgaagggctggtggacgcgctcctgcatgccctgcagtcggctgtgggccggaaggacactgacaacaagtcggtggagaactgcgtgtgcatcatgcggaacctgtcctaccacgtgcacaaggaggtgcccggggccgacaggtaccaggaggccgagcccgggcccctgggcagtgctgtaggctcccagcgccggaggcgggatgatgccagctgctttggaggcaagaaggccaaaggaaagaaggatggtgagatggaccggaactttgacacgctagacctgcccaagcgaactgaggccgccaaaggctttgagctgctgtaccagcccgaggtggtacgtctctacctctccctcctcacggagagccggaacttcaacaccctggaggctgccgccggcgctctgcagaacctcagtgccggcaactggatgtgggccacgtacatccgcgccacagtgcgcaaagagcgcgggctgccggtgcttgtggaactgctgcagtctgagaccgacaaggtggtgcgcgccgtcgccatcgctctgcgcaacctctcgctggaccggcgcaacaaagacctcatcgggagctacgccatggctgagcttgtgcggaatgtgcgcaatgcacaggctccgccgcgaccgggggcctgcctggaggaagacaccgtggtggcggtgctcaacaccatccacgaaatcgtgtccgacagcctggataacgcgcgctcgctcctgcaggcacgcggggtgccagcgttggtggctctcgtggcctccagccaatcggtacgcgaagcgaaggcggcgtcacacgtgctgcagacagtgtggagctacaaggagctgcgtggtaccttgcagaaagatggttggaccaaggcgcgcttccagtcagctgctgctactgccaaggggcctaagggagcactgagtcctgggggcttcgatgacagcacgctgccactggtggacaagagccttgagggcgagaaaactggcagccgggatgtgatccccatggatgcgctgggcccagacggatactccacggtggaccagagggagcggaggccacggggcgccagctctgcaggagaggcctctgagaaggaacccttgaaactcgaccccagcaggaaggcccctccccccgggcccagcaggcccgcggtcaggctggtggacgccgtaggggacgctaagcctcagcccgttgattcctgggtctagcttgcatgcctgggcccaggcccagcctcttgttcttagggcttggatcgtggaagaagggccaccctgagcagatcgtgccgtggagcttggagccccctggcggcaggggttggcagcgcctcgccccagccaagcctgactttggggacaccctcctgcccccccaccccactccccccatcctacctaactccctaggcctgagttagctgtttactgacatggtgctgtgtgtgagcgagtgacagaaggcccgaggaggccgactgggctgctggggcagggcccagggaggtggcagggaagggtgcctggctgggctttggggctggtgggataggagggtgcccctgggaacacagtgccccagtggtgcgggccaggtctggcgccaggggcaggcagctaggcagggagggggctgggaaagaacttggacttctaaaggcggagggtctccctgggcaccctgcaggcaggcagaccacagtgtggggggtgccccacaaggctcagccctgggcaaggaagctttggaagcagcaaggtgggggtcaggctacaggtgccccacctccccagagccctgcagtcacgtgaggcccctgtgcagtagagagcctttctccagcccatgctggctgtggccggggctgccgcatctgcctggagcctgggcagcacctccgggactgaccttcggcagtggctgggggactgctttcagtgcctgctgttcgtgactcagaaacagaagaaaaacactgagaaaaagcattaaaaataagccaaaataagactattggtaaacacctaaatttttgtaagaaaatttaaaaattaaagcagcaaagga

SEQ ID NO: 405896 - DNA, 7549 bp, Homo sapiens
  misc_feature (6616)..(6616): n is a, c, g, or t
gcggccgaggcgccggagccgagcctggtccagccaccgcctcccccgctgctggccagcgccccccgagtcccggcccgatgccggccgaactcagacaggagcagagcccaggcagccaggcctcactggccacgatgccggaggcacctgatgtgctggaggagaccgtgacggtggaggaggaccccggcacacccacttcccatgtgtctattgtcacatccgaagatggcacaacccggcgcaccgagaccaaggtcaccaagactgtcaagacggtgaccactcggacagtacgccaggtgcccgtgggcccagatggactccccctgctggatggcggccccccactaggcccttttgcagatggtgccctggaccggcatttcctgctgcgtggtggtggcccagtggccacactctctcgagcctacctcagcagtgggggtggctttcccgaaggccccgagccccgggacagccccagctatggcagcctgtcccgagggctgggcatgcggcccccacgtgctggcccccttggcccaggccctggtgatggctgcttcacactgcctggccaccgggaagccttcccggtgggtcctgagcctgggccaccaggtggccgctccctgcccgagcgcttccaggcagagccgtatggcttggaggatgacacgcgcagcctggccgctgatgacgagggtggccctgagctggagcctgactatggcacggccacaaggaggaggcctgagtgtgggcggggccttcataccagggcctacgaggacacagcagatgatggcggcgagctggcggacgagcggcctgcgttcccaatggtgacggcgcccctggcccagcctgaacggggcagcatgggcagcctggaccggctggtgcggcgctcgccctcagtggatagcgcccgcaaggagccgcgctggcgggaccctgagctgcctgaggtgctggccatgctgcggcaccccgtggaccccgtgaaggccaatgcggccgcctacctgcagcatctgtgctttgagaacgagggtgtcaagcggcgtgtacggcagttgcgggggctgccgctgcttgtggcactgctggaccacccgcgggctgaggtgcggcgccgggcctgtggggcactgcgcaacctctcctatggccgcgacactgacaacaaggccgccatccgggactgcggtggtgtgcctgccctggtgcgcctgctgagggctgcccgggacaacgaggtccgtgagcttgtcactggcaccctgtggaacctgtcatcctatgagcccctgaagatggtcatcattgaccatggcctgcagacgctgacccacgaggtgatcgtgccccactcaggatgggagcgtgagcccaacgaggactccaagccacgggacgccgagtggacaactgtcttcaagaacacgtcgggctgcctgaggaatgtgagctccgatggtgctgaggcccggcggcgactccgggagtgtgaagggctggtggacgcgctcctgcatgccctgcagtcggctgtgggccggaaggacactgacaacaagtcggtggagaactgcgtgtgcatcatgcggaacctgtcctaccacgtgcacaaggaggtgcccggggccgacaggtaccaggaggccgagcccgggcccctgggcagtgctgtaggctcccagcgccggaggcgggatgatgccagctgctttggaggcaagaaggccaaaggaaagaaggatggtgagatggaccggaactttgacacgctagacctgcccaagcgaactgaggccgccaaaggctttgagctgctgtaccagcccgaggtggtacgtctctacctctccctcctcacggagagccggaacttcaacaccctggaggctgccgccggcgctctgcagaacctcagtgccggcaactggatgtgggccacgtacatccgcgccacagtgcgcaaagagcgcgggctgccggtgcttgtggaactgctgcagtctgagaccgacaaggtggtgcgcgccgtcgccatcgctctgcgcaacctctcgctggaccggcgcaacaaagacctcatcgggagctacgccatggctgagcttgtgcggaatgtgcgcaatgcacaggctccgccgcgaccgggggcctgcctggaggaagacaccgtggtggcggtgctcaacaccatccacgaaatcgtgtccgacagcctggataacgcgcgctcgctcctgcaggcacgcggggtgccagcgttggtggctctcgtggcctccagccaatcggtacgcgaagcgaaggcggcgtcacacgtgctgcagacagtgtggagctacaaggagctgcgtggtaccttgcagaaagatggttggaccaaggcgcgcttccagtcagctgctgctactgccaaggggcctaagggagcactgagtcctgggggcttcgatgacagcacgctgccactggtggacaagagccttgagggcgagaaaactggcagccgggatgtgatccccatggatgcgctgggcccagacggatactccacggtggaccagagggagcggaggccacggggcgccagctctgcaggagaggcctctgagaaggaacccttgaaaggcccaggcccagcctcttgttcttagggcttggatcgtggaagaagggccaccctgagcagatcgtgccgtggagcttggagccccctggcggcaggggttggcagcgcctcgccccagccaagcctgactttggggacaccctcctgcccccccaccccactccccccatcctacctaactccctaggcctgagttagctgtttactgacatggtgctgtgtgtgagcgagtgacagaaggcccgaggaggccgactgggctgctggggcagggcccagggaggtggcagggaagggtgcctggctgggctttggggctggtgggataggagggtgcccctgggaacacagtgccccagtggtgcgggccaggtctggcgccaggggcaggcagctaggcagggagggggctgggaaagaacttggacttctaaaggcggagggtctccctgggcaccctgcaggcaggcagaccacagtgtggggggtgccccacaaggctcagccctgggcaaggaagctttggaagcagcaaggtgggggtcaggctacaggtgccccacctccccagagccctgcagtcacgtgaggcccctgtgcagtagagagcctttctccagcccatgctggctgtggccggggctgccgcatctgcctggagcctgggcagcacctccgggactgaccttcggcagtggctgggggactgctttcagtgcctgctgttcgtgactcagaaacagaagaaaaacactgagaaaaagcattaaaaataagccaaaataagactattggtaaacacctaaatttttgtaagaaaatttaaaaattaaagcagcaaaggaactttttgctttctgccactcaggtctggcacaagtggctggcttctcccttgtgtcgggcctctgcgcgtctggggcagggccctgggtggaggtggtcccaggtgcccatctgctgtgtcctgcagaggctctgtttctggtccctgggtggccccaaacttgtccacttgggctcactggtctgtctatccataggagtgggctggctgggggctagccaggccttgagcccaggagtagaatcttggctaggggctggtctcggtgcaggtgaactcagctagcacagggttgattcctgtcctgggcctgggaactgggcccttggagcctctgaggtggctagcagtctgaccccttggaggagatggggacagctctaggtgtaggtggacagaaaccagcactgcatcctcactcatgggccagggaggcaactacagggatgcgggagctggtctgagccattgcctcttctgtaagcaaggcccagtggggagtagggaaggagatgcttccactctgtgccacatggggcccagaggggctggtgctgctgcggggtccacctgtccccagcgcctgcttggtcagaaaggtgtgaatgctggctgactcctcttcgtttcccaggctggcagtcgtccccatggggctaacaggtgcccctggcctagctgcaggagggctgacctctgcaccactgtggctgggaggccagtgggccaggcgtgccacccagaacccagccagctaggggccccgcccttagcgttagcgtccgtcaaggggagctttgaatgtttggtgcccaagtcaagggcagcaggggaatggcagttgagaaggatgtactaagtcgagttatatctaaatatttagattcttaatttctattttatatttttaaaacatgatattagtatataagataatatagctagccagtgttagtaaagaagtcatgattgagtcttaaaaaagaacaatccagtgttgcagttcagagaggttagcatgtcagggcgcaggcctcggccgaggtgtgctttgcatttaggacacagcccggagccgcagaaggtcagcaggagcacgtctggcaccttcagtaccaggctgggtgagagagcccgagaggggggccggggggggcagtcagggccctgcttcgctgcctgggcccttgtagatggccttctccaggccgtccaccacctccctgtattccaggaacgattggtagtgtgtgcactcaaagcagctgctcccgcgcacgtgtgctaggaagtctggcgcacctgggcagatcacgttgtcagccagtagcactgtccccttccgcagcaggccacattcctgcaaacagaccggggggtgggggaggtgagggtcagaggtgcccagagaacctgccccaaaccaggatgggtgctcctcactaggccacggcaccacgcctgtgcctagcccctggggccaggtttccactttctgcccagcgtgactcctgcaggaaaggactgtacaagacttgggtgccaccttcagaacatgggccccgtgaggacagggacctttctctcatcaactcctgtatccatctcaggagtatccatcccttagaacagcatgtggcacacagtaggtgctcaataaatgctagctgggtgagtggaaacaatggggccctcaacacccagtgccaggaactcaggcctatgagggagaggcacccaaggagaggggttgctggtatggtccctggagacaatattggcctgaccagggtgaccctgcagggctgaggtggggcagacctcccatcaacaagcctgccccttggggtcagttctggacatccccaagctcctgcatttgcagaccccccatcttcaccagtgcctgggccctgggaggacacagagttcctctgcctgggttctgtgcagaaggaaggagttgttactggacacgcagccatagggcatggcccgtggggtccactatcgggagaaacctcataggatgcttgcctatctatgctatcagaaaagggtttgcttacatcacataaacaagaaaccttgagaggaagtgtttgcctatggggaggaaggacctaccagggcaagggacaccccagtcaccttgtcttggaaatttgacttagtcaccaaacaaaagttaacaagcaatctcaaacatctaaagtataataaaatcaatttgcaggcaggtgccttgaaacactggtatccgaccccacatgcctctgggatgggcctggagagtcccacagggcttgcagctgtcctggtggtgggtggcggtcgtttccagcctgtatgctgcagagaaagcagggggctttcatgtgacagtatggacaccacacggctgcaaggtcagtgaggtcaggggacagccccaaggtccggagttgagcaggaagtaccaccatgaatcatgatgtgttttcatttagaaaaaaaaaaaaatgtcctagcaatgtcagctgaaaagacgtagaacaaagcgccacccgggaggaggacaatggcctaggccttgagcagggcggctgccttccagtctgggccagggaatgcatgagtgaggggcctgggctcctggacttctcgggttgcgccaggggactcaggagcccaatctggtcatcagggatacagaagacgtcagcggactgaaagacaccagaccactgcacctgcacgagttaaacaggaaagaaggagggaagggcagaaaggagcatgggtcacctttggaggctgccaggggcccactcctttacgaaactggtcaagaggggaaagaaggcagcacctgtcctgcctgtcgcccgacactgcaagcctcctaccagctactcagaccacctggagaactggctaaacatgcatcagcgtctgagcaggactgaaaatctaatgccatggagaagcgacagtgtcagaggagcaggtgacactatgctgaggtggttttcatctggcccaccctccttagactctcctcccttcaagagttggagcctcacagaggttgcagggagccaagatcgcgccactgcactccagcctgggcnacagagcgagagactgtctcgagaaacaacaacaaaaagttggagcctcagaccaagcacacacctgtactcccagcactttgggaggttgaggcaagaggatcgcttgaggccaggagtttgagaccagtctgggcaacatagggagaccccatttctacaaaaaatttttaaattagccaggtgtagtggtgcatgcctttagtcctagctactcaggaggctgaggtgggaggatcactggagctcaggagtttgaggctacagtgagctatgatgtcatcactgcactccagcctgggcacagagcaagactctgtctttttctttttttttttttttttaagggggaactcattcctcttcctttgggcatgggctggacttggtgactacagcagcccggtggagaggcctcctcaaagcagcccttgattttgaattgcaacctgctcctgagcccctcaccccccgtgcctccgatgctcacagaacccactgaggggatggctagaccctcacaagagccaggttgtcccctaaccctccacaagggggcacagggccccagccctgagtgtgcagatgtgcgtttaacaaggacacccattcccaattcatgacttcccacttcatgactttgcttcttttgagataattaccagctttgcgcaagcagcactgagaaaactattagtttcctagttactaaactgcaatgtttgctacttttctatgaaggcaggcccctgtaattagcacccacatcacagctgctgaaactcggccgcagtaacgcaggcccagctgtgggtgtctttcctgcccaagtgaagcccatctggctgagtgccagctctctgccatcaatacccaattgccagcatcatgctcctttgtcaggggtgagcccccctccagctaccctgtctt

SEQ ID NO: 405897 - DNA, 7131 bp, Homo sapiens
  misc_feature (6198)..(6198): n is a, c, g, or t
gcggccgaggcgccggagccgagcctggtccagccaccgcctcccccgctgctggccagcgccccccgagtcccggcccgatgccggccgaactcagacaggagcagagcccaggcagccaggcctcactggccacgatgccggaggcacctgatgtgctggaggagaccgtgacggtggaggaggaccccggcacacccacttcccatgtgtctattgtcacatccgaagatggcacaacccggcgcaccgagaccaaggtcaccaagactgtcaagacggtgaccactcggacagtacgccaggtgcccgtgggcccagatggactccccctgctggatggcggccccccactaggcccttttgcagatggtgccctggaccggcatttcctgctgcgtggtggtggcccagtggccacactctctcgagcctacctcagcagtgggggtggctttcccgaaggccccgagccccgggacagccccagctatggcagcctgtcccgagggctgggcatgcggcccccacgtgctggcccccttggcccaggccctggtgatggctgcttcacactgcctggccaccgggaagccttcccggtgggtcctgagcctgggccaccaggtggccgctccctgcccgagcgcttccaggcagagccgtatggcttggaggatgacacgcgcagcctggccgctgatgacgagggtggccctgagctggagcctgactatggcacggccacaaggaggaggcctgagtgtgggcggggccttcataccagggcctacgaggacacagcagatgatggcggcgagctggcggacgagcggcctgcgttcccaatggtgacggcgcccctggcccagcctgaacggggcagcatgggcagcctggaccggctggtgcggcgctcgccctcagtggatagcgcccgcaaggagccgcgctggcgggaccctgagctgcctgaggtgctggccatgctgcggcaccccgtggaccccgtgaaggccaatgcggccgcctacctgcagcatctgtgctttgagaacgagggtgtcaagcggcgtgtacggcagttgcgggggctgccgctgcttgtggcactgctggaccacccgcgggctgaggtgcggcgccgggcctgtggggcactgcgcaacctctcctatggccgcgacactgacaacaaggccgccatccgggactgcggtggtgtgcctgccctggtgcgcctgctgagggctgcccgggacaacgaggtccgtgagcttgtcactggcaccctgtggaacctgtcatcctatgagcccctgaagatggtcatcattgaccatggcctgcagacgctgacccacgaggtgatcgtgccccactcaggatgggagcgtgagcccaacgaggactccaagccacgggacgccgagtggacaactgtcttcaagaacacgtcgggctgcctgaggaatgtgagctccgatggtgctgaggcccggcggcgactccgggagtgtgaagggctggtggacgcgctcctgcatgccctgcagtcggctgtgggccggaaggacactgacaacaagtcggtggagaactgcgtgtgcatcatgcggaacctgtcctaccacgtgcacaaggaggtgcccggggccgacaggtaccaggaggccgagcccgggcccctgggcagtgctgtaggctcccagcgccggaggcgggatgatgccagctgctttggaggcaagaaggccaaaggaaagaaggatggtgagatggaccggaactttgacacgctagacctgcccaagcgaactgaggccgccaaaggctttgagctgctgtaccagcccgaggtggtacgtctctacctctccctcctcacggagagccggaacttcaacaccctggaggctgccgccggcgctctgcagaacctcagtgccggcaactggatgtgggccacgtacatccgcgccacagtgcgcaaagagcgcgggctgccggtgcttgtggaactgctgcagtctgagaccgacaaggtggtgcgcgccgtcgccatcgctctgcgcaacctctcgctggaccggcgcaacaaagacctcatcgggagctacgccatggctgagcttgtgcggaatgtgcgcaatgcacaggctccgccgcgaccgggggcctgcctggaggaagacaccgtggtggcggtgctcaacaccatccacgaaatcgtgtccgacagcctggataacgcgcgctcgctcctgcaggcacgcggggtgccagcgttggtggctctcgtggcctccagccaatcggtacgcgaagcgaaggcggcgtcacacgtgctgcagacagtgtggagctacaaggagctgcgtggtaccttgcagaaagatggttggaccaaggcgcgcttccagtcagctgctgctactgccaaggggcctaagggagcactgagtcctgggggcttcgatgacagcacgctgccactggtggacaagagccttgagggcgagaaaactggcagccgggatgtgatccccatggatgcgctgggcccagacggatactccacggtggaccagagggagcggaggccacggggcgccagctctgcaggagaggcctctgagaaggaacccttgaaactcgaccccagcaggaaggcccctccccccgggcccagcaggcccgcggtcaggctggtggacgccgtaggggacgctaagcctcagcccgttgattcctgggtctagcttgcatgcctgggcccaggcccagcctcttgttcttagggcttggatcgtggaagaagggccaccctgagcagatcgtgccgtggagcttggagccccctggcggcaggggttggcagcgcctcgccccagccaagcctgggcagcacctccgggactgaccttcggcagtggctgggggactgctttcagtgcctgctgttcgtgactcagaaacagaagaaaaacactgagaaaaagcattaaaaataagccaaaataagactattggtaaacacctaaatttttgtaagaaaatttaaaaattaaagcagcaaaggaactttttgctttctgccactcaggtctggcacaagtggctggcttctcccttgtgtcgggcctctgcgcgtctggggcagggccctgggtggaggtggtcccaggtgcccatctgctgtgtcctgcagaggctctgtttctggtccctgggtggccccaaacttgtccacttgggctcactggtctgtctatccataggagtgggctggctgggggctagccaggccttgagcccaggagtagaatcttggctaggggctggtctcggtgcaggtgaactcagctagcacagggttgattcctgtcctgggcctgggaactgggcccttggagcctctgaggtggctagcagtctgaccccttggaggagatggggacagctctaggtgtaggtggacagaaaccagcactgcatcctcactcatgggccagggaggcaactacagggatgcgggagctggtctgagccattgcctcttctgtaagcaaggcccagtggggagtagggaaggagatgcttccactctgtgccacatggggcccagaggggctggtgctgctgcggggtccacctgtccccagcgcctgcttggtcagaaaggtgtgaatgctggctgactcctcttcgtttcccaggctggcagtcgtccccatggggctaacaggtgcccctggcctagctgcaggagggctgacctctgcaccactgtggctgggaggccagtgggccaggcgtgccacccagaacccagccagctaggggccccgcccttagcgttagcgtccgtcaaggggagctttgaatgtttggtgcccaagtcaagggcagcaggggaatggcagttgagaaggatgtactaagtcgagttatatctaaatatttagattcttaatttctattttatatttttaaaacatgatattagtatataagataatatagctagccagtgttagtaaagaagtcatgattgagtcttaaaaaagaacaatccagtgttgcagttcagagaggttagcatgtcagggcgcaggcctcggccgaggtgtgctttgcatttaggacacagcccggagccgcagaaggtcagcaggagcacgtctggcaccttcagtaccaggctgggtgagagagcccgagaggggggccggggggggcagtcagggccctgcttcgctgcctgggcccttgtagatggccttctccaggccgtccaccacctccctgtattccaggaacgattggtagtgtgtgcactcaaagcagctgctcccgcgcacgtgtgctaggaagtctggcgcacctgggcagatcacgttgtcagccagtagcactgtccccttccgcagcaggccacattcctgcaaacagaccggggggtgggggaggtgagggtcagaggtgcccagagaacctgccccaaaccaggatgggtgctcctcactaggccacggcaccacgcctgtgcctagcccctggggccaggtttccactttctgcccagcgtgactcctgcaggaaaggactgtacaagacttgggtgccaccttcagaacatgggccccgtgaggacagggacctttctctcatcaactcctgtatccatctcaggagtatccatcccttagaacagcatgtggcacacagtaggtgctcaataaatgctagctgggtgagtggaaacaatggggccctcaacacccagtgccaggaactcaggcctatgagggagaggcacccaaggagaggggttgctggtatggtccctggagacaatattggcctgaccagggtgaccctgcagggctgaggtggggcagacctcccatcaacaagcctgccccttggggtcagttctggacatccccaagctcctgcatttgcagaccccccatcttcaccagtgcctgggccctgggaggacacagagttcctctgcctgggttctgtgcagaaggaaggagttgttactggacacgcagccatagggcatggcccgtggggtccactatcgggagaaacctcataggatgcttgcctatctatgctatcagaaaagggtttgcttacatcacataaacaagaaaccttgagaggaagtgtttgcctatggggaggaaggacctaccagggcaagggacaccccagtcaccttgtcttggaaatttgacttagtcaccaaacaaaagttaacaagcaatctcaaacatctaaagtataataaaatcaatttgcaggcaggtgccttgaaacactggtatccgaccccacatgcctctgggatgggcctggagagtcccacagggcttgcagctgtcctggtggtgggtggcggtcgtttccagcctgtatgctgcagagaaagcagggggctttcatgtgacagtatggacaccacacggctgcaaggtcagtgaggtcaggggacagccccaaggtccggagttgagcaggaagtaccaccatgaatcatgatgtgttttcatttagaaaaaaaaaaaaatgtcctagcaatgtcagctgaaaagacgtagaacaaagcgccacccgggaggaggacaatggcctaggccttgagcagggcggctgccttccagtctgggccagggaatgcatgagtgaggggcctgggctcctggacttctcgggttgcgccaggggactcaggagcccaatctggtcatcagggatacagaagacgtcagcggactgaaagacaccagaccactgcacctgcacgagttaaacaggaaagaaggagggaagggcagaaaggagcatgggtcacctttggaggctgccaggggcccactcctttacgaaactggtcaagaggggaaagaaggcagcacctgtcctgcctgtcgcccgacactgcaagcctcctaccagctactcagaccacctggagaactggctaaacatgcatcagcgtctgagcaggactgaaaatctaatgccatggagaagcgacagtgtcagaggagcaggtgacactatgctgaggtggttttcatctggcccaccctccttagactctcctcccttcaagagttggagcctcacagaggttgcagggagccaagatcgcgccactgcactccagcctgggcnacagagcgagagactgtctcgagaaacaacaacaaaaagttggagcctcagaccaagcacacacctgtactcccagcactttgggaggttgaggcaagaggatcgcttgaggccaggagtttgagaccagtctgggcaacatagggagaccccatttctacaaaaaatttttaaattagccaggtgtagtggtgcatgcctttagtcctagctactcaggaggctgaggtgggaggatcactggagctcaggagtttgaggctacagtgagctatgatgtcatcactgcactccagcctgggcacagagcaagactctgtctttttctttttttttttttttttaagggggaactcattcctcttcctttgggcatgggctggacttggtgactacagcagcccggtggagaggcctcctcaaagcagcccttgattttgaattgcaacctgctcctgagcccctcaccccccgtgcctccgatgctcacagaacccactgaggggatggctagaccctcacaagagccaggttgtcccctaaccctccacaagggggcacagggccccagccctgagtgtgcagatgtgcgtttaacaaggacacccattcccaattcatgacttcccacttcatgactttgcttcttttgagataattaccagctttgcgcaagcagcactgagaaaactattagtttcctagttactaaactgcaatgtttgctacttttctatgaaggcaggcccctgtaattagcacccacatcacagctgctgaaactcggccgcagtaacgcaggcccagctgtgggtgtctttcctgcccaagtgaagcccatctggctgagtgccagctctctgccatcaatacccaattgccagcatcatgctcctttgtcaggggtgagcccccctccagctaccctgtctt

SEQ ID NO: 405898 - DNA, 5326 bp, Homo sapiens
gcggccgaggcgccggagccgagcctggtccagccaccgcctcccccgctgctggccagcgccccccgagtcccggcccgatgccggccgaactcagacaggagcagagcccaggcagccaggcctcactggccacgatgccggaggcacctgatgtgctggaggagaccgtgacggtggaggaggaccccggcacacccacttcccatgtgtctattgtcacatccgaagatggcacaacccggcgcaccgagaccaaggtcaccaagactgtcaagacggtgaccactcggacagtacgccaggtgcccgtgggcccagatggactccccctgctggatggcggccccccactaggcccttttgcagatggtgccctggaccggcatttcctgctgcgtggtggtggcccagtggccacactctctcgagcctacctcagcagtgggggtggctttcccgaaggccccgagccccgggacagccccagctatggcagcctgtcccgagggctgggcatgcggcccccacgtgctggcccccttggcccaggccctggtgatggctgcttcacactgcctggccaccgggaagccttcccggtgggtcctgagcctgggccaccaggtggccgctccctgcccgagcgcttccaggcagagccgtatggcttggaggatgacacgcgcagcctggccgctgatgacgagggtggccctgagctggagcctgactatggcacggccacaaggaggaggcctgagtgtgggcggggccttcataccagggcctacgaggacacagcagatgatggcggcgagctggcggacgagcggcctgcgttcccaatggtgacggcgcccctggcccagcctgaacggggcagcatgggcagcctggaccggctggtgcggcgctcgccctcagtggatagcgcccgcaaggagccgcgctggcgggaccctgagctgcctgaggtgctggccatgctgcggcaccccgtggaccccgtgaaggccaatgcggccgcctacctgcagcatctgtgctttgagaacgagggtgtcaagcggcgtgtacggcagttgcgggggctgccgctgcttgtggcactgctggaccacccgcgggctgaggtgcggcgccgggcctgtggggcactgcgcaacctctcctatggccgcgacactgacaacaaggccgccatccgggactgcggtggtgtgcctgccctggtgcgcctgctgagggctgcccgggacaacgaggtccgtgagcttgtcactggcaccctgtggaacctgtcatcctatgagcccctgaagatggtcatcattgaccatggcctgcagacgctgacccacgaggtgatcgtgccccactcaggatgggagcgtgagcccaacgaggactccaagccacgggacgccgagtggacaactgtcttcaagaacacgtcgggctgcctgaggaatgtgagctccgatggtgctgaggcccggcggcgactccgggagtgtgaagggctggtggacgcgctcctgcatgccctgcagtcggctgtgggccggaaggacactgacaacaagtcggtggagaactgcgtgtgcatcatgcggaacctgtcctaccacgtgcacaaggaggtgcccggggccgacaggtaccaggaggccgagcccgggcccctgggcagtgctgtaggctcccagcgccggaggcgggatgatgccagctgctttggaggcaagaaggccaaaggaaagaaggatggtgagatggaccggaactttgacacgctagacctgcccaagcgaactgaggccgccaaaggctttgagctgctgtaccagcccgaggtggtacgtctctacctctccctcctcacggagagccggaacttcaacaccctggaggctgccgccggcgctctgcagaacctcagtgccggcaactggatgtgggccacgtacatccgcgccacagtgcgcaaagagcgcgggctgccggtgcttgtggaactgctgcagtctgagaccgacaaggtggtgcgcgccgtcgccatcgctctgcgcaacctctcgctggaccggcgcaacaaagacctcatcgggagctacgccatggctgagcttgtgcggaatgtgcgcaatgcacaggctccgccgcgaccgggggcctgcctggaggaagacaccgtggtggcggtgctcaacaccatccacgaaatcgtgtccgacagcctggataacgcgcgctcgctcctgcaggcacgcggggtgccagcgttggtggctctcgtggcctccagccaatcggtacgcgaagcgaaggcggcgtcacacgtgctgcagacagtgtggagctacaaggagctgcgtggtaccttgcagaaagatggttggaccaaggcgcgcttccagtcagctgctgctactgccaaggggcctaagggagcactgagtcctgggggcttcgatgacagcacgctgccactggtggacaagagccttgagggcgagaaaactggcagccgggatgtgatccccatggatgcgctgggcccagacggatactccacggtggaccagagggagcggaggccacggggcgccagctctgcaggagaggcctctgagaaggaacccttgaaactcgaccccagcaggaaggcccctccccccgggcccagcaggcccgcggtcaggctggtggacgccgtaggggacgctaagcctcagcccgttgattcctgggtctagcttgcatgcctgggcccaggcccagcctcttgttcttagggcttggatcgtggaagaagggccaccctgagcagatcgtgccgtggagcttggagccccctggcggcaggggttggcagcgcctcgccccagccaagcctgactttggggacaccctcctgcccccccaccccactccccccatcctacctaactccctaggcctgagttagctgtttactgacatggtgctgtgtgtgagcgagtgacagaaggcccgaggaggccgactgggctgctggggcagggcccagggaggtggcagggaagggtgcctggctgggctttggggctggtgggataggagggtgcccctgggaacacagtgccccagtggtgcgggccaggtctggcgccaggggcaggcagctaggcagggagggggctgggaaagaacttggacttctaaaggcggagggtctccctgggcaccctgcaggcaggcagaccacagtgtggggggtgccccacaaggctcagccctgggcaaggaagctttggaagcagcaaggtgggggtcaggctacaggtgccccacctccccagagccctgcagtcacgtgaggcccctgtgcagtagagagcctttctccagcccatgctggctgtggccggggctgccgcatctgcctggagcctgggcagcacctccgggactgaccttcggcagtggctgggggactgctttcagtgcctgctgttcgtgactcagaaacagaagaaaaacactgagaaaaagcattaaaaataagccaaaataagactattggtaaacacctaaatttttgtaagaaaatttaaaaattaaagcagcaaaggaactttttgctttctgccactcaggtctggcacaagtggctggcttctcccttgtgtcgggcctctgcgcgtctggggcagggccctgggtggaggtggtcccaggtgcccatctgctgtgtcctgcagaggctctgtttctggtccctgggtggccccaaacttgtccacttgggctcactggtctgtctatccataggagtgggctggctgggggctagccaggccttgagcccaggagtagaatcttggctaggggctggtctcggtgcaggtgaactcagctagcacagggttgattcctgtcctgggcctgggaactgggcccttggagcctctgaggtggctagcagtctgaccccttggaggagatggggacagctctaggtgtaggtggacagaaaccagcactgcatcctcactcatgggccagggaggcaactacagggatgcgggagctggtctgagccattgcctcttctgtaagcaaggcccagtggggagtagggaaggagatgcttccactctgtgccacatggggcccagaggggctggtgctgctgcggggtccacctgtccccagcgcctgcttggtcagaaaggtgtgaatgctggctgactcctcttcgtttcccaggctggcagtcgtccccatggggctaacaggtgcccctggcctagctgcaggagggctgacctctgcaccactgtggctgggaggccagtgggccaggcgtgccacccagaacccagccagctaggggccccgcccttagcgttagcgtccgtcaaggggagctttgaatgtttggtgcccaagtcaagggcagcaggggaatggcagttgagaaggatgtactaagtcgagttatatctaaatatttagattcttaatttctattttatatttttaaaacatgatattagtatataagataatatagctagccagtgttagtaaagaagtcatgattgagtcttaaaaaagaacaatccagtgttgcagttcagagaggttagcatgtcagggcgcaggcctcggccgaggtgtgctttgcatttaggacacagcccggagccgcagaaggtcagcaggagcacgtctggcaccttcagtaccaggctgggtgagagagcccgagaggggggccggggggggcagtcagggccctgcttcgctgcctgggcccttgtagatggccttctccaggccgtccaccacctccctgtattccaggaacgattggtagtgtgtgcactcaaagcagctgctcccgcgcacgtgtgctaggaagtctggcgcacctgggcagatcacgttgtcagccagtagcactgtccccttccgcagcaggccacattcctccaaaagaagcgtgtccggcaggtaccggtccttccagtggtcgaggaagaccatgtccagtgtgtccacatcatacttcttcttcagctgggggatgatgtcctgggacgctccaaccacaagggtgaccttgtccttcatgccagcgaaatccaccatccgctgggtgatggcggcacagtcggggttgatctcgatggtgatgagcctcgcccctggtgacagcaggcgggccatgcgcacagctgagtagccacagtaggcccccagctccagcagcacggagggctggtgctcctgaatcacggcgtccacgatcttgcctgtgcagggttgggga

SEQ ID NO: 405899 - DNA, 3940 bp, Homo sapiens
  misc_feature (560)..(560): n is a, c, g, or t
  misc_feature (3007)..(3007): n is a, c, g, or t
tgtgtcggccctggcgtctgctgttcggctagtgctcgcggtgggccgggctgggcggcgtgggcggtgtttctgtgtgcgtgtgtgcctcagccccctgtcgtgtgttgcgtgtgcgccgctgcgcgtctggctgcgtgctgtctacgcgccgcggtcgtgctctcttccgttggtcgtttgtgctgctcctacctcttcacgcctcactcctgcctgttgcttgctttctgacgtcctcccgctgctccctccgcccgccttagtttgtgtcgccggcgtccgcctggacgtaactagataacgacgtgcccagtttttcacatcttcaagccgcccgcggagaaaaagtgtgttctacggatcaatcacgtccgtgggggcgcaaaatcttcttccatggggccggctaagtatatactgcggcggtggggtgaccacgcctaaaagacacgtcccgaaatttgttaattatttgcgcccccctgaagggcgcggttatcattatctcctctgtagtgtaggtggttggtcgctcgcagatttggttcggccccgcnacagtagtagtagggggtcgtctcttcccgcacaaaggatcctccaccagaagtgcagacatttgtttctcccctgcgccacgtgtgggttagtaaacaccgcgccgccgcctttttataaccgccccttatagggggcccccttttacaaaaaaagggggggggcggagtgggggccccccggggggagtatttttggggcggcgcccccccctttttttttttttttttttttttttttttttttttttttttttttttttttttttttttagctagccagtgttagtaaagaagtcatgattgagtcttaaaaaagaacaatccagtgttgcagttcagagaggttagcatgtcagggcgcaggcctcggccgaggtgtgctttgcatttaggacacagcccggagccgcagaaggtcagcaggagcacgtctggcaccttcagtaccaggctgggtgagagagcccgagaggggggccggggggggcagtcagggccctgcttcgctgcctgggcccttgtagatggccttctccaggccgtccaccacctccctgtattccaggaacgattggtagtgtgtgcactcaaagcagctgctcccgcgcacgtgtgctaggaagtctggcgcacctgggcagatcacgttgtcagccagtagcactgtccccttccgcagcaggccacattcctgcaaacagaccggggggtgggggaggtgagggtcagaggtgcccagagaacctgccccaaaccaggatgggtgctcctcactaggccacggcaccacgcctgtgcctagcccctggggccaggtttccactttctgcccagcgtgactcctgcaggaaaggactgtacaagacttgggtgccaccttcagaacatgggccccgtgaggacagggacctttctctcatcaactcctgtatccatctcaggagtatccatcccttagaacagcatgtggcacacagtaggtgctcaataaatgctagctgggtgagtggaaacaatggggccctcaacacccagtgccaggaactcaggcctatgagggagaggcacccaaggagaggggttgctggtatggtccctggagacaatattggcctgaccagggtgaccctgcagggctgaggtggggcagacctcccatcaacaagcctgccccttggggtcagttctggacatccccaagctcctgcatttgcagaccccccatcttcaccagtgcctgggccctgggaggacacagagttcctctgcctgggttctgtgcagaaggaaggagttgttactggacacgcagccatagggcatggcccgtggggtccactatcgggagaaacctcataggatgcttgcctatctatgctatcagaaaagggtttgcttacatcacataaacaagaaaccttgagaggaagtgtttgcctatggggaggaaggacctaccagggcaagggacaccccagtcaccttgtcttggaaatttgacttagtcaccaaacaaaagttaacaagcaatctcaaacatctaaagtataataaaatcaatttgcaggcaggtgccttgaaacactggtatccgaccccacatgcctctgggatgggcctggagagtcccacagggcttgcagctgtcctggtggtgggtggcggtcgtttccagcctgtatgctgcagagaaagcagggggctttcatgtgacagtatggacaccacacggctgcaaggtcagtgaggtcaggggacagccccaaggtccggagttgagcaggaagtaccaccatgaatcatgatgtgttttcatttagaaaaaaaaaaaaatgtcctagcaatgtcagctgaaaagacgtagaacaaagcgccacccgggaggaggacaatggcctaggccttgagcagggcggctgccttccagtctgggccagggaatgcatgagtgaggggcctgggctcctggacttctcgggttgcgccaggggactcaggagcccaatctggtcatcagggatacagaagacgtcagcggactgaaagacaccagaccactgcacctgcacgagttaaacaggaaagaaggagggaagggcagaaaggagcatgggtcacctttggaggctgccaggggcccactcctttacgaaactggtcaagaggggaaagaaggcagcacctgtcctgcctgtcgcccgacactgcaagcctcctaccagctactcagaccacctggagaactggctaaacatgcatcagcgtctgagcaggactgaaaatctaatgccatggagaagcgacagtgtcagaggagcaggtgacactatgctgaggtggttttcatctggcccaccctccttagactctcctcccttcaagagttggagcctcacagaggttgcagggagccaagatcgcgccactgcactccagcctgggcnacagagcgagagactgtctcgagaaacaacaacaaaaagttggagcctcagaccaagcacacacctgtactcccagcactttgggaggttgaggcaagaggatcgcttgaggccaggagtttgagaccagtctgggcaacatagggagaccccatttctacaaaaaatttttaaattagccaggtgtagtggtgcatgcctttagtcctagctactcaggaggctgaggtgggaggatcactggagctcaggagtttgaggctacagtgagctatgatgtcatcactgcactccagcctgggcacagagcaagactctgtctttttctttttttttttttttttaagggggaactcattcctcttcctttgggcatgggctggacttggtgactacagcagcccggtggagaggcctcctcaaagcagcccttgattttgaattgcaacctgctcctgagcccctcaccccccgtgcctccgatgctcacagaacccactgaggggatggctagaccctcacaagagccaggttgtcccctaaccctccacaagggggcacagggccccagccctgagtgtgcagatgtgcgtttaacaaggacacccattcccaattcatgacttcccacttcatgactttgcttcttttgagataattaccagctttgcgcaagcagcactgagaaaactattagtttcctagttactaaactgcaatgtttgctacttttctatgaaggcaggcccctgtaattagcacccacatcacagctgctgaaactcggccgcagtaacgcaggcccagctgtgggtgtctttcctgcccaagtgaagcccatctggctgagtgccagctctctgccatcaatacccaattgccagcatcatgctcctttgtcaggggtgagcccccctccagctaccctgtctt

SEQ ID NO: 405900 - DNA, 494 bp, Homo sapiens
ctgctgccaggcaggtccaactgatttgagcctcagtttgttcctctgtgaaatgggaacgcttttccccttgggtgactatatgttgatagtaaatattacgtgactcatccacacccatccctggccccagctcacccacgccctgggagctctgaagcgggaagcgggaggggtatgatggatgagagcagattctgggtgaccgtgggtggcggttgccctgcacctaggctttgagctgctgtaccagcccgaggtggtacgtctctacctctccctcctcacggagagccggaacttcaacaccctggaggctgccgccggcgctctgcagaacctcagtgccggcaactggatggtgagggaccaggtcgggcagggtgggcaagtcctgagagagggaatcccaggcacctcactggtgcagctcctgcctcggctggcggggaaaggaggggccacaccaccaccccaggatccaagaggtgtat

SEQ ID NO: 405901 - DNA, 640 bp, Homo sapiens
tgacctgtcgtccttcctctcaccttgtaatctctgttctccttctccctgtatcatgaatgggaagcttcttgagtgtctctctggaagcagatcctggcaccatgcttcttgtatagtctgcagaaccatgagccaaataatcctcttttctttataaattacccagcctcaggtattcctttatagtaatgcgaacagactgagacaaccctctttctcgttctggaacaaccagcccttttattttaggacaaaactatttttttttccttaataaacaaaacccatcctactacctcacacgtagtgttgtacctgcctgccaccattgttctagtagtctcattcacatgttattgataacttttagccaaagtaacttttattacacagagaaaactagggagtggataattgtgagctgttgcatgccactgttttagcaaactagcagagctaacatccagagctaacacaactttaactgtgtgtacactttcattgtgtacaagtctcaagagtggcaaaaatgaacacatttaactgattaaaagagccaaagacatagcctctttgtagcatataaaaataagaaacaagtatatttgtcaggcctctgagcccaagcctgcatgta

SEQ ID NO: 405902 - DNA, 541 bp, Homo sapiens
aactaggctaggtagagctgcgtggtgaatcggccgaggctgggatgcatgaagggcgacgtgcaggagtcctcgctggccacgacaaccgcgtgagctgcctcggggtcaccgacgatggcatggctgtggccacgggctcctgggactccttcctcaagatctggaactaatggccccacccccactgggcccaggccaggaggggccctgcccatgcccacactacaggccagggctgcggggctggcgcaatcccagcccccttccccgggccacggggccttgggtccctgccctcccacccaggtttggttcctcccggggcccccactgtggagataagaaggggatggaatgggggaagaggaggagcaggaggccctcatccttctgctgccctggggttggggcctcacccctctggagggccggaggcaggaggtggaaaccccaggggctggcttttttaaaactggttttattttaatttttattatattttcagtttttccataaaggagccaattccaactctgta

SEQ ID NO: 405903 - DNA, 712 bp, Homo sapiens
aactaggctaggtagagctgcgtggtgaatcggccgaggctgggatgcatgaagggcgacgtgcaggagtcctcgctggccacgacaaccgcgtgagctgcctcggggtcaccgacgatggcatggctgtggccacgggctcctgggactccttcctcaagatctggaactaatggccccacccccactgggcccaggccaggaggggccctgcccatgcccacactacaggccagggctgcggggctggcgcaatcccagcccccttccccgggccacggggccttgggtccctgccctcccacccaggtttggttcctcccggggcccccactgtggagataagaaggggatggaatgggggaagaggaggagcaggaggccctcatccttctgctgccctggggttggggcctcacccctctggagggccggaggcaggaggtggaaaccccaggggctggcttttttaaaactggttttattttaatttttattatattttcagtttttccataaaggagccaattccaactctgtaaaaaaaaaaagaaaaaaaaaattggggggcattattatggggggtgcggggaaaagggggtatttagattgggccttgggtcattaggttggttccttggacccagttttttttggtccaaggggcgaagatcggcggggtcccccttataggggggccgaataaatgtcg

SEQ ID NO: 405904 - DNA, 1866 bp, Homo sapiens
ccagaggggggatgtcttactcctttccgtgaagcaaaccctttgagtacggtttgcgtccacaaagcgtagggtgagaaccttgggagcgactgggcccgtctttgctccctcggtggggttttgtctcctggcttcccccaagtgcgaggcagttggtctcgcccagccgggtcctgggcgcggcggcggcagccgcgtcactggcgggcgggatccctccgctctggggaggcagcgctggcggcggggctggggccactgaggaaatccatccgcgccgccgccgccgccgccgccgccgccgccgccgcctccgccgcggaggaagacagcgccgcccgcgcaccgccagcgacctccgccgcagagtcccaccgccacaggcctcgggccagcggccaggagctgcctcccccagcccccgtcccgcggcccccagccgcccccaaccctgccccacgggcccggcgccatgagtgagctggagcaactgagacaggaggccgagcagctccggaaccagatccgggatgcccgaaaagcatgtggggactcaacactgacccagatcacagctgggctggacccagtggggagaatccagatgaggacccggaggaccctccgtgggcacctggcaaagatctatgccatgcactgggggaccgactcaaggctgctggtcagcgcctcccaggatgggaagctcatcatctgggacagctacaccaccaacaaggtccacgccatcccgctgcgctcctcctgggtaatgacctgtgcctacgcgccctcagggaactttgtggcctgtggggggttggacaacatctgctccatctacagcctcaagacccgcgagggcaacgtcagggtcagccgggagctgcctggccacactgggtacctgtcgtgttgccgcttcctggatgacaaccaaatcatcaccagctctggggataccacctgtgccctgtgggacattgagacaggccagcagacagtgggttttgctggacacagtggggatgtgatgtccctgtccctggcccccgatggccgcacgtttgtgtcaggcgcctgtgatgcctctatcaagctgtgggacgtgcgggattccatgtgccgacagaccttcatcggccatgaatccgacatcaatgcagtggctttcttccccaacggctacgccttcaccaccggctctgacgacgccacgtgccgcctcttcgacctgcgggccgatcaggagctcctcatgtactcccatgacaacatcatctgtggcatcacctctgttgccttctcgcgcagcggacggctgctgctcgctggctacgacgacttcaactgcaacatctgggatgccatgaagggcgaccgtgcaggagtcctcgctggccacgacaaccgcgtgagctgcctcggggtcaccgacgatggcatggctgtggccacgggctcctgggactccttcctcaagatctggaactaatggccccacccccactgggcccaggccaggaggggccctgcccatgcccacactacaggccagggctgcggggctggcgcaatcccagcccccttccccgggccacggggccttgggtccctgccctcccacccaggtttggttcctcccggggcccccactgtggagataagaaggggatggaatgggggaagaggaggagcaggaggccctcatccttctgctgccctggggttggggcctcacccctctggagggccggaggcaggaggtggaaaccccaggggctggcttttttaaaactggttttattttaatttttattatattttcagtttttccataaaggagccaattccaactctgta

SEQ ID NO: 405905 - DNA, 1628 bp, Homo sapiens
cggctcccacgggctttctgcgggcgcggcggggcgggcggtccctgcgctggagggagcagcggctcggggctgccttccccgccgctgtcacccccacccgcggcggacggctaatggggcgcagccggaccggggattatccggggcctcgggccagcggccaggagctgcctcccccagcccccgtcccgcggcccccagccgcccccaaccctgccccacgggcccggcgccatgagtgagctggagcaactgagacaggaggccgagcagctccggaaccagatccgggatgcccgaaaagcatgtggggactcaacactgacccagatcacagctgggctggacccagtggggagaatccagatgaggacccggaggaccctccgtgggcacctggcaaagatctatgccatgcactgggggaccgactcaaggctgctggtcagcgcctcccaggatgggaagctcatcatctgggacagctacaccaccaacaaggtccacgccatcccgctgcgctcctcctgggtaatgacctgtgcctacgcgccctcagggaactttgtggcctgtggggggttggacaacatctgctccatctacagcctcaagacccgcgagggcaacgtcagggtcagccgggagctgcctggccacactgggtacctgtcgtgttgccgcttcctggatgacaaccaaatcatcaccagctctggggataccacctgtgccctgtgggacattgagacaggccagcagacagtgggttttgctggacacagtggggatgtgatgtccctgtccctggcccccgatggccgcacgtttgtgtcaggcgcctgtgatgcctctatcaagctgtgggacgtgcgggattccatgtgccgacagaccttcatcggccatgaatccgacatcaatgcagtggctttcttccccaacggctacgccttcaccaccggctctgacgacgccacgtgccgcctcttcgacctgcgggccgatcaggagctcctcatgtactcccatgacaacatcatctgtggcatcacctctgttgccttctcgcgcagcggacggctgctgctcgctggctacgacgacttcaactgcaacatctgggatgccatgaagggcgaccgtgcaggagtcctcgctggccacgacaaccgcgtgagctgcctcggggtcaccgacgatggcatggctgtggccacgggctcctgggactccttcctcaagatctggaactaatggccccacccccactgggcccaggccaggaggggccctgcccatgcccacactacaggccagggctgcggggctggcgcaatcccagcccccttccccgggccacggggccttgggtccctgccctcccacccaggtttggttcctcccggggcccccactgtggagataagaaggggatggaatgggggaagaggaggagcaggaggccctcatccttctgctgccctggggttggggcctcacccctctggagggccggaggcaggaggtggaaaccccaggggctggcttttttaaaactggttttattttaatttttattatattttcagtttttccataaaggagccaattccaactctgta

SEQ ID NO: 405906 - DNA, 1313 bp, Homo sapiens
ccttttttttaaaacccggcagtgagccgcagtcacttagagatcccgagagatcctgagacccggaggaccctccgtgggcacctggcaaagatctatgccatgcactgggggaccgactcaaggctgctggtcagcgcctcccaggatgggaagctcatcatctgggacagctacaccaccaacaaggtccacgccatcccgctgcgctcctcctgggtaatgacctgtgcctacgcgccctcagggaactttgtggcctgtggggggttggacaacatctgctccatctacagcctcaagacccgcgagggcaacgtcagggtcagccgggagctgcctggccacactgggtacctgtcgtgttgccgcttcctggatgacaaccaaatcatcaccagctctggggataccacctgtgccctgtgggacattgagacaggccagcagacagtgggttttgctggacacagtggggatgtgatgtccctgtccctggcccccgatggccgcacgtttgtgtcaggcgcctgtgatgcctctatcaagctgtgggacgtgcgggattccatgtgccgacagaccttcatcggccatgaatccgacatcaatgcagtggctttcttccccaacggctacgccttcaccaccggctctgacgacgccacgtgccgcctcttcgacctgcgggccgatcaggagctcctcatgtactcccatgacaacatcatctgtggcatcacctctgttgccttctcgcgcagcggacggctgctgctcgctggctacgacgacttcaactgcaacatctgggatgccatgaagggcgaccgtgcaggagtcctcgctggccacgacaaccgcgtgagctgcctcggggtcaccgacgatggcatggctgtggccacgggctcctgggactccttcctcaagatctggaactaatggccccacccccactgggcccaggccaggaggggccctgcccatgcccacactacaggccagggctgcggggctggcgcaatcccagcccccttccccgggccacggggccttgggtccctgccctcccacccaggtttggttcctcccggggcccccactgtggagataagaaggggatggaatgggggaagaggaggagcaggaggccctcatccttctgctgccctggggttggggcctcacccctctggagggccggaggcaggaggtggaaaccccaggggctggcttttttaaaactggttttattttaatttttattatattttcagtttttccataaaggagccaattccaactctgta

SEQ ID NO: 405907 - DNA, 1208 bp, Homo sapiens
cctacaccgttccccaccaggctgctggtcagcgcctcccaggatgggaagctcatcatctgggacagctacaccaccaacaaggtccacgccatcccgctgcgctcctcctgggtaatgacctgtgcctacgcgccctcagggaactttgtggcctgtggggggttggacaacatctgctccatctacagcctcaagacccgcgagggcaacgtcagggtcagccgggagctgcctggccacactgggtacctgtcgtgttgccgcttcctggatgacaaccaaatcatcaccagctctggggataccacctgtgccctgtgggacattgagacaggccagcagacagtgggttttgctggacacagtggggatgtgatgtccctgtccctggcccccgatggccgcacgtttgtgtcaggcgcctgtgatgcctctatcaagctgtgggacgtgcgggattccatgtgccgacagaccttcatcggccatgaatccgacatcaatgcagtggctttcttccccaacggctacgccttcaccaccggctctgacgacgccacgtgccgcctcttcgacctgcgggccgatcaggagctcctcatgtactcccatgacaacatcatctgtggcatcacctctgttgccttctcgcgcagcggacggctgctgctcgctggctacgacgacttcaactgcaacatctgggatgccatgaagggcgaccgtgcaggagtcctcgctggccacgacaaccgcgtgagctgcctcggggtcaccgacgatggcatggctgtggccacgggctcctgggactccttcctcaagatctggaactaatggccccacccccactgggcccaggccaggaggggccctgcccatgcccacactacaggccagggctgcggggctggcgcaatcccagcccccttccccgggccacggggccttgggtccctgccctcccacccaggtttggttcctcccggggcccccactgtggagataagaaggggatggaatgggggaagaggaggagcaggaggccctcatccttctgctgccctggggttggggcctcacccctctggagggccggaggcaggaggtggaaaccccaggggctggcttttttaaaactggttttattttaatttttattatattttcagtttttccataaaggagccaattccaactctgta

SEQ ID NO: 405908 - DNA, 1768 bp, Homo sapiens
ccagaggggggatgtcttactcctttccgtgaagcaaaccctttgagtacggtttgcgtccacaaagcgtagggtgagaaccttgggagcgactgggcccgtctttgctccctcggtggggttttgtctcctggcttcccccaagtgcgaggcagttggtctcgcccagccgggtcctgggcgcggcggcggcagccgcgtcactggcgggcgggatccctccgctctggggaggcagcgctggcggcggggctggggccactgaggaaatccatccgcgccgccgccgccgccgccgccgccgccgccgccgcctccgccgcggaggaagacagcgccgcccgcgcaccgccagcgacctccgccgcagagtcccaccgccacaggcctcgggccagcggccaggagctgcctcccccagcccccgtcccgcggcccccagccgcccccaaccctgccccacgggcccggcgccatgagtgagctggagcaactgagacaggaggccgagcagctccggaaccagatccgggatgcccgaaaagcatgtggggactcaacactgacccagatcacagctgggctggacccagtggggagaatccagatgaggacccggaggaccctccgtgggcacctggcaaagatctatgccatgcactgggggaccgactcaaggctgctggtcagcgcctcccaggatgggaagctcatcatctgggacagctacaccaccaacaagcatctacagcctcaagacccgcgagggcaacgtcagggtcagccgggagctgcctggccacactgggtacctgtcgtgttgccgcttcctggatgacaaccaaatcatcaccagctctggggataccacctgtgccctgtgggacattgagacaggccagcagacagtgggttttgctggacacagtggggatgtgatgtccctgtccctggcccccgatggccgcacgtttgtgtcaggcgcctgtgatgcctctatcaagctgtgggacgtgcgggattccatgtgccgacagaccttcatcggccatgaatccgacatcaatgcagtggctttcttccccaacggctacgccttcaccaccggctctgacgacgccacgtgccgcctcttcgacctgcgggccgatcaggagctcctcatgtactcccatgacaacatcatctgtggcatcacctctgttgccttctcgcgcagcggacggctgctgctcgctggctacgacgacttcaactgcaacatctgggatgccatgaagggcgaccgtgcaggagtcctcgctggccacgacaaccgcgtgagctgcctcggggtcaccgacgatggcatggctgtggccacgggctcctgggactccttcctcaagatctggaactaatggccccacccccactgggcccaggccaggaggggccctgcccatgcccacactacaggccagggctgcggggctggcgcaatcccagcccccttccccgggccacggggccttgggtccctgccctcccacccaggtttggttcctcccggggcccccactgtggagataagaaggggatggaatgggggaagaggaggagcaggaggccctcatccttctgctgccctggggttggggcctcacccctctggagggccggaggcaggaggtggaaaccccaggggctggcttttttaaaactggttttattttaatttttattatattttcagtttttccataaaggagccaattccaactctgta

SEQ ID NO: 405909 - DNA, 2037 bp, Homo sapiens
ccagaggggggatgtcttactcctttccgtgaagcaaaccctttgagtacggtttgcgtccacaaagcgtagggtgagaaccttgggagcgactgggcccgtctttgctccctcggtggggttttgtctcctggcttcccccaagtgcgaggcagttggtctcgcccagccgggtcctgggcgcggcggcggcagccgcgtcactggcgggcgggatccctccgctctggggaggcagcgctggcggcggggctggggccactgaggaaatccatccgcgccgccgccgccgccgccgccgccgccgccgccgcctccgccgcggaggaagacagcgccgcccgcgcaccgccagcgacctccgccgcagagtcccaccgccacaggcctcgggccagcggccaggagctgcctcccccagcccccgtcccgcggcccccagccgcccccaaccctgccccacgggcccggcgccatgagtgagctggagcaactgagacaggaggccgagcagctccggaaccagatccgggatgcccgaaaagcatgtggggactcaacactgacccagatcacagctgggctggacccagtggggagaatccagatgaggacccggaggaccctccgtgggcacctggcaaagatctatgccatgcactgggggaccgactcaaggctgctggtcagcgcctcccaggatgggaagctcatcatctgggacagctacaccaccaacaaggtccacgccatcccgctgcgctcctcctgggtaatgacctgtgcctacgcgccctcagggaactttgtggcctgtggggggttggacaacatctgctccatctacagcctcaagacccgcgagggcaacgtcagggtcagccgggagctgcctggccacactgggtacctgtcgtgttgccgcttcctggatgacaaccaaatcatcaccagctctggggataccacctgtgccctgtgggacattgagacaggccagcagacagtgggttttgctggacacagtggggatgtgatgtccctgtccctggcccccgatggccgcacgtttgtgtcaggcgcctgtgatgcctctatcaagctgtgggacgtgcgggattccatgtgccgacagaccttcatcggccatgaatccgacatcaatgcagtggctttcttccccaacggctacgccttcaccaccggctctgacgacgccacgtgccgcctcttcgacctgcgggccgatcaggagctcctcatgtactcccatgacaacatcatctgtggcatcacctctgttgccttctcgcgcagcggacggctgctgctcgctggctacgacgacttcaactgcaacatctgggatgccatgaagggcgaccgtgcaggagtcctcgctggccacgacaaccgcgtgagctgcctcggggtcaccgacgatggcatggctgtggccacgggctcctgggactccttcctcaagatctggaactaatggccccacccccactgggcccaggccaggaggggccctgcccatgcccacactacaggccagggctgcggggctggcgcaatcccagcccccttccccgggccacggggccttgggtccctgccctcccacccaggtttggttcctcccggggcccccactgtggagataagaaggggatggaatgggggaagaggaggagcaggaggccctcatccttctgctgccctggggttggggcctcacccctctggagggccggaggcaggaggtggaaaccccaggggctggcttttttaaaactggttttattttaatttttattatattttcagtttttccataaaggagccaattccaactctgtaaaaaaaaaaagaaaaaaaaaattggggggcattattatggggggtgcggggaaaagggggtatttagattgggccttgggtcattaggttggttccttggacccagttttttttggtccaaggggcgaagatcggcggggtcccccttataggggggccgaataaatgtcg

SEQ ID NO: 405910 - DNA, 957 bp, Homo sapiens
ctctcaggatcttgacagacgcacgtaaccaactcatcacctatactctggggataccacctgtgccctgtgggacattgagacaggccagcagacagtgggttttgctggacacagtggggatgtgatgtccctgtccctggcccccgatggccgcacgtttgtgtcaggcgcctgtgatgcctctatcaagctgtgggacgtgcgggattccatgtgccgacagaccttcatcggccatgaatccgacatcaatgcagtggctttcttccccaacggctacgccttcaccaccggctctgacgacgccacgtgccgcctcttcgacctgcgggccgatcaggagctcctcatgtactcccatgacaacatcatctgtggcatcacctctgttgccttctcgcgcagcggacggctgctgctcgctggctacgacgacttcaactgcaacatctgggatgccatgaagggcgaccgtgcaggagtcctcgctggccacgacaaccgcgtgagctgcctcggggtcaccgacgatggcatggctgtggccacgggctcctgggactccttcctcaagatctggaactaatggccccacccccactgggcccaggccaggaggggccctgcccatgcccacactacaggccagggctgcggggctggcgcaatcccagcccccttccccgggccacggggccttgggtccctgccctcccacccaggtttggttcctcccggggcccccactgtggagataagaaggggatggaatgggggaagaggaggagcaggaggccctcatccttctgctgccctggggttggggcctcacccctctggagggccggaggcaggaggtggaaaccccaggggctggcttttttaaaactggttttattttaatttttattatattttcagtttttccataaaggagccaattccaactctgta

SEQ ID NO: 405911 - DNA, 769 bp, Homo sapiens
caggatccccgtctgagatgacagtcgggtgccgacagaccttcatcggccatgaatccgacatcaatgcagtggctttcttccccaacggctacgccttcaccaccggctctgacgacgccacgtgccgcctcttcgacctgcgggccgatcaggagctcctcatgtactcccatgacaacatcatctgtggcatcacctctgttgccttctcgcgcagcggacggctgctgctcgctggctacgacgacttcaactgcaacatctgggatgccatgaagggcgaccgtgcaggagtcctcgctggccacgacaaccgcgtgagctgcctcggggtcaccgacgatggcatggctgtggccacgggctcctgggactccttcctcaagatctggaactaatggccccacccccactgggcccaggccaggaggggccctgcccatgcccacactacaggccagggctgcggggctggcgcaatcccagcccccttccccgggccacggggccttgggtccctgccctcccacccaggtttggttcctcccggggcccccactgtggagataagaaggggatggaatgggggaagaggaggagcaggaggccctcatccttctgctgccctggggttggggcctcacccctctggagggccggaggcaggaggtggaaaccccaggggctggcttttttaaaactggttttattttaatttttattatattttcagtttttccataaaggagccaattccaactctgta

SEQ ID NO: 405912 - DNA, 1577 bp, Homo sapiens
ccagaggggggatgtcttactcctttccgtgaagcaaaccctttgagtacggtttgcgtccacaaagcgtagggtgagaaccttgggagcgactgggcccgtctttgctccctcggtggggttttgtctcctggcttcccccaagtgcgaggcagttggtctcgcccagccgggtcctgggcgcggcggcggcagccgcgtcactggcgggcgggatccctccgctctggggaggcagcgctggcggcggggctggggccactgaggaaatccatccgcgccgccgccgccgccgccgccgccgccgccgccgcctccgccgcggaggaagacagcgccgcccgcgcaccgccagcgacctccgccgcagagtcccaccgccacaggcctcgggccagcggccaggagctgcctcccccagcccccgtcccgcggcccccagccgcccccaaccctgccccacgggcccggcgccatgagtgagctggagcaactgagacaggaggccgagcagctccggaaccagatccgggatgcccgaaaagcatgtggggactcaacactgacccagatcacagctgggctggacccagtggggagaatccagatgaggacccggaggaccctccgtgggcacctggcaaagatctatgccatgcactgggggaccgactcaaggctgctggtcagcgcctcccaggatgggaagctcatcatctgggacagctacaccaccaacaaggtccacgccatcccgctgcgctcctcctgggtaatgacctgtgcctacgcgccctcagggaactttgtggcctgtggggggttggacaacatctgctccatctacagcctcaagacccgcgagggcaacgtcagggtcagccgggagctgcctggccacactgggtacctgtcgtgttgccgcttcctggatgacaaccaaatcatcaccagctctggggataccacctgtgccctgtgggacattgagacaggccagcagacagtgggttttgctggacacagtggggatgtgatgtccctgtccctggcccccgatggccgcacgtttgtgtcaggcgcctgtgatgcctctatcaagctgtgggacgtgcgggattccatgtgccgacagaccttcatcggccatgaatccgacatcaatgcagtggctttcttccccaacggctacgccttcaccaccggctctgacgacgccacgtgccgcctcttcgacctgcgggccctgcccatgcccacactacaggccagggctgcggggctggcgcaatcccagcccccttccccgggccacggggccttgggtccctgccctcccacccaggtttggttcctcccggggcccccactgtggagataagaaggggatggaatgggggaagaggaggagcaggaggccctcatccttctgctgccctggggttggggcctcacccctctggagggccggaggcaggaggtggaaaccccaggggctggcttttttaaaactggttttattttaatttttattatattttcagtttttccataaaggagccaattccaactctgta

SEQ ID NO: 405913 - DNA, 1002 bp, Homo sapiens
ccagaggggggatgtcttactcctttccgtgaagcaaaccctttgagtacggtttgcgtccacaaagcgtagggtgagaaccttgggagcgactgggcccgtctttgctccctcggtggggttttgtctcctggcttcccccaagtgcgaggcagttggtctcgcccagccgggtcctgggcgcggcggcggcagccgcgtcactggcgggcgggatccctccgctctggggaggcagcgctggcggcggggctggggccactgaggaaatccatccgcgccgccgccgccgccgccgccgccgccgccgccgcctccgccgcggaggaagacagcgccgcccgcgcaccgccagcgacctccgccgcagagtcccaccgccacaggcctcgggccagcggccaggagctgcctcccccagcccccgtcccgcggcccccagccgcccccaaccctgccccacgggcccggcgccatgagtgagctggagcaactgagacaggaggccgagcagctccggaaccagatccgggatgcccgaaaagcatgtggggactcaacactgacccagatcacagctgggctggacccagtggggagaatccagatgaggacccggaggaccctccgtgggcacctggcaaagatctatgccatgcactgggggaccgactcaaggctgctggtcagcgcctcccaggatgggaagctcatcatctgggacagctacaccaccaacaaggtccacgccatcccgctgcgctcctcctgggtaatgacctgtgcctacgcgccctcagggaactttgtggcctgtggggggttggacaacatctgctccatctacagcctcaagacccgcgagggcaacgtcagggtcagccgggagctgcctggccacactgggtacctgtcgtgttgccgcttcctggatgacaaccaaatcatcaccagctctggggataccacctgtgccgggatcctctagaacgccgcagcact

SEQ ID NO: 405914 - DNA, 711 bp, Homo sapiens
tggcgcgggctgcggggtggggcagggccacagggccctggctggctctgaccccggcgcttcccctgctccgcaggtccacgccatcccgctgcgctcctcctgggtaatgacctgtgcctacgcgccctcagggaactttgtggcctgtggggggttggacaacatctgctccatctacagcctcaagacccgcgagggcaacgtcagggtcagccgggagctgcctggccacactggtgaggggcctggcccagttcgggccctttttggggttggggggtgcactgccctccgtgtggagacctggctgaccagctccttccccagggtacctgtcgtgttgccgcttcctggatgacaaccaaatcatcaccagctctggggataccacctggtgaggctctgccagggctgggcagtctgggcaaacccacacttcctgcctcaggggccaccgtcccagtgctcaacatgcagcatgcaccgtagcctccctctcctggtgggcgctaagggggtcagggagggatgcgtcccctccccacctaaggctctgagaagagcctccctggacccttccacagggttgggctcacgtggtggggcggggagaacagggactctgttcttcgccctgtctcttatcttttctttcttcctgtcacctctccagtgccctgtgggacattgagacaggccagcagacag

SEQ ID NO: 405915 - DNA, 381 bp, Homo sapiens
gcggccgcctactactactactgctcgaattcaagcttctaacgatgtacctgcccatgcccacactacaggccagggctgcggggctggcgcaatcccagcccccttccccgggccacggggccttgggtccctgccctcccacccaggtttggttcctcccggggcccccactgtggagataagaaggggatggaatgggggaagaggaggagcaggaggccctcatccttctgctgccctggggttggggcctcacccctctggagggccggaggcaggaggtggaaaccccaggggctggcttttttaaaactggttttattttaatttttattatattttcagtttttccataaaggagccaattccaactctgta

SEQ ID NO: 405916 - DNA, 290 bp, Homo sapiens
  misc_feature (23)..(23): n is a, c, g, or t
gtgaccctagaggatactctgtnattcaagcaggtgccgacagaccttcatcggccatgaatccgacatcaatgcagtggctttcttccccaacggctacgccttcaccaccggctctgacgacgccacgtgccgcctcttcgacctgcgggccgatcaggagctcctcatgtactcccatgacaacatcatctgtggcatcacctctgttgccttctcgcgcagcggacggctgctgctcgctggctacgacgactgcttggattacaagggagggtacccgcgctcga

SEQ ID NO: 405917 - DNA, 1564 bp, Homo sapiens
ccccttccgggccgcgctgcaaccccgcctttctccccacttccccggcggcctcgggcctgacgtcagccctgcatcccccaggcctcgggccagcggccaggagctgcctcccccagcccccgtcccgcggcccccagccgcccccaaccctgccccacgggcccggcgccatgagtgagctggagcaactgagacaggaggccgagcagctccggaaccagatccgggatgcccgaaaagcatgtggggactcaacactgacccagatcacagctgggctggacccagtggggagaatccagatgaggacccggaggaccctccgtgggcacctggcaaagatctatgccatgcactgggggaccgactcaaggctgctggtcagcgcctcccaggatgggaagctcatcatctgggacagctacaccaccaacaaggtccacgccatcccgctgcgctcctcctgggtaatgacctgtgcctacgcgccctcagggaactttgtggcctgtggggggttggacaacatctgctccatctacagcctcaagacccgcgagggcaacgtcagggtcagccgggagctgcctggccacactgggtacctgtcgtgttgccgcttcctggatgacaaccaaatcatcaccagctctggggataccacctgtgccctgtgggacattgagacaggccagcagacagtgggttttgctggacacagtggggatgtgatgtccctgtccctggcccccgatggccgcacgtttgtgtcaggcgcctgtgatgcctctatcaagctgtgggacgtgcgggattccatgtgccgacagaccttcatcggccatgaatccgacatcaatgcagtggctttcttccccaacggctacgccttcaccaccggctctgacgacgccacgtgccgcctcttcgacctgcgggccgatcaggagctcctcatgtactcccatgacaacatcatctgtggcatcacctctgttgccttctcgcgcagcggacggctgctgctcgctggctacgacgacttcaactgcaacatctgggatgccatgaagggcgaccgtgcaggagtcctcgctggccacgacaaccgcgtgagctgcctcggggtcaccgacgatggcatggctgtggccacgggctcctgggactccttcctcaagatctggaactaatggccccacccccactgggcccaggccaggaggggccctgcccatgcccacactacaggccagggctgcggggctggcgcaatcccagcccccttccccgggccacggggccttgggtccctgccctcccacccaggtttggttcctcccggggcccccactgtggagataagaaggggatggaatgggggaagaggaggagcaggaggccctcatccttctgctgccctggggttggggcctcacccctctggagggccggaggcaggaggtggaaaccccaggggctggcttttttaaaactggttttattttaatttttattatattttcagtttttccataaaggagccaattccaactctgta

SEQ ID NO: 405918 - DNA, 1328 bp, Homo sapiens
  misc_feature (25)..(26): n is a, c, g, or t
actccagaggatccacggccgcatnngacccagatcacagctgggctggacccagtggggagaatccagatgaggacccggaggaccctccgtgggcacctggcaaagatctatgccatgcactgggggaccgactcaaggctgctggtcagcgcctcccaggatgggaagctcatcatctgggacagctacaccaccaacaaggtccacgccatcccgctgcgctcctcctgggtaatgacctgtgcctacgcgccctcagggaactttgtggcctgtggggggttggacaacatctgctccatctacagcctcaagacccgcgagggcaacgtcagggtcagccgggagctgcctggccacactgggtacctgtcgtgttgccgcttcctggatgacaaccaaatcatcaccagctctggggataccacctgtgccctgtgggacattgagacaggccagcagacagtgggttttgctggacacagtggggatgtgatgtccctgtccctggcccccgatggccgcacgtttgtgtcaggcgcctgtgatgcctctatcaagctgtgggacgtgcgggattccatgtgccgacagaccttcatcggccatgaatccgacatcaatgcagtggctttcttccccaacggctacgccttcaccaccggctctgacgacgccacgtgccgcctcttcgacctgcgggccgatcaggagctcctcatgtactcccatgacaacatcatctgtggcatcacctctgttgccttctcgcgcagcggacggctgctgctcgctggctacgacgacttcaactgcaacatctgggatgccatgaagggcgaccgtgcaggagtcctcgctggccacgacaaccgcgtgagctgcctcggggtcaccgacgatggcatggctgtggccacgggctcctgggactccttcctcaagatctggaactaatggccccacccccactgggcccaggccaggaggggccctgcccatgcccacactacaggccagggctgcggggctggcgcaatcccagcccccttccccgggccacggggccttgggtccctgccctcccacccaggtttggttcctcccggggcccccactgtggagataagaaggggatggaatgggggaagaggaggagcaggaggccctcatccttctgctgccctggggttggggcctcacccctctggagggccggaggcaggaggtggaaaccccaggggctggcttttttaaaactggttttattttaatttttattatattttcagtttttccataaaggagccaattccaactctgta

SEQ ID NO: 405919 - DNA, 2091 bp, Homo sapiens
ccagaggggggatgtcttactcctttccgtgaagcaaaccctttgagtacggtttgcgtccacaaagcgtagggtgagaaccttgggagcgactgggcccgtctttgctccctcggtggggttttgtctcctggcttcccccaagtgcgaggcagttggtctcgcccagccgggtcctgggcgcggcggcggcagccgcgtcactggcgggcgggatccctccgctctggggaggcagcgctggcggcggggctggggccactgaggaaatccatccgcgccgccgccgccgccgccgccgccgccgccgccgcctccgccgcggaggaagacagcgccgcccgcgcaccgccagcgacctccgccgcagagtcccaccgccacaggcctcgggccagcggccaggagctgcctcccccagcccccgtcccgcggcccccagccgcccccaaccctgccccacgggcccggcgccatgagtgagctggagcaactgagacaggaggccgagcagctccggaaccagatccgggatgcccgaaaagcatgtggggactcaacactgacccagatcacagctgggctggacccagtggggagaatccagatgaggacccggaggaccctccgtgggcacctggcaaagatctatgccatgcactgggggaccgactcaaggctgctggtcagcgcctcccaggatgggaagctcatcatctgggacagctacaccaccaacaaggtccacgccatcccgctgcgctcctcctgggtaatgacctgtgcctacgcgccctcagggaactttgtggcctgtggggggttggacaacatctgctccatctacagcctcaagacccgcgagggcaacgtcagggtcagccgggagctgcctggccacactgggtacctgtcgtgttgccgcttcctggatgacaaccaaatcatcaccagctctggggataccacctgtgccctgtgggacattgagacaggccagcagacagtgggttttgctggacacagtggggatgtgatgtccctgtccctggcccccgatggccgcacgtttgtgtcaggcgcctgtgatgcctctatcaagctgtgggacgtgcgggattccatgtgccgacagaccttcatcggccatgaatccgacatcaatgcagtggctttcttccccaacggctacgccttcaccaccggctctgacgacgccacgtgccgcctcttcgacctgcgggccgatcaggagctcctcatgtactcccatgacaacatcatctgtggcatcacctctgttgccttctcgcgcagcggacggctgctgctcgctggctacgacgacttcaactgcaacatctgggatgccatgaagggcgaccgtgcaggagtcctcgctggccacgacaaccgcgtgagctgcctcggggtcaccgacgatggcatggctgtggccacgggctcctgggactccttcctcaagatctggaactaatggccccacccccactgggcccaggccaggaggggccctgcccatgcccacactacaggccagggctgcggggctggcgcaatcccagcccccttccccgggccacggggccttgggtccctgccctcccacccaggtttggttcctcccggggcccccactgtggagataagaaggggatggaatgggggaagaggaggagcaggaggccctcatccttctgctgccctggggttggggcctcacccctctggagggccggaggcaggaggtggaaaccccaggggctggcttttttaaaactggttttattttaatttttattatattttcagtttttccataaaggagccaattccaactctgtaaaaaacacacaaaaaaaacaaaaacaaacaacaaaaaaaaaaaaaacaaaaaaaaaaaaaaaaagaaaaaaaaaattggggggcattattatggggggtgcggggaaaagggggtatttagattgggccttgggtcattaggttggttccttggacccagttttttttggtccaaggggcgaagatcggcggggtcccccttataggggggccgaataaatgtcg

SEQ ID NO: 405920 - DNA, 1957 bp, Homo sapiens
ccagaggggggatgtcttactcctttccgtgaagcaaaccctttgagtacggtttgcgtccacaaagcgtagggtgagaaccttgggagcgactgggcccgtctttgctccctcggtggggttttgtctcctggcttcccccaagtgcgaggcagttggtctcgcccagccgggtcctgggcgcggcggcggcagccgcgtcactggcgggcgggatccctccgctctggggaggcagcgctggcggcggggctggggccactgaggaaatccatccgcgccgccgccgccgccgccgccgccgccgccgccgcctccgccgcggaggaagacagcgccgcccgcgcaccgccagcgacctccgccgcagagtcccaccgccacaggcctcgggccagcggccaggagctgcctcccccagcccccgtcccgcggcccccagccgcccccaaccctgccccacgggcccggcgccatgagtgagctggagcaactgagacaggaggccgagcagctccggaaccagatccgggatgcccgaaaagcatgtggggactcaacactgacccagatcacagctgggctggacccagtggggagaatccagatgaggacccggaggaccctccgtgggcacctggcaaagatctatgccatgcactgggggaccgactcaaggctgctggtcagcgcctcccaggatgggaagctcatcatctgggacagctacaccaccaacaaggtccacgccatcccgctgcgctcctcctgggtaatgacctgtgcctacgcgccctcagggaactttgtggcctgtggggggttggacaacatctgctccatctacagcctcaagacccgcgagggcaacgtcagggtcagccgggagctgcctggccacactggtgaggggcctggcccagttcgggccctttttggggttggggggtgcactgccctccgtgtggagacctggctgaccagctccttccccagggtacctgtcgtgttgccgcttcctggatgacaaccaaatcatcaccagctctggggataccacctgtgccctgtgggacattgagacaggccagcagacagtgggttttgctggacacagtggggatgtgatgtccctgtccctggcccccgatggccgcacgtttgtgtcaggcgcctgtgatgcctctatcaagctgtgggacgtgcgggattccatgtgccgacagaccttcatcggccatgaatccgacatcaatgcagtggctttcttccccaacggctacgccttcaccaccggctctgacgacgccacgtgccgcctcttcgacctgcgggccgatcaggagctcctcatgtactcccatgacaacatcatctgtggcatcacctctgttgccttctcgcgcagcggacggctgctgctcgctggctacgacgacttcaactgcaacatctgggatgccatgaagggcgaccgtgcaggagtcctcgctggccacgacaaccgcgtgagctgcctcggggtcaccgacgatggcatggctgtggccacgggctcctgggactccttcctcaagatctggaactaatggccccacccccactgggcccaggccaggaggggccctgcccatgcccacactacaggccagggctgcggggctggcgcaatcccagcccccttccccgggccacggggccttgggtccctgccctcccacccaggtttggttcctcccggggcccccactgtggagataagaaggggatggaatgggggaagaggaggagcaggaggccctcatccttctgctgccctggggttggggcctcacccctctggagggccggaggcaggaggtggaaaccccaggggctggcttttttaaaactggttttattttaatttttattatattttcagtttttccataaaggagccaattccaactctgta

SEQ ID NO: 405921 - DNA, 1857 bp, Homo sapiens
ccagaggggggatgtcttactcctttccgtgaagcaaaccctttgagtacggtttgcgtccacaaagcgtagggtgagaaccttgggagcgactgggcccgtctttgctccctcggtggggttttgtctcctggcttcccccaagtgcgaggcagttggtctcgcccagccgggtcctgggcgcggcggcggcagccgcgtcactggcgggcgggatccctccgctctggggaggcagcgctggcggcggggctggggccactgaggaaatccatccgcgccgccgccgccgccgccgccgccgccgccgccgcctccgccgcggaggaagacagcgccgcccgcgcaccgccagcgacctccgccgcagagtcccaccgccacaggcctcgggccagcggccaggagctgcctcccccagcccccgtcccgcggcccccagccgcccccaaccctgccccacgggcccggcgccatgagtgagctggagcaactgagacaggaggccgagcagctccggaaccagatccgggatgcccgaaaagcatgtggggactcaacactgacccagatcacagctgggctggacccagtggggagaatccagatgaggacccggaggaccctccgtgggcacctggcaaagatctatgccatgcactgggggaccgactcaaggctgctggtcagcgcctcccaggatgggaagctcatcatctgggacagctacaccaccaacaaggtccacgccatcccgctgcgctcctcctgggtaatgacctgtgcctacgcgccctcagggaactttgtggcctgtggggggttggacaacatctgctccatctacagcctcaagacccgcgagggcaacgtcagggtcagccgggagctgcctggccacactgggtacctgtcgtgttgccgcttcctggatgacaaccaaatcatcaccagctctggggataccacctgtgccctgtgggacattgagacaggccagcagacagtgggttttgctggacacagtggggatgtgatgtccctgtccctggcccccgatggccgcacgtttgtgtcaggcgcctgtgatgcctctatcaagctgtgggacgtgcgggattccatgtgccgacagaccttcatcggccatgaatccgacatcaatgcagtggctttcttccccaacggctacgccttcaccaccggctctgacgacgccacgtgccgcctcttcgacctgcgggccgatcaggagctcctcatgtactcccatgacaacatcatctgtggcatcacctctgttgccttctcgcgcagcggacggctgctgctcgctggctacgacgacttcaactgcaacatctgggatgccatgaagggcgaccgtgcaggagtcctcgctggccacgacaaccgcgtgagctgcctcggggtcaccgacgatggcatggctgtggccacgggctcctgggactccttcctcaagatctggaactaatggccccacccccactgggcccaggccaggaggggccctgcccatgcccacactacaggccagggctgcggggctggcgcaatcccagcccccttccccgggccacggggccttgggtccctgccctcccacccaggtttggttcctcccggggcccccactgtggagataagaaggggatggaatgggggaagaggaggagcaggaggccctcatccttctgctgccctggggttggggcctcacccctctggagggccggaggcaggaggtggaaaccccaggggctggcttttttaaaactggttttattttaatttttattatatttttaaataaagtttcctttgttgtaaaaa

SEQ ID NO: 405922 - DNA, 1607 bp, Homo sapiens
ccagaggggggatgtcttactcctttccgtgaagcaaaccctttgagtacggtttgcgtccacaaagcgtagggtgagaaccttgggagcgactgggcccgtctttgctccctcggtggggttttgtctcctggcttcccccaagtgcgaggcagttggtctcgcccagccgggtcctgggcgcggcggcggcagccgcgtcactggcgggcgggatccctccgctctggggaggcagcgctggcggcggggctggggccactgaggaaatccatccgcgccgccgccgccgccgccgccgccgccgccgccgcctccgccgcggaggaagacagcgccgcccgcgcaccgccagcgacctccgccgcagagtcccaccgccacaggcctcgggccagcggccaggagctgcctcccccagcccccgtcccgcggcccccagccgcccccaaccctgccccacgggcccggcgccatgagtgagctggagcaactgagacaggaggccgagcagctccggaaccagatccgggatgcccgaaaagcatgtggggactcaacactgacccagatcacagctgggctggacccagtggggagaatccagatgaggacccggaggaccctccgtgggcacctggcaaagatctatgccatgcactgggggaccgactcaaggctgctggtcagcgcctcccaggatgggaagctcatcatctgggacagctacaccaccaacaaggtccacgccatcccgctgcgctcctcctgggtaatgacctgtgcctacgcgccctcagggaactttgtggcctgtggggggttggacaacatctgctccatctacagcctcaagacccgcgagggcaacgtcagggtcagccgggagctgcctggccacactgggtacctgtcgtgttgccgcttcctggatgacaaccaaatcatcaccagctctggggataccacctgtgccctgtgggacattgagacaggccagcagacagtgggttttgctggacacagtggggatgtgatgtccctgtccctggcccccgatggccgcacgtttgtgtcaggcgcctgtgatgcctctatcaagctgtgggacgtgcgggattccatgtgccgacagaccttcatcggccatgaatccgacatcaatgcagtggcttcaccgacgatggcatggctgtggccacgggctcctgggactccttcctcaagatctggaactaatggccccacccccactgggcccaggccaggaggggccctgcccatgcccacactacaggccagggctgcggggctggcgcaatcccagcccccttccccgggccacggggccttgggtccctgccctcccacccaggtttggttcctcccggggcccccactgtggagataagaaggggatggaatgggggaagaggaggagcaggaggccctcatccttctgctgccctggggttggggcctcacccctctggagggccggaggcaggaggtggaaaccccaggggctggcttttttaaaactggttttattttaatttttattatattttcagtttttccataaaggagccaattccaactctgta

SEQ ID NO: 405923 - DNA, 1088 bp, Homo sapiens
ccagaggggggatgtcttactcctttccgtgaagcaaaccctttgagtacggtttgcgtccacaaagcgtagggtgagaaccttgggagcgactgggcccgtctttgctccctcggtggggttttgtctcctggcttcccccaagtgcgaggcagttggtctcgcccagccgggtcctgggcgcggcggcggcagccgcgtcactggcgggcgggatccctccgctctggggaggcagcgctggcggcggggctggggccactgaggaaatccatccgcgccgccgccgccgccgccgccgccgccgccgccgcctccgccgcggaggaagacagcgccgcccgcgcaccgccagcgacctccgccgcagagtcccaccgccacaggcctcgggccagcggccaggagctgcctcccccagcccccgtcccgcggcccccagccgcccccaaccctgccccacgggcccggcgccatgagtgagctggagcaactgagacaggaggccgagcagctccggaaccagatccgggatgcccgaaaagcatgtggggactcaacactgacccagatcacagctgggctggacccagtggggagaatccagatgaggacccggaggaccctccgtgggcacctggcaaagatctatgccatgcactgggggaccgactcaaggctgctggtcagcgcctcccaggatgggaagctcatcatctgggacagctacaccaccaacaaggtccacgccatcccgctgcgctcctcctgggtaatgacctgtgcctacgcgccctcagggaactttgtggcctgtggggggttggacaacatctgctccatctacagcctcaagacccgcgagggcaacgtcagggtcagccgggagctgcctggccacactgggtacctgtcgtgttgccgcttcctggatgacaaccaaatcatcaccagctctggggataccacctgtgccctgtgggacattgagacaggccagcagacagtgggttttgctggacacagtggggatgtgatacaggcgcctgacacaaacgtgcggccatcgggggccagggacgtcgacg

SEQ ID NO: 405924 - DNA, 994 bp, Homo sapiens
ccagaggggggatgtcttactcctttccgtgaagcaaaccctttgagtacggtttgcgtccacaaagcgtagggtgagaaccttgggagcgactgggcccgtctttgctccctcggtggggttttgtctcctggcttcccccaagtgcgaggcagttggtctcgcccagccgggtcctgggcgcggcggcggcagccgcgtcactggcgggcgggatccctccgctctggggaggcagcgctggcggcggggctggggccactgaggaaatccatccgcgccgccgccgccgccgccgccgccgccgccgccgcctccgccgcggaggaagacagcgccgcccgcgcaccgccagcgacctccgccgcagagtcccaccgccacaggcctcgggccagcggccaggagctgcctcccccagcccccgtcccgcggcccccagccgcccccaaccctgccccacgggcccggcgccatgagtgagctggagcaactgagacaggaggccgagcagctccggaaccagatccgggatgcccgaaaagcatgtggggactcaacactgacccagatcacagctgggctggacccagtggggagaatccagatgaggacccggaggaccctccgtgggcacctggcaaagatctatgccatgcactgggggaccgactcaaggctgctggtcagcgcctcccaggatgggaagctcatcatctgggacagctacaccaccaacaaggtccacgccatcccgctgcgctcctcctgggtaatgacctgtgcctacgcgccctcagggaactttgtggcctgtggggggttggacaacatctgctccatctacagcctcaagacccgcgagggcaacgtcagggtcagccgggagctgcctggccacactgggtacctgtcgtgttgccgcttcctggatgacaaccaaatcatcaccagctctggggataccacctgcgccacacaaagagccggtacc

SEQ ID NO: 405925 - DNA, 601 bp, Homo sapiens
ataactgctaacgtttatttaatgttcactgtgtgccaggcactatcctaaatactttaataggtatcattaaatgaggtaggtcttacaattaagtgtattttactgatgaggaaacgtgaacagagaaattaattaccttgcccaaggaaaagtagctttttatgcagcagggccaaaatccttgtttctttccttctgttccagctccttcatgaccaagtaggggtaatccagtttggcccctacaagcaactgttcctacagacatacgcccgaggccgcacaacctatcaggctctgccctgcctaccctccatgtatggctatcctaatcgcaactggtaaggcccttttctctttgctttcatctgttccaagttgtggtcgatatttcagatggtagcctcagtgacatagtcagaattctctcagagctagggtttcccagtagaaaaagatctttggtttgttactctatggggttggtttacacctgctgtcatcctcttccccagctactttaacaggagacaggagggtagctatgaggatgtttgccagaaaaggaaattgggtcctagttgcctactgactatcc

SEQ ID NO: 405926 - DNA, 423 bp, Homo sapiens
  misc_feature (69)..(69): n is a, c, g, or t
  misc_feature (76)..(76): n is a, c, g, or t
  misc_feature (89)..(89): n is a, c, g, or t
caggtagttgcgtttcttctcaggtagttgcgtttcttctgagatcataccacttcattccagcctggntgacagngcaagactctgtntcaaaaaaaaaaaaaggaaaactctgtgatggacatttgtttagtaaatcccttcagtatttatccctcctttccccacagcagctttctttcctgtcaactagaaaggagcaggatgtaataaatacattttggtgtgactaggccacaccaactcttaatcatctcccattttccttagacatttaaatttcaaggcaggtaccctctgtgtactcagaaatttgaagaagttatttggttttccaaaatgcacactgcgggttattgatttgttctttacaactattgttctcatatttctcacactaaataaatctctatgagagcttct

SEQ ID NO: 405927 - DNA, 411 bp, Homo sapiens
gaaaaacaacaccaaccagttgtcttgaacaacctgactccagccagccctacggaagttccttttatgcattggaggaaaaaaaaaaaaaaggaaaactctgtgatggacatttgtttagtaaatcccttcagtatttatccctcctttccccacagcagctttctttcctgtcaactagaaaggagcaggatgtaataaatacattttggtgtgactaggccacaccaactcttaatcatctcccattttccttagacatttaaatttcaaggcaggtaccctctgtgtactcagaaatttgaagaagttatttggttttccaaaatgcacactgcgggttattgatttgttctttacaactattgttctcatatttctcacactaaataaatctctatgagagcttct

SEQ ID NO: 405928 - DNA, 609 bp, Homo sapiens
cccgagtaggtgggactacaggcgtgcaccatgattcccagctaattttttttgtatttttagtagagacagggtttcaccatgttggccaggatggtctcgagctcttgacctcgggatccgcctgccttggcctcccaaagtgctgggattacagatgtgagccaccgcacccagccgattttcaatggaattagactaaaagctaggagtaattgaaagtataggaagttcttcaggaaatctatatagatgcagatgctttgcagagtccttggttttgagtcacattgtccttcaacctgttaacacgaccctggggattctttagattgctctggaagcagccaaagcactggatgacaagaactgctgggaaaagctgggagaagtggccctgctgcaggggaaccaccagattgtggaaatgtgctatcagcgtaccaaaaactttgacaaactttccttcctgtatcttatcactggcaacttagaaaaacttcgcaagatgatgaagattggtgaggccctcaaactaaggatgggaagaggggttcttgggggaaggaggaaggtgaattaaggagaaagagaacttaagagaaaaga

SEQ ID NO: 405929 - DNA, 589 bp, Homo sapiens
ctatgtaggaattacattaagtattttatgtaattagaattacattaagaaattggggtttacattaattagagggtgcaattgatgtagatcaaagcctgagacaagggaaatagatccattcatgtttgcacatctctatctatctcaggactctggcatctgtgaagatttctaaagtgaaatacgttatctggtcagcagacatgtcacatgtagcactactagccaaacacgccattgtgatctgtaaccgcaaactggatgctttatgtaacattcatgagaacattcgtgtcaagagtggggcctgggatgagagtggggtatttatctataccacaagcaaccacatcaaatatgctgtcaccactgggtaagttaattatctgggatacagaatgggagaagacagcttcctgaaatcactgtcttgtcttgagatgtaactgaagtcctccatgaattttcttcatggaaaagccttacctggcatatatgtgcaaggggcatcagaacattcttttttcaacttttttaaaattgagaaatctaaaacaaatatagacaattacattaaaaaaaaata

SEQ ID NO: 405930 - DNA, 576 bp, Homo sapiens
tcatttctttctttctttcgtggtgggtttctttctttctttctttgctttctttctttctctttctttcttttttctttctttctctttctttttttctttctttctctctctttctttctttttctttcttctttctttctttccttcagacagagtgagactccatctcaaaaaaaaagaaagaaaaaaagaagcacatgtttttcatagggtatatatgaggacctaaactgctgtgaaaatgatagaaagcaagtagctcccttattctgtttttgattgcagccttttatcttttgctaattatagcaatatttattgagcacctgccatgtgactgtcactgttctagatattttacatgtaatatacagataaaagaatagtactttatatatattacaatgatacaatgattacattaacaatacaatattttgcttgtcatatgctaagaataattgggtagagtgacattactgtgccttcgattaaaataagtacttttttgcgtgttaaattcatgttttcaataaataataaatgcatatagttgaaaaatcagtaaatata

SEQ ID NO: 405931 - DNA, 478 bp, Homo sapiens
ggtacctgcagctctctctgatgtaataactctcagcttccagttgatcacatcctggcaggctctttcgaaacagccatgcggctccttcatgaccaagtaggggtaatccagtttggcccctacaagcaactgttcctacagacatacgcccgaggccgcacaacctatcaggctctgccctgcctaccctccatgtatggctatcctaatcgcaactggtaaggcccttttctctttgctttcatctgttccaagttgtggtcgatatttcagatggtagcctcagtgacatagtcagaattctctcagagctagggtttcccagtagaaaaagatctttggtttgttactctatggggttggtttacacctgctgtcatcctcttccccagctactttaacaggagacaggagggtagctatgaggatgtttgccagaaaaggaaattgggtcctagttgcctactgactatcc

SEQ ID NO: 405932 - DNA, 578 bp, Homo sapiens
gtgttaaccctacctaccttctgttgaataatttgacttctactatggcttactttttaaaactgtttgttcaaagctgagctagggaagttgccaagccttaaaggaagagaatacaatatttattcattttattcctgattataaaagtgatgagtatatagtgtaaagattggataagtaggaggtgtgggggtgattcctttcttccttctattcttatgcctcttccctgttttctcctttttctatatatatctctagtggttccaagtttccagtattcaatatgtcatacaatccagcagaaaatgcagtcctgctttgtacaagagctagcaatctagagaatagtacctatgacctgtacaccatccctaaagatgctgactcccagaatcctgatggtaagtgttctttttgtctaccccactctgcttccagctctcctcacccgcatcataactcctcttcaagtttttcacattccatccccaagccatggccacatcactcatgtctgttggcaggtgctgctgacaattgcatcagaggcgaccatggtgtgaaatattcat

SEQ ID NO: 405933 - DNA, 366 bp, Homo sapiens
ggatcgacatagtttttaccttgcaaacttcttaaaataatcttggagctccttcaagaccagactgagatttctgcattaagttataaaagttttcgggcgggcgcagtgggtcacacctgtaatctcagcactttgggagaccgaggccagaggattacttgaggccaggagtttgaaaccagcctaggcaacatagcaagaccttgtctctaccaaaaaaaaaaaaaaaaaaaattagctgggcgtggtggtgctcacttgtagtcctttgggaggccgaggtaggagaatcacttgatcctggaagtttgagacttcagggagcaattaatatgattgcaccactacactccagcctggatg

SEQ ID NO: 405934 - DNA, 5021 bp, Homo sapiens
gagaaggggaccttcaggtccaggcaaagggggaacttctgtcgtgggaacgaaaaagaaagaggatttacagggtggggggacagaggggcagcaggaaccagaagggagacagtggcggtcgcaccggggccgatccgagagttccccttagagaacggagctcacgggcggggaggcctcacctgctagtaggacgcagaaagacagaaggcgaaggagaccccctgccgtagccatcttgcctctctgctgagcggaagcccccgttcggctcctgtctgttagcggcctctctaggctaccactgacaccgtctctgtggcccggagcctaagagaccggaagttcgtgtttccaggcgcttccggaaaccgcgggagagggtcgctgacgtggaggcgtccgaagggcagcagggtgtgtcggggctcggattaagacatcggagtcggagacctgagagatgttaaccaaattcgagaccaagagcgcgcgggtcaaagggctcagctttcaccccaaaagaccttggatcctgactagtttacataatggggtcatccagttatgggactatcggatgtgcactctcattgacaagtttgatgaacatgatggtccagtgcgaggcattgacttccataagcagcagccactgttcgtctctggaggagatgactataagattaaggtttggaattacaagcttcggcgctgtcttttcacattgcttgggcacttagattatattcgcaccacgttttttcatcatgaatatccctggattctgagtgcctccgatgatcagaccatccgagtgtggaactggcaatctagaacctgtgtttgtgtgttaacagggcacaaccattatgtgatgtgtgctcagttccaccccacagaagacttggtagtatcagccagcctggaccagactgtgcgcgtttgggatatttctggtctgaggaaaaaaaacctgtcccctggtgcggtggaatcggatgtgagaggaataactggggttgatctatttggaactacagatgcagtggtgaagcatgtactagagggtcacgatcgtggagtaaactgggctgccttccaccccactatgccccttattgtatctggggcagatgatcgtcaagtgaagatctggcgcatgaatgaatcaaaggcatgggaggttgatacctgccggggccattacaacaatgtatcttgtgccgtcttccaccctcgccaagagttgatcctcagcaattctgaggacaagagtattcgagtctgggatatgtctaagcggactggggttcagactttccgcagagaccatgatcgtttctgggtcctagctgctcaccctaaccttaacctctttgcagcaggccatgatggtggtatgattgtgtttaagctggaacgggaacggccagcctatgctgttcatggcaatatgctacactatgtcaaggaccgattcttacgacagctggatttcaacagctccaaagatgtagctgtgatgcagttgcggagtggttccaagtttccagtattcaatatgtcatacaatccagcagaaaatgcagtcctgctttgtacaagagctagcaatctagagaatagtacctatgacctgtacaccatccctaaagatgctgactcccagaatcctgatgcgcctgaagggaaacgatcctcaggcctgacagccgtttgggtcgctcgaaatcggtttgctgtcctagatcggatgcattcgcttctgatcaagaatctgaagaatgagatcaccaaaaaggtacaggtgcccaactgtgatgagatcttctatgctggcacaggcaatctcctgcttcgagatgcggactctatcacactctttgacgtacagcagaagcggactctggcatctgtgaagatttctaaagtgaaatacgttatctggtcagcagacatgtcacatgtagcactactagccaaacacgccattgtgatctgtaaccgcaaactggatgctttatgtaacattcatgagaacattcgtgtcaagagtggggcctgggatgagagtggggtatttatctataccacaagcaaccacatcaaatatgctgtcaccactggggaccacgggatcattcgaactctggatttacccatctatgtcacacgggtgaagggcaacaatgtatactgcctagacagggagtgtcgtccccgggtactcaccattgatcccactgagttcaaattcaagctggccctgatcaacagaaaatatgatgaggtactgcacatggtgaggaatgccaaactagttggccagtctattattgcttatctccagaagaagggctatcctgaagtggcactgcattttgtcaaggatgagaaaactcgctttagtctggcactggagtgtggaaacattgagattgctctggaagcagccaaagcactggatgacaagaactgctgggaaaagctgggagaagtggccctgctgcaggggaaccaccagattgtggaaatgtgctatcagcgtaccaaaaactttgacaaactttccttcctgtatcttatcactggcaacttagaaaaacttcgcaagatgatgaagattgctgagatcagaaaggacatgagtggccactatcagaatgccctatacctgggtgatgtgtcagagcgtgtgcggatcctgaagaactgtggacagaagtccctggcctatctcacagctgctacccatggcttagatgaagaagctgagagcctaaaggagacatttgacccagagaaggagacaatcccagacattgaccctaatgccaagctgctccagccacctgcacctatcatgccattggataccaattggcctttattgactgtatccaaaggattttttgaaggcaccattgccagcaaagggaagggaggagcactggctgctgacattgacattgacactgttggtacagagggctggggagaggatgcagagctgcagttggatgaagatgggtttgtggaggctacagaaggtttgggggatgatgctcttggcaagggacaggaagaaggaggtggctgggatgtagaagaagatctggagctccctcctgagctggatatatcccctggggcagctggtggggctgaagatggtttctttgtgcccccaaccaagggaacaagtccaactcagatctggtgtaataactctcagcttccagttgatcacatcctggcaggctctttcgaaacagccatgcggctccttcatgaccaagtaggggtaatccagtttggcccctacaagcaactgttcctacagacatacgcccgaggccgcacaacctatcaggctctgccctgcctaccctccatgtatggctatcctaatcgcaactggaaggatgcagggctgaagaatggtgtaccagctgtgggcctgaagcttaatgacctcatccaacggttgcagctgtgctaccagctcaccacagttggcaaatttgaggaggctgtggaaaaattccgttccatccttctcagtgtgccacttcttgttgtggacaataaacaagagattgcagaggcccagcagctcatcaccatttgccgtgagtacattgtgggtttgtccgtggagacagaaaggaagaagctgcccaaagagactctagaacagcagaagcgcatctgtgagatggcagcctatttcacccactcaaacctgcagcctgtgcacatgatcctggtgctgcgtacagccctcaatctgttcttcaagctcaagaacttcaagacagctgccacctttgctcggcgcctactagaactcgggcccaagcctgaggtggcccaacagacccgaaaaatcctgtctgcctgtgagaagaatcccacagatgcctaccagctcaattatgacatgcacaacccctttgacatttgtgctgcatcatatcggcccatctaccgtggaaagccagtagaaaagtgtccactcagtggggcctgctattcccctgagttcaaaggtcaaatctgcagggtcaccacagtgacagagattggcaaagatgtgattggtttaaggatcagtcctctgcagtttcgctaaggccccctttgtgtgcatgggtcagtcaccatatgttccccccagagaatgtgtctatatcctccttctaacagcaccttccccctgcagctactcttcagatctggctctctgtaccctaaaacctagtatctttttctcttctatggaaaatccgaaggtctaaacttgacttttttgaggtcttctcaacttgactacagttgtgctcataattgtccttgcctttccagcttaattattttaaggaacaaatgaaaactctgggctgggtggagtggctcatacctgtaatcccagcactttgggaggctacggtgggcagatcatctgaggccaggagttcgagacctgcctggccaacatggcaacaccccgtctctaataaaaatataaaaattagcctggcatggtagcatgcgcctatagtcccagctgctcaggaggctgaggcatgagaatcgcttgaacctaggaggtggaggttgcattcaactgagatcataccacttcattccagcctgggtgacagagcaagactctgtctcaaaaaaaaaaaaaggaaaactctgtgatggacatttgtttagtaaatcccttcagtatttatccctcctttccccacagcagctttctttcctgtcaactagaaaggagcaggatgtaataaatacattttggtgtgactaggccacaccaactcttaatcatctcccattttccttagacatttaaatttcaaggcaggtaccctctgtgtactcagaaatttgaagaagttatttggttttccaaaatgcacactgcgggttattgatttgttctttacaactattgttctcatatttctcacactaaataaatctctatgagagcttct

SEQ ID NO: 405935 - DNA, 5158 bp, Homo sapiens
gagaaggggaccttcaggtccaggcaaagggggaacttctgtcgtgggaacgaaaaagaaagaggatttacagggtggggggacagaggggcagcaggaaccagaagggagacagtggcggtcgcaccggggccgatccgagagttccccttagagaacggagctcacgggcggggaggcctcacctgctagtaggacgcagaaagacagaaggcgaaggagaccccctgccgtagccatcttgcctctctgctgagcggaagcccccgttcggctcctgtctgttagcggcctctctaggctaccactgacaccgtctctgtggcccggagcctaagagaccggaagttcgtgtttccaggcgcttccggaaaccgcgggagagggtcgctgacgtggaggcgtccgaagggcagcagggtgtgtcggggctcggattaagacatcggagtcggagacctgagagatgttaaccaaattcgagaccaagagcgcgcgggtcaaagggctcagctttcaccccaaaagaccttggatcctgactagtttacataatggggtcatccagttatgggactatcggatgtgcactctcattgacaagtttgatgaacatgatggtccagtgcgaggcattgacttccataagcagcagccactgttcgtctctggaggagatgactataagattaaggtttggaattacaagcttcggcgctgtcttttcacattgcttgggcacttagattatattcgcaccacgttttttcatcatgaatatccctggattctgagtgcctccgatgatcagaccatccgagtgtggaactggcaatctagaacctgtgtttgtgtgttaacagggcacaaccattatgtgatgtgtgctcagttccaccccacagaagacttggtagtatcagccagcctggaccagactgtgcgcgtttgggatatttctggtctgaggaaaaaaaacctgtcccctggtgcggtggaatcggatgtgagaggaataactggggttgatctatttggaactacagatgcagtggtgaagcatgtactagagggtcacgatcgtggagtaaactgggctgccttccaccccactatgccccttattgtatctggggcagatgatcgtcaagtgaagatctggcgcatgaatgaatcaaaggcatgggaggttgatacctgccggggccattacaacaatgtatcttgtgccgtcttccaccctcgccaagagttgatcctcagcaattctgaggacaagagtattcgagtctgggatatgtctaagcggactggggttcagactttccgcagagaccatgatcgtttctgggtcctagctgctcaccctaaccttaacctctttgcagcaggccatgatggtggtatgattgtgtttaagctggaacgggaacggccagcctatgctgttcatggcaatatgctacactatgtcaaggaccgattcttacgacagctggatttcaacagctccaaagatgtagctgtgatgcagttgcggagtggttccaagtttccagtattcaatatgtcatacaatccagcagaaaatgcagtcctgctttgtacaagagctagcaatctagagaatagtacctatgacctgtacaccatccctaaagatgctgactcccagaatcctgatgcgcctgaagggaaacgatcctcaggcctgacagccgtttgggtcgctcgaaatcggtttgctgtcctagatcggatgcattcgcttctgatcaagaatctgaagaatgagatcaccaaaaaggtacaggtgcccaactgtgatgagatcttctatgctggcacaggcaatctcctgcttcgagatgcggactctatcacactctttgacgtacagcagaagcggactctggcatctgtgaagatttctaaagtgaaatacgttatctggtcagcagacatgtcacatgtagcactactagccaaacacgccattgtgatctgtaaccgcaaactggatgctttatgtaacattcatgagaacattcgtgtcaagagtggggcctgggatgagagtggggtatttatctataccacaagcaaccacatcaaatatgctgtcaccactggggaccacgggatcattcgaactctggatttacccatctatgtcacacgggtgaagggcaacaatgtatactgcctagacagggagtgtcgtccccgggtactcaccattgatcccactgagttcaaattcaagctggccctgatcaacagaaaatatgatgaggtactgcacatggtgaggaatgccaaactagttggccagtctattattgcttatctccagaagaagggctatcctgaagtggcactgcattttgtcaaggatgagaaaactcgctttagtctggcactggagtgtggaaacattgagattgctctggaagcagccaaagcactggatgacaagaactgctgggaaaagctgggagaagtggccctgctgcaggggaaccaccagattgtggaaatgtgctatcagcgtaccaaaaactttgacaaactttccttcctgtatcttatcactggcaacttagaaaaacttcgcaagatgatgaagattgctgagatcagaaaggacatgagtggccactatcagaatgccctatacctgggtgatgtgtcagagcgtgtgcggatcctgaagaactgtggacagaagtccctggcctatctcacagctgctacccatggcttagatgaagaagctgagagcctaaaggagacatttgacccagagaaggagacaatcccagacattgaccctaatgccaagctgctccagccacctgcacctatcatgccattggataccaattggcctttattgactgtatccaaaggattttttgaaggcaccattgccagcaaagggaagggaggagcactggctgctgacattgacattgacactgttggtacagagggctggggagaggatgcagagctgcagttggatgaagatgggtttgtggaggctacagaaggtttgggggatgatgctcttggcaagggacaggaagaaggaggtggctgggatgtagaagaagatctggagctccctcctgagctggatatatcccctggggcagctggtggggctgaagatggtttctttgtgcccccaaccaagggaacaagtccaactcagatctggtgtaataactctcagcttccagttgatcacatcctggcaggctctttcgaaacagccatgcggctccttcatgaccaagtaggggtaatccagtttggcccctacaagcaactgttcctacagacatacgcccgaggccgcacaacctatcaggctctgccctgcctaccctccatgtatggctatcctaatcgcaactggaaggatgcagggctgaagaatggtgtaccagctgtgggcctgaagcttaatgacctcatccaacggttgcagctgtgctaccagctcaccacagttggcaaatttgaggaggctgtggaaaaattccgttccatccttctcagtgtgccacttcttgttgtggacaataaacaagagattgcagaggcccagcagctcatcaccatttgccgtgagtacattgtgggtttgtccgtggagacagaaaggaagaagctgcccaaagagactctagaacagcagaagcgcatctgtgagatggcagcctatttcacccactcaaacctgcagcctgtgcacatgatcctggtgctgcgtacagccctcaatctgttcttcaagctcaagaacttcaagacagctgccacctttgctcggcgcctactagaactcgggcccaagcctgaggtggcccaacagacccgaaaaatcctgtctgcctgtgagaagaatcccacagatgcctaccagctcaattatgacatgcacaacccctttgacatttgtgctgcatcatatcggcccatctaccgtggaaagccagtagaaaagtgtccactcagtggggcctgctattcccctgagttcaaaggtcaaatctgcagggtcaccacagtgacagagattggcaaagatgtgattggtttaaggatcagtcctctgcagtttcgctaaggccccctttgtgtgcatgggtcagtcaccatatgttccccccagagaatgtgtctatatcctccttctaacagcaccttccccctgcagctactcttcagatctggctctctgtaccctaaaacctagtatctttttctcttctatggaaaatccgaaggtctaaacttgacttttttgaggtcttctcaacttgactacagttgtgctcataattgtccttgcctttccagcttaattattttaaggaacaaatgaaaactctgggctgggtggagtggctcatacctgtaatcccagcactttgggaggctacggtgggcagatcatctgaggccaggagttcgagacctgcctggccaacatggcaacaccccgtctctaataaaaatataaaaattagcctggcatggtagcatgcgcctatagtcccagctgctcaggaggctgaggcatgagaatcgcttgaacctaggaggtggaggttgcattcaactgagatcataccacttcattccagcctgggtgacagagcaagactctgtctcaaaaaaaaaaaaaggaaaactctgtgatggacatttgtttagtaaatcccttcagtatttatccctcctttccccacagcagctttctttcctgtcaactagaaaggagcaggatgtaataaatacattttggtgtgactaggccacaccaactcttaatcatctcccattttccttagacatttaaatttcaaggcaggtaccctctgtgtactcagaaatttgaagaagttatttggttttccaaaatgcacactgcgggttattgatttgttctttacaactattgttctcatatttctcacactaaataaatctctatgagagcttctaaaaaaaagcacacaaacaagaaaaacagaaaaagaaaaaaaacaacacaaacaaacaacacaaaagagggcgggcccaaaaaaccacagaggaggacaaaaaacagacccactttacaaagaggcccaaaagagaa

SEQ ID NO: 405936 - DNA, 5589 bp, Homo sapiens
gagaaggggaccttcaggtccaggcaaagggggaacttctgtcgtgggaacgaaaaagaaagaggatttacagggtggggggacagaggggcagcaggaaccagaagggagacagtggcggtcgcaccggggccgatccgagagttccccttagagaacggagctcacgggcggggaggcctcacctgctagtaggacgcagaaagacagaaggcgaaggagaccccctgccgtagccatcttgcctctctgctgagcggaagcccccgttcggctcctgtctgttagcggcctctctaggctaccactgacaccgtctctgtggcccggagcctaagagaccggaagttcgtgtttccaggcgcttccggaaaccgcgggagagggtcgctgacgtggaggcgtccgaagggcagcagggtgtgtcggggctcggattaagacatcggagtcggagacctgagagatgttaaccaaattcgagaccaagagcgcgcgggtcaaagggctcagctttcaccccaaaagaccttggatcctgactagtttacataatggggtcatccagttatgggactatcggatgtgcactctcattgacaagtttgatgaacatgatggtccagtgcgaggcattgacttccataagcagcagccactgttcgtctctggaggagatgactataagattaaggtttggaattacaagcttcggcgctgtcttttcacattgcttgggcacttagattatattcgcaccacgttttttcatcatgaatatccctggattctgagtgcctccgatgatcagaccatccgagtgtggaactggcaatctagaacctgtgtttgtgtgttaacagggcacaaccattatgtgatgtgtgctcagttccaccccacagaagacttggtagtatcagccagcctggaccagactgtgcgcgtttgggatatttctggtctgaggaaaaaaaacctgtcccctggtgcggtggaatcggatgtgagaggaataactggggttgatctatttggaactacagatgcagtggtgaagcatgtactagagggtcacgatcgtggagtaaactgggctgccttccaccccactatgccccttattgtatctggggcagatgatcgtcaagtgaagatctggcgcatgaatgaatcaaaggcatgggaggttgatacctgccggggccattacaacaatgtatcttgtgccgtcttccaccctcgccaagagttgatcctcagcaattctgaggacaagagtattcgagtctgggatatgtctaagcggactggggttcagactttccgcagagaccatgatcgtttctgggtcctagctgctcaccctaaccttaacctctttgcagcaggccatgatggtggtatgattgtgtttaagctggaacgggaacggccagcctatgctgttcatggcaatatgctacactatgtcaaggaccgattcttacgacagctggatttcaacagctccaaagatgtagctgtgatgcagttgcggagtggttccaagtttccagtattcaatatgtcatacaatccagcagaaaatgcagtcctgctttgtacaagagctagcaatctagagaatagtacctatgacctgtacaccatccctaaagatgctgactcccagaatcctgatgcgcctgaagggaaacgatcctcaggcctgacagccgtttgggtcgctcgaaatcggtttgctgtcctagatcggatgcattcgcttctgatcaagaatctgaagaatgagatcaccaaaaaggtacaggtgcccaactgtgatgagatcttctatgctggcacaggcaatctcctgcttcgagatgcggactctatcacactctttgacgtacagcagaagcggactctggcatctgtgaagatttctaaagtgaaatacgttatctggtcagcagacatgtcacatgtagcactactagccaaacacgccattgtgatctgtaaccgcaaactggatgctttatgtaacattcatgagaacattcgtgtcaagagtggggcctgggatgagagtggggtatttatctataccacaagcaaccacatcaaatatgctgtcaccactggggaccacgggatcattcgaactctggatttacccatctatgtcacacgggtgaagggcaacaatgtatactgcctagacagggagtgtcgtccccgggtactcaccattgatcccactgagttcaaattcaagctggccctgatcaacagaaaatatgatgaggtactgcacatggtgaggaatgccaaactagttggccagtctattattgcttatctccagaagaagggctatcctgaagtggcactgcattttgtcaaggatgagaaaactcgctttagtctggcactggagtgtggaaacattgagattgctctggaagcagccaaagcactggatgacaagaactgctgggaaaagctgggagaagtggccctgctgcaggggaaccaccagattgtggaaatgtgctatcagcgtaccaaaaactttgacaaactttccttcctgtatcttatcactggcaacttagaaaaacttcgcaagatgatgaagattgctgagatcagaaaggacatgagtggccactatcagaatgccctatacctgggtgatgtgtcagagcgtgtgcggatcctgaagaactgtggacagaagtccctggcctatctcacagctgctacccatggcttagatgaagaagctgagagcctaaaggagacatttgacccagagaaggagacaatcccagacattgaccctaatgccaagctgctccagccacctgcacctatcatgccattggataccaattggcctttattgactgtatccaaaggattttttgaaggcaccattgccagcaaagggaagggaggagcactggctgctgacattgacattgacactgttggtacagagggctggggagaggatgcagagctgcagttggatgaagatgggtttgtggaggctacagaaggtttgggggatgatgctcttggcaagggacaggaagaaggaggtggctgggatgtagaagaagatctggagctccctcctgagctggatatatcccctggggcagctggtggggctgaagatggtttctttgtgcccccaaccaagggaacaagtccaactcagatctggtgtaataactctcagcttccagttgatcacatcctggcaggctctttcgaaacagccatgcggctccttcatgaccaagtaggggtaatccagtttggcccctacaagcaactgttcctacagacatacgcccgaggccgcacaacctatcaggctctgccctgcctaccctccatgtatggctatcctaatcgcaactggaaggatgcagggctgaagaatggtgtaccagctgtgggcctgaagcttaatgacctcatccaacggttgcagctgtgctaccagctcaccacagttggcaaatttgaggaggctgtggaaaaattccgttccatccttctcagtgtgccacttcttgttgtggacaataaacaagagattgcagaggcccagcagctcatcaccatttgccgtgagtacattgtgggtttgtccgtggagacagaaaggaagaagctgcccaaagagactctagaacagcagaagcgcatctgtgagatggcagcctatttcacccactcaaacctgcagcctgtgcacatgatcctggtgctgcgtacagccctcaatctgttcttcaagctcaagaacttcaagacagctgccacctttgctcggcgcctactagaactcgggcccaagcctgaggtggcccaacagacccgaaaaatcctgtctgcctgtgagaagaatcccacagatgcctaccagctcaattatgacatgcacaacccctttgacatttgtgctgcatcatatcggcccatctaccgtggaaagccagtagaaaagtgtccactcagtggggcctgctattcccctgagttcaaaggtcaaatctgcagggtcaccacagtgacagagattggcaaagatgtgattggtttaaggatcagtcctctgcagtttcgctaaggccccctttgtgtgcatgggtcagtcaccatatgttccccccagagaatgtgtctatatcctccttctaacagcaccttccccctgcagctactcttcagatctggctctctgtaccctaaaacctagtatctttttctcttctatggaaaatccgaaggtctaaacttgacttttttgaggtcttctcaacttgactacagttgtgctcataattgtccttgcctttccagcttaattattttaaggaacaaatgaaaactctgggctgggtggagtggctcatacctgtaatcccagcactttgggaggctacggtgggcagatcatctgaggccaggagttcgagacctgcctggccaacatggcaacaccccgtctctaataaaaatataaaaattagcctggcatggtagcatgcgcctatagtcccagctgctcaggaggctgaggcatgagaatcgcttgaacctaggaggtggaggttgcattcaactgagatcataccacttcattccagcctgggtgacagagcaagactctgtctcaaaaaaaaaaaaaggaaaactctgtgatggacatttgtttagtaaatcccttcagtatttatccctcctttccccacagcagctttctttcctgtcaactagaaaggagcaggatgtaataaatacattttggtgtgactaggccacaccaactcttaatcatctcccattttccttagacatttaaatttcaaggcaggtaccctctgtgtactcagaaatttgaagaagttatttggttttccaaaatgcacactgcgggttattgatttgttctttacaactattgttctcatatttctcacactaaataaatctctatgagagcttctaaaaaaaaaaaaaaaaaaaaaaaaaaaaaaaagaacaaaaaaaaaaagaggggggggggcgagcataaaaagataccaccgacggagcgccccactgatagcgcgtaacccagcatttttcgttgtcagaagcggggtccccacatgagagagaggaggcaaataaaaacgacgagacagcggggcacagagtatacacacacggcggcgacgggggggaacagaccgcgccgacgacggtgagacaacccctcgtggggagaagggagacccactatgaacaacgggggggggggagagacagaaagtattgttgggggagacagaaaacttctatactatggaaaggaagaataatattaaagagagcgcttctgacaagagggcgcggaacaactaattataaacagacgttttagcaacaggggtggagaagaaggtggtggtgtaaaacaaaaaaagcaggggagaaaaatatcactatagtagggacgatgaaagaagttttaggaggacataagcgggaggatatgagtttttgcgagaatgattttttattccccggaga

SEQ ID NO: 405937 - DNA, 4829 bp, Homo sapiens
gagaaggggaccttcaggtccaggcaaagggggaacttctgtcgtgggaacgaaaaagaaagaggatttacagggtggggggacagaggggcagcaggaaccagaagggagacagtggcggtcgcaccggggccgatccgagagttccccttagagaacggagctcacgggcggggaggcctcacctgctagtaggacgcagaaagacagaaggcgaaggagaccccctgccgtagccatcttgcctctctgctgagcggaagcccccgttcggctcctgtctgttagcggcctctctaggctaccactgacaccgtctctgtggcccggagcctaagagaccggaagttcgtgtttccaggcgcttccggaaaccgcgggagagggtcgctgacgtggaggcgtccgaagggcagcagggtgtgtcggggctcggattaagacatcggagtcggagacctgagagatgttaaccaaattcgagaccaagagcgcgcgggtcaaagggctcagctttcaccccaaaagaccttggatcctgactagtttacataatggggtcatccagttatgggactatcggatgtgcactctcattgacaagtttgatgaacatgatggtccagtgcgaggcattgacttccataagcagcagccactgttcgtctctggaggagatgactataagattaaggtttggaattacaagcttcggcgctgtcttttcacattgcttgggcacttagattatattcgcaccacgttttttcatcatgaatatccctggattctgagtgcctccgatgatcagaccatccgagtgtggaactggcaatctagaacctgtgtttgtgtgttaacagggcacaaccattatgtgatgtgtgctcagttccaccccacagaagacttggtagtatcagccagcctggaccagactgtgcgcgtttgggatatttctggtctgaggaaaaaaaacctgtcccctggtgcggtggaatcggatgtgagaggaataactggggttgatctatttggaactacagatgcagtggtgaagcatgtactagagggtcacgatcgtggagtaaactgggctgccttccaccccactatgccccttattgtatctggggcagatgatcgtcaagtgaagatctggcgcatgaatgaatcaaaggcatgggaggttgatacctgccggggccattacaacaatgtatcttgtgccgtcttccaccctcgccaagagttgatcctcagcaattctgaggacaagagtattcgagtctgggatatgtctaagcggactggggttcagactttccgcagagaccatgatcgtttctgggtcctagctgctcaccctaaccttaacctctttgcagcaggccatgatggtggtatgattgtgtttaagctggaacgggaacggccagcctatgctgttcatggcaatatgctacactatgtcaaggaccgattcttacgacagctggatttcaacagctccaaagatgtagctgtgatgcagttgcggagtggttccaagtttccagtattcaatatgtcatacaatccagcagaaaatgcagtcctgctttgtacaagagctagcaatctagagaatagtacctatgacctgtacaccatccctaaagatgctgactcccagaatcctgatgcgcctgaagggaaacgatcctcaggcctgacagccgtttgggtcgctcgaaatcggtttgctgtcctagatcggatgcattcgcttctgatcaagaatctgaagaatgagatcaccaaaaaggtacaggtgcccaactgtgatgagatcttctatgctggcacaggcaatctcctgcttcgagatgcggactctatcacactctttgacgtacagcagaagcggactctggcatctgtgaagatttctaaagtgaaatacgttatctggtcagcagacatgtcacatgtagcactactagccaaacacgccattgtgatctgtaaccgcaaactggatgctttatgtaacattcatgagaacattcgtgtcaagagtggggcctgggatgagagtggggtatttatctataccacaagcaaccacatcaaatatgctgtcaccactggggaccacgggatcattcgaactctggatttacccatctatgtcacacgggtgaagggcaacaatgtatactgcctagacagggagtgtcgtccccgggtactcaccattgatcccactgagttcaaattcaagctggccctgatcaacagaaaatatgatgaggtactgcacatggtgaggaatgccaaactagttggccagtctattattgcttatctccagaagaagggctatcctgaagtggcactgcattttgtcaaggatgagaaaactcgctttagtctggcactggagtgtggaaacattgagattgctctggaagcagccaaagcactggatgacaagaactgctgggaaaagctgggagaagtggccctgctgcaggggaaccaccagattgtggaaatgtgctatcagcgtaccaaaaactttgacaaactttccttcctgtatcttatcactggcaacttagaaaaacttcgcaagatgatgaagattgctgagatcagaaaggacatgagtggccactatcagaatgccctatacctgggtgatgtgtcagagcgtgtgcggatcctgaagaactgtggacagaagtccctggcctatctcacagctgctacccatggcttagatgaagaagctgagagcctaaaggagacatttgacccagagaaggagacaatcccagacattgaccctaatgccaagctgctccagccacctgcacctatcatgccattggataccaattggcctttattgactgtatccaaaggattttttgaaggcaccattgccagcaaagggaagggaggagcactggctgctgacattgacattgacactgttggtacagagggctggggagaggatgcagagctgcagttggatgaagatgggtttgtggaggctacagaaggtttgggggatgatgctcttggcaagggacaggaagaaggaggtggctgggatgtagaagaagatctggagctccctcctgagctggatatatcccctggggcagctggtggggctgaagatggtttctttgtgcccccaaccaagggaacaagtccaactcagatctggtgtaataactctcagcttccagttgatcacatcctggcaggctctttcgaaacagccatgcggctccttcatgaccaagtaggggtaatccagtttggcccctacaagcaactgttcctacagacatacgcccgaggccgcacaacctatcaggctctgccctgcctaccctccatgtatggctatcctaatcgcaactggaaggatgcagggctgaagaatggtgtaccagctgtgggcctgaagcttaatgacctcatccaacggttgcagctgtgctaccagctcaccacagttggcaaatttgaggaggctgtggaaaaattccgttccatccttctcagtgtgccacttcttgttgtggacaataaacaagagattgcagaggcccagcagctcatcaccatttgccgtgagtacattgtgggtttgtccgtggagacagaaaggaagaagctgcccaaagagactctagaacagcagaagcgcatctgtgagatggcagcctatttcacccactcaaacctgcagcctgtgcacatgatcctggtgctgcgtacagccctcaatctgttcttcaagctcaagaacttcaagacagctgccacctttgctcggcgcctactagaactcgggcccaagcctgaggtggcccaacagacccgaaaaatcctgtctgcctgtgagaagaatcccacagatgcctaccagctcaattatgacatgcacaacccctttgacatttgtgctgcatcatatcggcccatctaccgtggaaagccagtagaaaagtgtccactcagtggggcctgctattcccctgagttcaaaggtcaaatctgcagggtcaccacagtgacagagattggcaaagatgtgattggtttaaggatcagtcctctgcagtttcgctaaggccccctttgtgtgcatgggtcagtcaccatatgttccccccagagaatgtgtctatatcctccttctaacagcaccttccccctgcagctactcttcagatctggctctctgtaccctaaaacctagtatctttttctcttctatggaaaatccgaaggtctaaacttgacttttttgaggtcttctcaacttgactacagttgtgctcataattgtccttgcctttccagcttaattattttaaggaacaaatgaaaactctgggctgggtggagtggctcatacctgtaatcccagcactttgggaggctacggtgggcagatcatctgaggccaggagttcgagacctgcctggccaacatggcaacaccccgtctctaataaaaatataaaaattagcctggcatggtagcatgcgcctatagtcccagctgctcaggaggctgaggcatgagaatcgcttgaacctaggaggtggaggttgcattcaactgagatcataccacttcattccagcctgggtgacagagcaagactctgtctcaaaaaaaaaaaactctgtgtactcagaaatttgaagaagttatttggttttccaaaatgcacactgcgggttattgatttgttctttacaactattgttctcatatttctcacactaaataaatctctatgagagcttct

SEQ ID NO: 405938 - DNA, 4660 bp, Homo sapiens
atccactgtcgctactgtatcctaataaaataatattcccatcctagagttaaaggtagaagagtctttcacaggatcttaatttacatgattaactgtatataaatacacacacacacacacacacatatagaagtaaatgtaaatgtatgtttcactatctgcctctgagaatgtattgtgcctctaactggcttccattcttaagtcttataggtgaaagtgccgaagttgagaaaagctgttagagtggtagagaaaaggagacagctaacctgatagcaaaagcagcagcccctttgctaatgtagctgagccgttaagcaatgcagttctttagagaaaaatgattacaagaacctgatagaacagatttgtttaatgtttaaagcctttgtctggaatatctttcaggaatatccctggattctgagtgcctccgatgatcagaccatccgagtgtggaactggcaatctagaacctgtgtttgtgtgttaacagggcacaaccattatgtgatgtgtgctcagttccaccccacagaagacttggtagtatcagccagcctggaccagactgtgcgcgtttgggatatttctggtctgaggaaaaaaaacctgtcccctggtgcggtggaatcggatgtgagaggaataactggggttgatctatttggaactacagatgcagtggtgaagcatgtactagagggtcacgatcgtggagtaaactgggctgccttccaccccactatgccccttattgtatctggggcagatgatcgtcaagtgaagatctggcgcatgaatgaatcaaaggcatgggaggttgatacctgccggggccattacaacaatgtatcttgtgccgtcttccaccctcgccaagagttgatcctcagcaattctgaggacaagagtattcgagtctgggatatgtctaagcggactggggttcagactttccgcagagaccatgatcgtttctgggtcctagctgctcaccctaaccttaacctctttgcagcaggccatgatggtggtatgattgtgtttaagctggaacgggaacggccagcctatgctgttcatggcaatatgctacactatgtcaaggaccgattcttacgacagctggatttcaacagctccaaagatgtagctgtgatgcagttgcggagtggttccaagtttccagtattcaatatgtcatacaatccagcagaaaatgcagtcctgctttgtacaagagctagcaatctagagaatagtacctatgacctgtacaccatccctaaagatgctgactcccagaatcctgatgcgcctgaagggaaacgatcctcaggcctgacagccgtttgggtcgctcgaaatcggtttgctgtcctagatcggatgcattcgcttctgatcaagaatctgaagaatgagatcaccaaaaaggtacaggtgcccaactgtgatgagatcttctatgctggcacaggcaatctcctgcttcgagatgcggactctatcacactctttgacgtacagcagaagcggactctggcatctgtgaagatttctaaagtgaaatacgttatctggtcagcagacatgtcacatgtagcactactagccaaacacgccattgtgatctgtaaccgcaaactggatgctttatgtaacattcatgagaacattcgtgtcaagagtggggcctgggatgagagtggggtatttatctataccacaagcaaccacatcaaatatgctgtcaccactggggaccacgggatcattcgaactctggatttacccatctatgtcacacgggtgaagggcaacaatgtatactgcctagacagggagtgtcgtccccgggtactcaccattgatcccactgagttcaaattcaagctggccctgatcaacagaaaatatgatgaggtactgcacatggtgaggaatgccaaactagttggccagtctattattgcttatctccagaagaagggctatcctgaagtggcactgcattttgtcaaggatgagaaaactcgctttagtctggcactggagtgtggaaacattgagattgctctggaagcagccaaagcactggatgacaagaactgctgggaaaagctgggagaagtggccctgctgcaggggaaccaccagattgtggaaatgtgctatcagcgtaccaaaaactttgacaaactttccttcctgtatcttatcactggcaacttagaaaaacttcgcaagatgatgaagattgctgagatcagaaaggacatgagtggccactatcagaatgccctatacctgggtgatgtgtcagagcgtgtgcggatcctgaagaactgtggacagaagtccctggcctatctcacagctgctacccatggcttagatgaagaagctgagagcctaaaggagacatttgacccagagaaggagacaatcccagacattgaccctaatgccaagctgctccagccacctgcacctatcatgccattggataccaattggcctttattgactgtatccaaaggattttttgaaggcaccattgccagcaaagggaagggaggagcactggctgctgacattgacattgacactgttggtacagagggctggggagaggatgcagagctgcagttggatgaagatgggtttgtggaggctacagaaggtttgggggatgatgctcttggcaagggacaggaagaaggaggtggctgggatgtagaagaagatctggagctccctcctgagctggatatatcccctggggcagctggtggggctgaagatggtttctttgtgcccccaaccaagggaacaagtccaactcagatctggtgtaataactctcagcttccagttgatcacatcctggcaggctctttcgaaacagccatgcggctccttcatgaccaagtaggggtaatccagtttggcccctacaagcaactgttcctacagacatacgcccgaggccgcacaacctatcaggctctgccctgcctaccctccatgtatggctatcctaatcgcaactggaaggatgcagggctgaagaatggtgtaccagctgtgggcctgaagcttaatgacctcatccaacggttgcagctgtgctaccagctcaccacagttggcaaatttgaggaggctgtggaaaaattccgttccatccttctcagtgtgccacttcttgttgtggacaataaacaagagattgcagaggcccagcagctcatcaccatttgccgtgagtacattgtgggtttgtccgtggagacagaaaggaagaagctgcccaaagagactctagaacagcagaagcgcatctgtgagatggcagcctatttcacccactcaaacctgcagcctgtgcacatgatcctggtgctgcgtacagccctcaatctgttcttcaagctcaagaacttcaagacagctgccacctttgctcggcgcctactagaactcgggcccaagcctgaggtggcccaacagacccgaaaaatcctgtctgcctgtgagaagaatcccacagatgcctaccagctcaattatgacatgcacaacccctttgacatttgtgctgcatcatatcggcccatctaccgtggaaagccagtagaaaagtgtccactcagtggggcctgctattcccctgagttcaaaggtcaaatctgcagggtcaccacagtgacagagattggcaaagatgtgattggtttaaggatcagtcctctgcagtttcgctaaggccccctttgtgtgcatgggtcagtcaccatatgttccccccagagaatgtgtctatatcctccttctaacagcaccttccccctgcagctactcttcagatctggctctctgtaccctaaaacctagtatctttttctcttctatggaaaatccgaaggtctaaacttgacttttttgaggtcttctcaacttgactacagttgtgctcataattgtccttgcctttccagcttaattattttaaggaacaaatgaaaactctgggctgggtggagtggctcatacctgtaatcccagcactttgggaggctacggtgggcagatcatctgaggccaggagttcgagacctgcctggccaacatggcaacaccccgtctctaataaaaatataaaaattagcctggcatggtagcatgcgcctatagtcccagctgctcaggaggctgaggcatgagaatcgcttgaacctaggaggtggaggttgcattcaactgagatcataccacttcattccagcctgggtgacagagcaagactctgtctcaaaaaaaaaaaaaggaaaactctgtgatggacatttgtttagtaaatcccttcagtatttatccctcctttccccacagcagctttctttcctgtcaactagaaaggagcaggatgtaataaatacattttggtgtgactaggccacaccaactcttaatcatctcccattttccttagacatttaaatttcaaggcaggtaccctctgtgtactcagaaatttgaagaagttatttggttttccaaaatgcacactgcgggttattgatttgttctttacaactattgttctcatatttctcacactaaataaatctctatgagagcttct

SEQ ID NO: 405939 - DNA, 4010 bp, Homo sapiens
acggattagagatacgagtgatctattgactacagatgcagtggtgaagcatgtactagagggtcacgatcgtggagtaaactgggctgccttccaccccactatgccccttattgtatctggggcagatgatcgtcaagtgaagatctggcgcatgaatgaatcaaaggcatgggaggttgatacctgccggggccattacaacaatgtatcttgtgccgtcttccaccctcgccaagagttgatcctcagcaattctgaggacaagagtattcgagtctgggatatgtctaagcggactggggttcagactttccgcagagaccatgatcgtttctgggtcctagctgctcaccctaaccttaacctctttgcagcaggccatgatggtggtatgattgtgtttaagctggaacgggaacggccagcctatgctgttcatggcaatatgctacactatgtcaaggaccgattcttacgacagctggatttcaacagctccaaagatgtagctgtgatgcagttgcggagtggttccaagtttccagtattcaatatgtcatacaatccagcagaaaatgcagtcctgctttgtacaagagctagcaatctagagaatagtacctatgacctgtacaccatccctaaagatgctgactcccagaatcctgatgcgcctgaagggaaacgatcctcaggcctgacagccgtttgggtcgctcgaaatcggtttgctgtcctagatcggatgcattcgcttctgatcaagaatctgaagaatgagatcaccaaaaaggtacaggtgcccaactgtgatgagatcttctatgctggcacaggcaatctcctgcttcgagatgcggactctatcacactctttgacgtacagcagaagcggactctggcatctgtgaagatttctaaagtgaaatacgttatctggtcagcagacatgtcacatgtagcactactagccaaacacgccattgtgatctgtaaccgcaaactggatgctttatgtaacattcatgagaacattcgtgtcaagagtggggcctgggatgagagtggggtatttatctataccacaagcaaccacatcaaatatgctgtcaccactggggaccacgggatcattcgaactctggatttacccatctatgtcacacgggtgaagggcaacaatgtatactgcctagacagggagtgtcgtccccgggtactcaccattgatcccactgagttcaaattcaagctggccctgatcaacagaaaatatgatgaggtactgcacatggtgaggaatgccaaactagttggccagtctattattgcttatctccagaagaagggctatcctgaagtggcactgcattttgtcaaggatgagaaaactcgctttagtctggcactggagtgtggaaacattgagattgctctggaagcagccaaagcactggatgacaagaactgctgggaaaagctgggagaagtggccctgctgcaggggaaccaccagattgtggaaatgtgctatcagcgtaccaaaaactttgacaaactttccttcctgtatcttatcactggcaacttagaaaaacttcgcaagatgatgaagattgctgagatcagaaaggacatgagtggccactatcagaatgccctatacctgggtgatgtgtcagagcgtgtgcggatcctgaagaactgtggacagaagtccctggcctatctcacagctgctacccatggcttagatgaagaagctgagagcctaaaggagacatttgacccagagaaggagacaatcccagacattgaccctaatgccaagctgctccagccacctgcacctatcatgccattggataccaattggcctttattgactgtatccaaaggattttttgaaggcaccattgccagcaaagggaagggaggagcactggctgctgacattgacattgacactgttggtacagagggctggggagaggatgcagagctgcagttggatgaagatgggtttgtggaggctacagaaggtttgggggatgatgctcttggcaagggacaggaagaaggaggtggctgggatgtagaagaagatctggagctccctcctgagctggatatatcccctggggcagctggtggggctgaagatggtttctttgtgcccccaaccaagggaacaagtccaactcagatctggtgtaataactctcagcttccagttgatcacatcctggcaggctctttcgaaacagccatgcggctccttcatgaccaagtaggggtaatccagtttggcccctacaagcaactgttcctacagacatacgcccgaggccgcacaacctatcaggctctgccctgcctaccctccatgtatggctatcctaatcgcaactggaaggatgcagggctgaagaatggtgtaccagctgtgggcctgaagcttaatgacctcatccaacggttgcagctgtgctaccagctcaccacagttggcaaatttgaggaggctgtggaaaaattccgttccatccttctcagtgtgccacttcttgttgtggacaataaacaagagattgcagaggcccagcagctcatcaccatttgccgtgagtacattgtgggtttgtccgtggagacagaaaggaagaagctgcccaaagagactctagaacagcagaagcgcatctgtgagatggcagcctatttcacccactcaaacctgcagcctgtgcacatgatcctggtgctgcgtacagccctcaatctgttcttcaagctcaagaacttcaagacagctgccacctttgctcggcgcctactagaactcgggcccaagcctgaggtggcccaacagacccgaaaaatcctgtctgcctgtgagaagaatcccacagatgcctaccagctcaattatgacatgcacaacccctttgacatttgtgctgcatcatatcggcccatctaccgtggaaagccagtagaaaagtgtccactcagtggggcctgctattcccctgagttcaaaggtcaaatctgcagggtcaccacagtgacagagattggcaaagatgtgattggtttaaggatcagtcctctgcagtttcgctaaggccccctttgtgtgcatgggtcagtcaccatatgttccccccagagaatgtgtctatatcctccttctaacagcaccttccccctgcagctactcttcagatctggctctctgtaccctaaaacctagtatctttttctcttctatggaaaatccgaaggtctaaacttgacttttttgaggtcttctcaacttgactacagttgtgctcataattgtccttgcctttccagcttaattattttaaggaacaaatgaaaactctgggctgggtggagtggctcatacctgtaatcccagcactttgggaggctacggtgggcagatcatctgaggccaggagttcgagacctgcctggccaacatggcaacaccccgtctctaataaaaatataaaaattagcctggcatggtagcatgcgcctatagtcccagctgctcaggaggctgaggcatgagaatcgcttgaacctaggaggtggaggttgcattcaactgagatcataccacttcattccagcctgggtgacagagcaagactctgtctcaaaaaaaaaaaaaggaaaactctgtgatggacatttgtttagtaaatcccttcagtatttatccctcctttccccacagcagctttctttcctgtcaactagaaaggagcaggatgtaataaatacattttggtgtgactaggccacaccaactcttaatcatctcccattttccttagacatttaaatttcaaggcaggtaccctctgtgtactcagaaatttgaagaagttatttggttttccaaaatgcacactgcgggttattgatttgttctttacaactattgttctcatatttctcacactaaataaatctctatgagagcttct

SEQ ID NO: 405940 - DNA, 5048 bp, Homo sapiens
gagaaggggaccttcaggtccaggcaaagggggaacttctgtcgtgggaacgaaaaagaaagaggatttacagggtggggggacagaggggcagcaggaaccagaagggagacagtggcggtcgcaccggggccgatccgagagttccccttagagaacggagctcacgggcggggaggcctcacctgctagtaggacgcagaaagacagaaggcgaaggagaccccctgccgtagccatcttgcctctctgctgagcggaagcccccgttcggctcctgtctgttagcggcctctctaggctaccactgacaccgtctctgtggcccggagcctaagagaccggaagttcgtgtttccaggcgcttccggaaaccgcgggagagggtcgctgacgtggaggcgtccgaagggcagcagggtgtgtcggggctcggattaagacatcggagtcggagacctgagagatgttaaccaaattcgagaccaagagcgcgcgggtcaaagggctcagctttcaccccaaaagaccttggatcctgactagtttacataatggggtcatccagttatgggactatcggatgtgcactctcattgacaagtttgatgaacatgatggtccagtgcgaggcattgacttccataagcagcagccactgttcgtctctggaggagatgactataagattaaggtttggaattacaagcttcggcgctgtcttttcacattgcttgggcacttagattatattcgcaccacgttttttcatcatgaatatccctggattctgagtgcctccgatgatcagaccatccgagtgtggaactggcaatctagaacctgtgtttgtgtgttaacagggcacaaccattatgtgatgtgtgctcagttccaccccacagaagacttggtagtatcagccagcctggaccagactgtgcgcgtttgggatatttctggtctgaggaaaaaaaacctgtcccctggtgcggtggaatcggatgtgagaggaataactggggttgatctatttggaactacagatgcagtggtgaagcatgtactagagggtcacgatcgtggagtaaactgggctgccttccaccccactatgccccttattgtatctggggcagatgatcgtcaagtgaagatctggcgcatgaatgaatcaaaggcatgggaggttgatacctgccggggccattacaacaatgtatcttgtgccgtcttccaccctcgccaagagttgatcctcagcaattctgaggacaagagtattcgagtctgggatatgtctaagcggactggggttcagactttccgcagagaccatgatcgtttctgggtcctagctgctcaccctaaccttaacctctttgcagcaggccatgatggtggtatgattgtgtttaagctggaacgggaacggccagcctatgctgttcatggcaatatgctacactatgtcaaggaccgattcttacgacagctggatttcaacagctccaaagatgtagctgtgatgcagttgcggagtggttccaagtttccagtattcaatatgtcatacaatccagcagaaaatgcagtcctgctttgtacaagagctagcaatctagagaatagtacctatgacctgtacaccatccctaaagatgctgactcccagaatcctgatgcgcctgaagggaaacgatcctcaggcctgacagccgtttgggtcgctcgaaatcggtttgctgtcctagatcggatgcattcgcttctgatcaagaatctgaagaatgagatcaccaaaaaggtacaggtgcccaactgtgatgagatcttctatgctggcacaggcaatctcctgcttcgagatgcggactctatcacactctttgacgtacagcagaagcggactctggcatctgtgaagatttctaaagtgaaatacgttatctggtcagcagacatgtcacatgtagcactactagccaaacacgaacactcatgccctttgcctcttacagccattgtgatctgtaaccgcaaactggatgctttatgtaacattcatgagaacattcgtgtcaagagtggggcctgggatgagagtggggtatttatctataccacaagcaaccacatcaaatatgctgtcaccactggggaccacgggatcattcgaactctggatttacccatctatgtcacacgggtgaagggcaacaatgtatactgcctagacagggagtgtcgtccccgggtactcaccattgatcccactgagttcaaattcaagctggccctgatcaacagaaaatatgatgaggtactgcacatggtgaggaatgccaaactagttggccagtctattattgcttatctccagaagaagggctatcctgaagtggcactgcattttgtcaaggatgagaaaactcgctttagtctggcactggagtgtggaaacattgagattgctctggaagcagccaaagcactggatgacaagaactgctgggaaaagctgggagaagtggccctgctgcaggggaaccaccagattgtggaaatgtgctatcagcgtaccaaaaactttgacaaactttccttcctgtatcttatcactggcaacttagaaaaacttcgcaagatgatgaagattgctgagatcagaaaggacatgagtggccactatcagaatgccctatacctgggtgatgtgtcagagcgtgtgcggatcctgaagaactgtggacagaagtccctggcctatctcacagctgctacccatggcttagatgaagaagctgagagcctaaaggagacatttgacccagagaaggagacaatcccagacattgaccctaatgccaagctgctccagccacctgcacctatcatgccattggataccaattggcctttattgactgtatccaaaggattttttgaaggcaccattgccagcaaagggaagggaggagcactggctgctgacattgacattgacactgttggtacagagggctggggagaggatgcagagctgcagttggatgaagatgggtttgtggaggctacagaaggtttgggggatgatgctcttggcaagggacaggaagaaggaggtggctgggatgtagaagaagatctggagctccctcctgagctggatatatcccctggggcagctggtggggctgaagatggtttctttgtgcccccaaccaagggaacaagtccaactcagatctggtgtaataactctcagcttccagttgatcacatcctggcaggctctttcgaaacagccatgcggctccttcatgaccaagtaggggtaatccagtttggcccctacaagcaactgttcctacagacatacgcccgaggccgcacaacctatcaggctctgccctgcctaccctccatgtatggctatcctaatcgcaactggaaggatgcagggctgaagaatggtgtaccagctgtgggcctgaagcttaatgacctcatccaacggttgcagctgtgctaccagctcaccacagttggcaaatttgaggaggctgtggaaaaattccgttccatccttctcagtgtgccacttcttgttgtggacaataaacaagagattgcagaggcccagcagctcatcaccatttgccgtgagtacattgtgggtttgtccgtggagacagaaaggaagaagctgcccaaagagactctagaacagcagaagcgcatctgtgagatggcagcctatttcacccactcaaacctgcagcctgtgcacatgatcctggtgctgcgtacagccctcaatctgttcttcaagctcaagaacttcaagacagctgccacctttgctcggcgcctactagaactcgggcccaagcctgaggtggcccaacagacccgaaaaatcctgtctgcctgtgagaagaatcccacagatgcctaccagctcaattatgacatgcacaacccctttgacatttgtgctgcatcatatcggcccatctaccgtggaaagccagtagaaaagtgtccactcagtggggcctgctattcccctgagttcaaaggtcaaatctgcagggtcaccacagtgacagagattggcaaagatgtgattggtttaaggatcagtcctctgcagtttcgctaaggccccctttgtgtgcatgggtcagtcaccatatgttccccccagagaatgtgtctatatcctccttctaacagcaccttccccctgcagctactcttcagatctggctctctgtaccctaaaacctagtatctttttctcttctatggaaaatccgaaggtctaaacttgacttttttgaggtcttctcaacttgactacagttgtgctcataattgtccttgcctttccagcttaattattttaaggaacaaatgaaaactctgggctgggtggagtggctcatacctgtaatcccagcactttgggaggctacggtgggcagatcatctgaggccaggagttcgagacctgcctggccaacatggcaacaccccgtctctaataaaaatataaaaattagcctggcatggtagcatgcgcctatagtcccagctgctcaggaggctgaggcatgagaatcgcttgaacctaggaggtggaggttgcattcaactgagatcataccacttcattccagcctgggtgacagagcaagactctgtctcaaaaaaaaaaaaaggaaaactctgtgatggacatttgtttagtaaatcccttcagtatttatccctcctttccccacagcagctttctttcctgtcaactagaaaggagcaggatgtaataaatacattttggtgtgactaggccacaccaactcttaatcatctcccattttccttagacatttaaatttcaaggcaggtaccctctgtgtactcagaaatttgaagaagttatttggttttccaaaatgcacactgcgggttattgatttgttctttacaactattgttctcatatttctcacactaaataaatctctatgagagcttct

SEQ ID NO: 405941 - DNA, 3621 bp, Homo sapiens
tagaggattcttgcgacgacagtgtggacgggaacggcagctatgctgttcatggcaatatgctacactatgtcaaggaccgattcttacgacagctggatttcaacagctccaaagatgtagctgtgatgcagttgcggagtggttccaagtttccagtattcaatatgtcatacaatccagcagaaaatgcagtcctgctttgtacaagagctagcaatctagagaatagtacctatgacctgtacaccatccctaaagatgctgactcccagaatcctgatgcgcctgaagggaaacgatcctcaggcctgacagccgtttgggtcgctcgaaatcggtttgctgtcctagatcggatgcattcgcttctgatcaagaatctgaagaatgagatcaccaaaaaggtacaggtgcccaactgtgatgagatcttctatgctggcacaggcaatctcctgcttcgagatgcggactctatcacactctttgacgtacagcagaagcggactctggcatctgtgaagatttctaaagtgaaatacgttatctggtcagcagacatgtcacatgtagcactactagccaaacacgccattgtgatctgtaaccgcaaactggatgctttatgtaacattcatgagaacattcgtgtcaagagtggggcctgggatgagagtggggtatttatctataccacaagcaaccacatcaaatatgctgtcaccactggggaccacgggatcattcgaactctggatttacccatctatgtcacacgggtgaagggcaacaatgtatactgcctagacagggagtgtcgtccccgggtactcaccattgatcccactgagttcaaattcaagctggccctgatcaacagaaaatatgatgaggtactgcacatggtgaggaatgccaaactagttggccagtctattattgcttatctccagaagaagggctatcctgaagtggcactgcattttgtcaaggatgagaaaactcgctttagtctggcactggagtgtggaaacattgagattgctctggaagcagccaaagcactggatgacaagaactgctgggaaaagctgggagaagtggccctgctgcaggggaaccaccagattgtggaaatgtgctatcagcgtaccaaaaactttgacaaactttccttcctgtatcttatcactggcaacttagaaaaacttcgcaagatgatgaagattgctgagatcagaaaggacatgagtggccactatcagaatgccctatacctgggtgatgtgtcagagcgtgtgcggatcctgaagaactgtggacagaagtccctggcctatctcacagctgctacccatggcttagatgaagaagctgagagcctaaaggagacatttgacccagagaaggagacaatcccagacattgaccctaatgccaagctgctccagccacctgcacctatcatgccattggataccaattggcctttattgactgtatccaaaggattttttgaaggcaccattgccagcaaagggaagggaggagcactggctgctgacattgacattgacactgttggtacagagggctggggagaggatgcagagctgcagttggatgaagatgggtttgtggaggctacagaaggtttgggggatgatgctcttggcaagggacaggaagaaggaggtggctgggatgtagaagaagatctggagctccctcctgagctggatatatcccctggggcagctggtggggctgaagatggtttctttgtgcccccaaccaagggaacaagtccaactcagatctggtgtaataactctcagcttccagttgatcacatcctggcaggctctttcgaaacagccatgcggctccttcatgaccaagtaggggtaatccagtttggcccctacaagcaactgttcctacagacatacgcccgaggccgcacaacctatcaggctctgccctgcctaccctccatgtatggctatcctaatcgcaactggaaggatgcagggctgaagaatggtgtaccagctgtgggcctgaagcttaatgacctcatccaacggttgcagctgtgctaccagctcaccacagttggcaaatttgaggaggctgtggaaaaattccgttccatccttctcagtgtgccacttcttgttgtggacaataaacaagagattgcagaggcccagcagctcatcaccatttgccgtgagtacattgtgggtttgtccgtggagacagaaaggaagaagctgcccaaagagactctagaacagcagaagcgcatctgtgagatggcagcctatttcacccactcaaacctgcagcctgtgcacatgatcctggtgctgcgtacagccctcaatctgttcttcaagctcaagaacttcaagacagctgccacctttgctcggcgcctactagaactcgggcccaagcctgaggtggcccaacagacccgaaaaatcctgtctgcctgtgagaagaatcccacagatgcctaccagctcaattatgacatgcacaacccctttgacatttgtgctgcatcatatcggcccatctaccgtggaaagccagtagaaaagtgtccactcagtggggcctgctattcccctgagttcaaaggtcaaatctgcagggtcaccacagtgacagagattggcaaagatgtgattggtttaaggatcagtcctctgcagtttcgctaaggccccctttgtgtgcatgggtcagtcaccatatgttccccccagagaatgtgtctatatcctccttctaacagcaccttccccctgcagctactcttcagatctggctctctgtaccctaaaacctagtatctttttctcttctatggaaaatccgaaggtctaaacttgacttttttgaggtcttctcaacttgactacagttgtgctcataattgtccttgcctttccagcttaattattttaaggaacaaatgaaaactctgggctgggtggagtggctcatacctgtaatcccagcactttgggaggctacggtgggcagatcatctgaggccaggagttcgagacctgcctggccaacatggcaacaccccgtctctaataaaaatataaaaattagcctggcatggtagcatgcgcctatagtcccagctgctcaggaggctgaggcatgagaatcgcttgaacctaggaggtggaggttgcattcaactgagatcataccacttcattccagcctgggtgacagagcaagactctgtctcaaaaaaaaaaaaaggaaaactctgtgatggacatttgtttagtaaatcccttcagtatttatccctcctttccccacagcagctttctttcctgtcaactagaaaggagcaggatgtaataaatacattttggtgtgactaggccacaccaactcttaatcatctcccattttccttagacatttaaatttcaaggcaggtaccctctgtgtactcagaaatttgaagaagttatttggttttccaaaatgcacactgcgggttattgatttgttctttacaactattgttctcatatttctcacactaaataaatctctatgagagcttct

SEQ ID NO: 405942 - DNA, 4874 bp, Homo sapiens
gagaaggggaccttcaggtccaggcaaagggggaacttctgtcgtgggaacgaaaaagaaagaggatttacagggtggggggacagaggggcagcaggaaccagaagggagacagtggcggtcgcaccggggccgatccgagagttccccttagagaacggagctcacgggcggggaggcctcacctgctagtaggacgcagaaagacagaaggcgaaggagaccccctgccgtagccatcttgcctctctgctgagcggaagcccccgttcggctcctgtctgttagcggcctctctaggctaccactgacaccgtctctgtggcccggagcctaagagaccggaagttcgtgtttccaggcgcttccggaaaccgcgggagagggtcgctgacgtggaggcgtccgaagggcagcagggtgtgtcggggctcggattaagacatcggagtcggagacctgagagatgttaaccaaattcgagaccaagagcgcgcgggtcaaagggctcagctttcaccccaaaagaccttggatcctgactagtttacataatggggtcatccagttatgggactatcggatgtgcactctcattgacaagtttgatgaacatgatggtccagtgcgaggcattgacttccataagcagcagccactgttcgtctctggaggagatgactataagattaaggtttggaattacaagcttcggcgctgtcttttcacattgcttgggcacttagattatattcgcaccacgttttttcatcatgaatatccctggattctgagtgcctccgatgatcagaccatccgagtgtggaactggcaatctagaacctgtgtttgtgtgttaacagggcacaaccattatgtgatgtgtgctcagttccaccccacagaagacttggtagtatcagccagcctggaccagactgtgcgcgtttgggatatttctggtctgaggaaaaaaaacctgtcccctggtgcggtggaatcggatgtgagaggaataactggggttgatctatttggaactacagatgcagtggtgaagcatgtactagagggtcacgatcgtggagtaaactgggctgccttccaccccactatgccccttattgtatctggggcagatgatcgtcaagtgaagatctggcgcatgaatgaatcaaaggcatgggaggttgatacctgccggggccattacaacaatgtatcttgtgccgtcttccaccctcgccaagagttgatcctcagcaattctgaggacaagagtattcgagtctgggatatgtctaagcggactggggttcagactttccgcagagaccatgatcgtttctgggtcctagctgctcaccctaaccttaacctctttgcagcaggccatgatggtggtatgattgtgtttaagctggaacgggaacggccagcctatgctgttcatggcaatatgctacactatgtcaaggaccgattcttacgacagctggatttcaacagctccaaagatgtagctgtgatgcagttgcggagtggttccaagtttccagtattcaatatgtcatacaatccagcagaaaatgcagtcctgctttgtacaagagctagcaatctagagaatagtacctatgacctgtacaccatccctaaagatgctgactcccagaatcctgatgcgcctgaagggaaacgatcctcaggcctgacagccgtttgggtcgctcgaaatcggtttgctgtcctagatcggatgcattcgcttctgatcaagaatctgaagaatgagatcaccaaaaaggtacaggtgcccaactgtgatgagatcttctatgctggcacaggcaatctcctgcttcgagatgcggactctatcacactctttgacgtacagcagaagcggactctggcatctgtgaagatttctaaagtgaaatacgttatctggtcagcagacatgtcacatgtagcactactagccaaacacgccattgtgatctgtaaccgcaaactggatgctttatgtaacattcatgagaacattcgtgtcaagagtggggcctgggatgagagtggggtatttatctataccacaagcaaccacatcaaatatgctgtcaccactggggaccacgggatcattcgaactctggatttacccatctatgtcacacgggtgaagggcaacaatgtatactgcctagacagggagtgtcgtccccgggtactcaccattgatcccactgagttcaaattcaagctggccctgatcaacagaaaatatgatgagattgctctggaagcagccaaagcactggatgacaagaactgctgggaaaagctgggagaagtggccctgctgcaggggaaccaccagattgtggaaatgtgctatcagcgtaccaaaaactttgacaaactttccttcctgtatcttatcactggcaacttagaaaaacttcgcaagatgatgaagattgctgagatcagaaaggacatgagtggccactatcagaatgccctatacctgggtgatgtgtcagagcgtgtgcggatcctgaagaactgtggacagaagtccctggcctatctcacagctgctacccatggcttagatgaagaagctgagagcctaaaggagacatttgacccagagaaggagacaatcccagacattgaccctaatgccaagctgctccagccacctgcacctatcatgccattggataccaattggcctttattgactgtatccaaaggattttttgaaggcaccattgccagcaaagggaagggaggagcactggctgctgacattgacattgacactgttggtacagagggctggggagaggatgcagagctgcagttggatgaagatgggtttgtggaggctacagaaggtttgggggatgatgctcttggcaagggacaggaagaaggaggtggctgggatgtagaagaagatctggagctccctcctgagctggatatatcccctggggcagctggtggggctgaagatggtttctttgtgcccccaaccaagggaacaagtccaactcagatctggtgtaataactctcagcttccagttgatcacatcctggcaggctctttcgaaacagccatgcggctccttcatgaccaagtaggggtaatccagtttggcccctacaagcaactgttcctacagacatacgcccgaggccgcacaacctatcaggctctgccctgcctaccctccatgtatggctatcctaatcgcaactggaaggatgcagggctgaagaatggtgtaccagctgtgggcctgaagcttaatgacctcatccaacggttgcagctgtgctaccagctcaccacagttggcaaatttgaggaggctgtggaaaaattccgttccatccttctcagtgtgccacttcttgttgtggacaataaacaagagattgcagaggcccagcagctcatcaccatttgccgtgagtacattgtgggtttgtccgtggagacagaaaggaagaagctgcccaaagagactctagaacagcagaagcgcatctgtgagatggcagcctatttcacccactcaaacctgcagcctgtgcacatgatcctggtgctgcgtacagccctcaatctgttcttcaagctcaagaacttcaagacagctgccacctttgctcggcgcctactagaactcgggcccaagcctgaggtggcccaacagacccgaaaaatcctgtctgcctgtgagaagaatcccacagatgcctaccagctcaattatgacatgcacaacccctttgacatttgtgctgcatcatatcggcccatctaccgtggaaagccagtagaaaagtgtccactcagtggggcctgctattcccctgagttcaaaggtcaaatctgcagggtcaccacagtgacagagattggcaaagatgtgattggtttaaggatcagtcctctgcagtttcgctaaggccccctttgtgtgcatgggtcagtcaccatatgttccccccagagaatgtgtctatatcctccttctaacagcaccttccccctgcagctactcttcagatctggctctctgtaccctaaaacctagtatctttttctcttctatggaaaatccgaaggtctaaacttgacttttttgaggtcttctcaacttgactacagttgtgctcataattgtccttgcctttccagcttaattattttaaggaacaaatgaaaactctgggctgggtggagtggctcatacctgtaatcccagcactttgggaggctacggtgggcagatcatctgaggccaggagttcgagacctgcctggccaacatggcaacaccccgtctctaataaaaatataaaaattagcctggcatggtagcatgcgcctatagtcccagctgctcaggaggctgaggcatgagaatcgcttgaacctaggaggtggaggttgcattcaactgagatcataccacttcattccagcctgggtgacagagcaagactctgtctcaaaaaaaaaaaaaggaaaactctgtgatggacatttgtttagtaaatcccttcagtatttatccctcctttccccacagcagctttctttcctgtcaactagaaaggagcaggatgtaataaatacattttggtgtgactaggccacaccaactcttaatcatctcccattttccttagacatttaaatttcaaggcaggtaccctctgtgtactcagaaatttgaagaagttatttggttttccaaaatgcacactgcgggttattgatttgttctttacaactattgttctcatatttctcacactaaataaatctctatgagagcttct

SEQ ID NO: 405943 - DNA, 3671 bp, Homo sapiens
agctatgcataggtcgcgcctgggttgtaatttccttcacgggctcgcgcgatgcttatatagatgggcagtgcgacacataatgtaaaagaacctgagtacattacgcactagctggatttccatagcacgcatccataatcattgtacgctaggtagtgcaggatcgcgccaggtctctccctaatattgacgtcgatataaatattctgcataagcctacgcgattagccatgactagtaagatgagtcgggtacaagagctagcaatctagagaatagtacctatgacctgtacaccatccctaaagatgctgactcccagaatcctgatgcgcctgaagggaaacgatcctcaggcctgacagccgtttgggtcgctcgaaatcggtttgctgtcctagatcggatgcattcgcttctgatcaagaatctgaagaatgagatcaccaaaaaggtacaggtgcccaactgtgatgagatcttctatgctggcacaggcaatctcctgcttcgagatgcggactctatcacactctttgacgtacagcagaagcggactctggcatctgtgaagatttctaaagtgaaatacgttatctggtcagcagacatgtcacatgtagcactactagccaaacacgccattgtgatctgtaaccgcaaactggatgctttatgtaacattcatgagaacattcgtgtcaagagtggggcctgggatgagagtggggtatttatctataccacaagcaaccacatcaaatatgctgtcaccactggggaccacgggatcattcgaactctggatttacccatctatgtcacacgggtgaagggcaacaatgtatactgcctagacagggagtgtcgtccccgggtactcaccattgatcccactgagttcaaattcaagctggccctgatcaacagaaaatatgatgaggtactgcacatggtgaggaatgccaaactagttggccagtctattattgcttatctccagaagaagggctatcctgaagtggcactgcattttgtcaaggatgagaaaactcgctttagtctggcactggagtgtggaaacattgagattgctctggaagcagccaaagcactggatgacaagaactgctgggaaaagctgggagaagtggccctgctgcaggggaaccaccagattgtggaaatgtgctatcagcgtaccaaaaactttgacaaactttccttcctgtatcttatcactggcaacttagaaaaacttcgcaagatgatgaagattgctgagatcagaaaggacatgagtggccactatcagaatgccctatacctgggtgatgtgtcagagcgtgtgcggatcctgaagaactgtggacagaagtccctggcctatctcacagctgctacccatggcttagatgaagaagctgagagcctaaaggagacatttgacccagagaaggagacaatcccagacattgaccctaatgccaagctgctccagccacctgcacctatcatgccattggataccaattggcctttattgactgtatccaaaggattttttgaaggcaccattgccagcaaagggaagggaggagcactggctgctgacattgacattgacactgttggtacagagggctggggagaggatgcagagctgcagttggatgaagatgggtttgtggaggctacagaaggtttgggggatgatgctcttggcaagggacaggaagaaggaggtggctgggatgtagaagaagatctggagctccctcctgagctggatatatcccctggggcagctggtggggctgaagatggtttctttgtgcccccaaccaagggaacaagtccaactcagatctggtgtaataactctcagcttccagttgatcacatcctggcaggctctttcgaaacagccatgcggctccttcatgaccaagtaggggtaatccagtttggcccctacaagcaactgttcctacagacatacgcccgaggccgcacaacctatcaggctctgccctgcctaccctccatgtatggctatcctaatcgcaactggaaggatgcagggctgaagaatggtgtaccagctgtgggcctgaagcttaatgacctcatccaacggttgcagctgtgctaccagctcaccacagttggcaaatttgaggaggctgtggaaaaattccgttccatccttctcagtgtgccacttcttgttgtggacaataaacaagagattgcagaggcccagcagctcatcaccatttgccgtgagtacattgtgggtttgtccgtggagacagaaaggaagaagctgcccaaagagactctagaacagcagaagcgcatctgtgagatggcagcctatttcacccactcaaacctgcagcctgtgcacatgatcctggtgctgcgtacagccctcaatctgttcttcaagctcaagaacttcaagacagctgccacctttgctcggcgcctactagaactcgggcccaagcctgaggtggcccaacagacccgaaaaatcctgtctgcctgtgagaagaatcccacagatgcctaccagctcaattatgacatgcacaacccctttgacatttgtgctgcatcatatcggcccatctaccgtggaaagccagtagaaaagtgtccactcagtggggcctgctattcccctgagttcaaaggtcaaatctgcagggtcaccacagtgacagagattggcaaagatgtgattggtttaaggatcagtcctctgcagtttcgctaaggccccctttgtgtgcatgggtcagtcaccatatgttccccccagagaatgtgtctatatcctccttctaacagcaccttccccctgcagctactcttcagatctggctctctgtaccctaaaacctagtatctttttctcttctatggaaaatccgaaggtctaaacttgacttttttgaggtcttctcaacttgactacagttgtgctcataattgtccttgcctttccagcttaattattttaaggaacaaatgaaaactctgggctgggtggagtggctcatacctgtaatcccagcactttgggaggctacggtgggcagatcatctgaggccaggagttcgagacctgcctggccaacatggcaacaccccgtctctaataaaaatataaaaattagcctggcatggtagcatgcgcctatagtcccagctgctcaggaggctgaggcatgagaatcgcttgaacctaggaggtggaggttgcattcaactgagatcataccacttcattccagcctgggtgacagagcaagactctgtctcaaaaaaaaaaaaaggaaaactctgtgatggacatttgtttagtaaatcccttcagtatttatccctcctttccccacagcagctttctttcctgtcaactagaaaggagcaggatgtaataaatacattttggtgtgactaggccacaccaactcttaatcatctcccattttccttagacatttaaatttcaaggcaggtaccctctgtgtactcagaaatttgaagaagttatttggttttccaaaatgcacactgcgggttattgatttgttctttacaactattgttctcatatttctcacactaaataaatctctatgagagcttct

SEQ ID NO: 405944 - DNA, 2783 bp, Homo sapiens
aatataacaagagaagccgatgttaataagagacgaggatcacacaaaatattatgaggtactgcacatggtgaggaatgccaaactagttggccagtctattattgcttatctccagaagaagggctatcctgaagtggcactgcattttgtcaaggatgagaaaactcgctttagtctggcactggagtgtggaaacattgagattgctctggaagcagccaaagcactggatgacaagaactgctgggaaaagctgggagaagtggccctgctgcaggggaaccaccagattgtggaaatgtgctatcagcgtaccaaaaactttgacaaactttccttcctgtatcttatcactggcaacttagaaaaacttcgcaagatgatgaagattgctgagatcagaaaggacatgagtggccactatcagaatgccctatacctgggtgatgtgtcagagcgtgtgcggatcctgaagaactgtggacagaagtccctggcctatctcacagctgctacccatggcttagatgaagaagctgagagcctaaaggagacatttgacccagagaaggagacaatcccagacattgaccctaatgccaagctgctccagccacctgcacctatcatgccattggataccaattggcctttattgactgtatccaaaggattttttgaaggcaccattgccagcaaagggaagggaggagcactggctgctgacattgacattgacactgttggtacagagggctggggagaggatgcagagctgcagttggatgaagatgggtttgtggaggctacagaaggtttgggggatgatgctcttggcaagggacaggaagaaggaggtggctgggatgtagaagaagatctggagctccctcctgagctggatatatcccctggggcagctggtggggctgaagatggtttctttgtgcccccaaccaagggaacaagtccaactcagatctggtgtaataactctcagcttccagttgatcacatcctggcaggctctttcgaaacagccatgcggctccttcatgaccaagtaggggtaatccagtttggcccctacaagcaactgttcctacagacatacgcccgaggccgcacaacctatcaggctctgccctgcctaccctccatgtatggctatcctaatcgcaactggaaggatgcagggctgaagaatggtgtaccagctgtgggcctgaagcttaatgacctcatccaacggttgcagctgtgctaccagctcaccacagttggcaaatttgaggaggctgtggaaaaattccgttccatccttctcagtgtgccacttcttgttgtggacaataaacaagagattgcagaggcccagcagctcatcaccatttgccgtgagtacattgtgggtttgtccgtggagacagaaaggaagaagctgcccaaagagactctagaacagcagaagcgcatctgtgagatggcagcctatttcacccactcaaacctgcagcctgtgcacatgatcctggtgctgcgtacagccctcaatctgttcttcaagctcaagaacttcaagacagctgccacctttgctcggcgcctactagaactcgggcccaagcctgaggtggcccaacagacccgaaaaatcctgtctgcctgtgagaagaatcccacagatgcctaccagctcaattatgacatgcacaacccctttgacatttgtgctgcatcatatcggcccatctaccgtggaaagccagtagaaaagtgtccactcagtggggcctgctattcccctgagttcaaaggtcaaatctgcagggtcaccacagtgacagagattggcaaagatgtgattggtttaaggatcagtcctctgcagtttcgctaaggccccctttgtgtgcatgggtcagtcaccatatgttccccccagagaatgtgtctatatcctccttctaacagcaccttccccctgcagctactcttcagatctggctctctgtaccctaaaacctagtatctttttctcttctatggaaaatccgaaggtctaaacttgacttttttgaggtcttctcaacttgactacagttgtgctcataattgtccttgcctttccagcttaattattttaaggaacaaatgaaaactctgggctgggtggagtggctcatacctgtaatcccagcactttgggaggctacggtgggcagatcatctgaggccaggagttcgagacctgcctggccaacatggcaacaccccgtctctaataaaaatataaaaattagcctggcatggtagcatgcgcctatagtcccagctgctcaggaggctgaggcatgagaatcgcttgaacctaggaggtggaggttgcattcaactgagatcataccacttcattccagcctgggtgacagagcaagactctgtctcaaaaaaaaaaaaaggaaaactctgtgatggacatttgtttagtaaatcccttcagtatttatccctcctttccccacagcagctttctttcctgtcaactagaaaggagcaggatgtaataaatacattttggtgtgactaggccacaccaactcttaatcatctcccattttccttagacatttaaatttcaaggcaggtaccctctgtgtactcagaaatttgaagaagttatttggttttccaaaatgcacactgcgggttattgatttgttctttacaactattgttctcatatttctcacactaaataaatctctatgagagcttct

SEQ ID NO: 405945 - DNA, 2909 bp, Homo sapiens
cccgagtaggtgggactacaggcgtgcaccatgattcccagctaattttttttgtatttttagtagagacagggtttcaccatgttggccaggatggtctcgagctcttgacctcgggatccgcctgccttggcctcccaaagtgctgggattacagatgtgagccaccgcacccagccgattttcaatggaattagactaaaagctaggagtaattgaaagtataggaagttcttcaggaaatctatatagatgcagatgctttgcagagtccttggttttgagtcacattgtccttcaacctgttaacacgaccctggggattctttagattgctctggaagcagccaaagcactggatgacaagaactgctgggaaaagctgggagaagtggccctgctgcaggggaaccaccagattgtggaaatgtgctatcagcgtaccaaaaactttgacaaactttccttcctgtatcttatcactggcaacttagaaaaacttcgcaagatgatgaagattgctgagatcagaaaggacatgagtggccactatcagaatgccctatacctgggtgatgtgtcagagcgtgtgcggatcctgaagaactgtggacagaagtccctggcctatctcacagctgctacccatggcttagatgaagaagctgagagcctaaaggagacatttgacccagagaaggagacaatcccagacattgaccctaatgccaagctgctccagccacctgcacctatcatgccattggataccaattggcctttattgactgtatccaaaggattttttgaaggcaccattgccagcaaagggaagggaggagcactggctgctgacattgacattgacactgttggtacagagggctggggagaggatgcagagctgcagttggatgaagatgggtttgtggaggctacagaaggtttgggggatgatgctcttggcaagggacaggaagaaggaggtggctgggatgtagaagaagatctggagctccctcctgagctggatatatcccctggggcagctggtggggctgaagatggtttctttgtgcccccaaccaagggaacaagtccaactcagatctggtgtaataactctcagcttccagttgatcacatcctggcaggctctttcgaaacagccatgcggctccttcatgaccaagtaggggtaatccagtttggcccctacaagcaactgttcctacagacatacgcccgaggccgcacaacctatcaggctctgccctgcctaccctccatgtatggctatcctaatcgcaactggaaggatgcagggctgaagaatggtgtaccagctgtgggcctgaagcttaatgacctcatccaacggttgcagctgtgctaccagctcaccacagttggcaaatttgaggaggctgtggaaaaattccgttccatccttctcagtgtgccacttcttgttgtggacaataaacaagagattgcagaggcccagcagctcatcaccatttgccgtgagtacattgtgggtttgtccgtggagacagaaaggaagaagctgcccaaagagactctagaacagcagaagcgcatctgtgagatggcagcctatttcacccactcaaacctgcagcctgtgcacatgatcctggtgctgcgtacagccctcaatctgttcttcaagctcaagaacttcaagacagctgccacctttgctcggcgcctactagaactcgggcccaagcctgaggtggcccaacagacccgaaaaatcctgtctgcctgtgagaagaatcccacagatgcctaccagctcaattatgacatgcacaacccctttgacatttgtgctgcatcatatcggcccatctaccgtggaaagccagtagaaaagtgtccactcagtggggcctgctattcccctgagttcaaaggtcaaatctgcagggtcaccacagtgacagagattggcaaagatgtgattggtttaaggatcagtcctctgcagtttcgctaaggccccctttgtgtgcatgggtcagtcaccatatgttccccccagagaatgtgtctatatcctccttctaacagcaccttccccctgcagctactcttcagatctggctctctgtaccctaaaacctagtatctttttctcttctatggaaaatccgaaggtctaaacttgacttttttgaggtcttctcaacttgactacagttgtgctcataattgtccttgcctttccagcttaattattttaaggaacaaatgaaaactctgggctgggtggagtggctcatacctgtaatcccagcactttgggaggctacggtgggcagatcatctgaggccaggagttcgagacctgcctggccaacatggcaacaccccgtctctaataaaaatataaaaattagcctggcatggtagcatgcgcctatagtcccagctgctcaggaggctgaggcatgagaatcgcttgaacctaggaggtggaggttgcattcaactgagatcataccacttcattccagcctgggtgacagagcaagactctgtctcaaaaaaaaaaaaaggaaaactctgtgatggacatttgtttagtaaatcccttcagtatttatccctcctttccccacagcagctttctttcctgtcaactagaaaggagcaggatgtaataaatacattttggtgtgactaggccacaccaactcttaatcatctcccattttccttagacatttaaatttcaaggcaggtaccctctgtgtactcagaaatttgaagaagttatttggttttccaaaatgcacactgcgggttattgatttgttctttacaactattgttctcatatttctcacactaaataaatctctatgagagcttct

SEQ ID NO: 405946 - DNA, 2392 bp, Homo sapiens
tatgattaggagtgactggacgaggggtcgtgttagcagaatgccctatacctgggtgatgtgtcagagcgtgtgcggatcctgaagaactgtggacagaagtccctggcctatctcacagctgctacccatggcttagatgaagaagctgagagcctaaaggagacatttgacccagagaaggagacaatcccagacattgaccctaatgccaagctgctccagccacctgcacctatcatgccattggataccaattggcctttattgactgtatccaaaggattttttgaaggcaccattgccagcaaagggaagggaggagcactggctgctgacattgacattgacactgttggtacagagggctggggagaggatgcagagctgcagttggatgaagatgggtttgtggaggctacagaaggtttgggggatgatgctcttggcaagggacaggaagaaggaggtggctgggatgtagaagaagatctggagctccctcctgagctggatatatcccctggggcagctggtggggctgaagatggtttctttgtgcccccaaccaagggaacaagtccaactcagatctggtgtaataactctcagcttccagttgatcacatcctggcaggctctttcgaaacagccatgcggctccttcatgaccaagtaggggtaatccagtttggcccctacaagcaactgttcctacagacatacgcccgaggccgcacaacctatcaggctctgccctgcctaccctccatgtatggctatcctaatcgcaactggaaggatgcagggctgaagaatggtgtaccagctgtgggcctgaagcttaatgacctcatccaacggttgcagctgtgctaccagctcaccacagttggcaaatttgaggaggctgtggaaaaattccgttccatccttctcagtgtgccacttcttgttgtggacaataaacaagagattgcagaggcccagcagctcatcaccatttgccgtgagtacattgtgggtttgtccgtggagacagaaaggaagaagctgcccaaagagactctagaacagcagaagcgcatctgtgagatggcagcctatttcacccactcaaacctgcagcctgtgcacatgatcctggtgctgcgtacagccctcaatctgttcttcaagctcaagaacttcaagacagctgccacctttgctcggcgcctactagaactcgggcccaagcctgaggtggcccaacagacccgaaaaatcctgtctgcctgtgagaagaatcccacagatgcctaccagctcaattatgacatgcacaacccctttgacatttgtgctgcatcatatcggcccatctaccgtggaaagccagtagaaaagtgtccactcagtggggcctgctattcccctgagttcaaaggtcaaatctgcagggtcaccacagtgacagagattggcaaagatgtgattggtttaaggatcagtcctctgcagtttcgctaaggccccctttgtgtgcatgggtcagtcaccatatgttccccccagagaatgtgtctatatcctccttctaacagcaccttccccctgcagctactcttcagatctggctctctgtaccctaaaacctagtatctttttctcttctatggaaaatccgaaggtctaaacttgacttttttgaggtcttctcaacttgactacagttgtgctcataattgtccttgcctttccagcttaattattttaaggaacaaatgaaaactctgggctgggtggagtggctcatacctgtaatcccagcactttgggaggctacggtgggcagatcatctgaggccaggagttcgagacctgcctggccaacatggcaacaccccgtctctaataaaaatataaaaattagcctggcatggtagcatgcgcctatagtcccagctgctcaggaggctgaggcatgagaatcgcttgaacctaggaggtggaggttgcattcaactgagatcataccacttcattccagcctgggtgacagagcaagactctgtctcaaaaaaaaaaaaaggaaaactctgtgatggacatttgtttagtaaatcccttcagtatttatccctcctttccccacagcagctttctttcctgtcaactagaaaggagcaggatgtaataaatacattttggtgtgactaggccacaccaactcttaatcatctcccattttccttagacatttaaatttcaaggcaggtaccctctgtgtactcagaaatttgaagaagttatttggttttccaaaatgcacactgcgggttattgatttgttctttacaactattgttctcatatttctcacactaaataaatctctatgagagcttct

SEQ ID NO: 405947 - DNA, 1819 bp, Homo sapiens
gtctctctctctctctctctctctctctctctctctcagcttccagttgatcacatcctggcaggctctttcgaaacagccatgcggctccttcatgaccaagtaggggtaatccagtttggcccctacaagcaactgttcctacagacatacgcccgaggccgcacaacctatcaggctctgccctgcctaccctccatgtatggctatcctaatcgcaactggaaggatgcagggctgaagaatggtgtaccagctgtgggcctgaagcttaatgacctcatccaacggttgcagctgtgctaccagctcaccacagttggcaaatttgaggaggctgtggaaaaattccgttccatccttctcagtgtgccacttcttgttgtggacaataaacaagagattgcagaggcccagcagctcatcaccatttgccgtgagtacattgtgggtttgtccgtggagacagaaaggaagaagctgcccaaagagactctagaacagcagaagcgcatctgtgagatggcagcctatttcacccactcaaacctgcagcctgtgcacatgatcctggtgctgcgtacagccctcaatctgttcttcaagctcaagaacttcaagacagctgccacctttgctcggcgcctactagaactcgggcccaagcctgaggtggcccaacagacccgaaaaatcctgtctgcctgtgagaagaatcccacagatgcctaccagctcaattatgacatgcacaacccctttgacatttgtgctgcatcatatcggcccatctaccgtggaaagccagtagaaaagtgtccactcagtggggcctgctattcccctgagttcaaaggtcaaatctgcagggtcaccacagtgacagagattggcaaagatgtgattggtttaaggatcagtcctctgcagtttcgctaaggccccctttgtgtgcatgggtcagtcaccatatgttccccccagagaatgtgtctatatcctccttctaacagcaccttccccctgcagctactcttcagatctggctctctgtaccctaaaacctagtatctttttctcttctatggaaaatccgaaggtctaaacttgacttttttgaggtcttctcaacttgactacagttgtgctcataattgtccttgcctttccagcttaattattttaaggaacaaatgaaaactctgggctgggtggagtggctcatacctgtaatcccagcactttgggaggctacggtgggcagatcatctgaggccaggagttcgagacctgcctggccaacatggcaacaccccgtctctaataaaaatataaaaattagcctggcatggtagcatgcgcctatagtcccagctgctcaggaggctgaggcatgagaatcgcttgaacctaggaggtggaggttgcattcaactgagatcataccacttcattccagcctgggtgacagagcaagactctgtctcaaaaaaaaaaaaaggaaaactctgtgatggacatttgtttagtaaatcccttcagtatttatccctcctttccccacagcagctttctttcctgtcaactagaaaggagcaggatgtaataaatacattttggtgtgactaggccacaccaactcttaatcatctcccattttccttagacatttaaatttcaaggcaggtaccctctgtgtactcagaaatttgaagaagttatttggttttccaaaatgcacactgcgggttattgatttgttctttacaactattgttctcatatttctcacactaaataaatctctatgagagcttct

SEQ ID NO: 405948 - DNA, 3998 bp, Homo sapiens
gagaaggggaccttcaggtccaggcaaagggggaacttctgtcgtgggaacgaaaaagaaagaggatttacagggtggggggacagaggggcagcaggaaccagaagggagacagtggcggtcgcaccggggccgatccgagagttccccttagagaacggagctcacgggcggggaggcctcacctgctagtaggacgcagaaagacagaaggcgaaggagaccccctgccgtagccatcttgcctctctgctgagcggaagcccccgttcggctcctgtctgttagcggcctctctaggctaccactgacaccgtctctgtggcccggagcctaagagaccggaagttcgtgtttccaggcgcttccggaaaccgcgggagagggtcgctgacgtggaggcgtccgaagggcagcagggtgtgtcggggctcggattaagacatcggagtcggagacctgagagatgttaaccaaattcgagaccaagagcgcgcgggtcaaagggctcagctttcaccccaaaagaccttggatcctgactagtttacataatggggtcatccagttatgggactatcggatgtgcactctcattgacaagtttgatgaacatgatggtccagtgcgaggcattgacttccataagcagcagccactgttcgtctctggaggagatgactataagattaaggtttggaattacaagcttcggcgctgtcttttcacattgcttgggcacttagattatattcgcaccacgttttttcatcatgaatatccctggattctgagtgcctccgatgatcagaccatccgagtgtggaactggcaatctagaacctgtgtttgtgtgttaacagggcacaaccattatgtgatgtgtgctcagttccaccccacagaagacttggtagtatcagccagcctggaccagactgtgcgcgtttgggatatttctggtctgaggaaaaaaaacctgtcccctggtgcggtggaatcggatgtgagaggaataactggggttgatctatttggaactacagatgcagtggtgaagcatgtactagagggtcacgatcgtggagtaaactgggctgccttccaccccactatgccccttattgtatctggggcagatgatcgtcaagtgaagatctggcgcatgaatgaatcaaaggcatgggaggttgatacctgccggggccattacaacaatgtatcttgtgccgtcttccaccctcgccaagagttgatcctcagcaattctgaggacaagagtattcgagtctgggatatgtctaagcggactggggttcagactttccgcagagaccatgatcgtttctgggtcctagctgctcaccctaaccttaacctctttgcagcaggccatgatggtggtatgattgtgtttaagctggaacgggaacggccagcctatgctgttcatggcaatatgctacactatgtcaaggaccgattcttacgacagctggatttcaacagctccaaagatgtagctgtgatgcagttgcggagtggttccaagtttccagtattcaatatgtcatacaatccagcagaaaatgcagtcctgctttgtacaagagctagcaatctagagaatagtacctatgacctgtacaccatccctaaagatgctgactcccagaatcctgatgcgcctgaagggaaacgatcctcaggcctgacagccgtttgggtcgctcgaaatcggtttgctgtcctagatcggatgcattcgcttctgatcaagaatctgaagaatgagatcaccaaaaaggtacaggtgcccaactgtgatgagatcttctatgctggcacaggcaatctcctgcttcgagatgcggactctatcacactctttgacgtacagcagaagcggactctggcatctgtgaagatttctaaagtgaaatacgttatctggtcagcagacatgtcacatgtagcactactagccaaacacgccattgtgatctgtaaccgcaaactggatgctttatgtaacattcatgagaacattcgtgtcaagagtggggcctgggatgagagtggggtatttatctataccacaagcaaccacatcaaatatgctgtcaccactggggaccacgggatcattcgaactctggatttacccatctatgtcacacgggtgaagggcaacaatgtatactgcctagacagggagtgtcgtccccgggtactcaccattgatcccactgagttcaaattcaagctggccctgatcaacagaaaatatgatgaggtactgcacatggtgaggaatgccaaactagttggccagtctattattgcttatctccagaagaagggctatcctgaagtggcactgcattttgtcaaggatgagaaaactcgctttagtctggcactggagtgtggaaacattgagattgctctggaagcagccaaagcactggatgacaagaactgctgggaaaagctgggagaagtggccctgctgcaggggaaccaccagattgtggaaatgtgctatcagcgtaccaaaaactttgacaaactttccttcctgtatcttatcactggcaacttagaaaaacttcgcaagatgatgaagattgctgagatcagaaaggacatgagtggccactatcagaatgccctatacctgggtgatgtgtcagagcgtgtgcggatcctgaagaactgtggacagaagtccctggcctatctcacagctgctacccatggcttagatgaagaagctgagagcctaaaggagacatttgacccagagaaggagacaatcccagacattgaccctaatgccaagctgctccagccacctgcacctatcatgccattggataccaattggcctttattgactgtatccaaaggattttttgaaggcaccattgccagcaaagggaagggaggagcactggctgctgacattgacattgacactgttggtacagagggctggggagaggatgcagagctgcagttggatgaagatgggtttgtggaggctacagaaggtttgggggatgatgctcttggcaagggacaggaagaaggaggtggctgggatgtagaagaagatctggagctccctcctgagctggatatatcccctggggcagctggtggggctgaagatggtttctttgtgcccccaaccaagggaacaagtccaactcagatctggtgtaataactctcagcttccagttgatcacatcctggcaggctctttcgaaacagccatgcggctccttcatgaccaagtaggggtaatccagtttggcccctacaagcaactgttcctacagacatacgcccgaggccgcacaacctatcaggctctgccctgcctaccctccatgtatggctatcctaatcgcaactggaaggatgcagggctgaagaatggtgtaccagctgtgggcctgaagcttaatgacctcatccaacggttgcagctgtgctaccagctcaccacagttggcaaatttgaggaggctgtggaaaaattccgttccatccttctcagtgtgccacttcttgttgtggacaataaacaagagattgcagaggcccagcagctcatcaccatttgccgtgagtacattgtgggtttgtccgtggagacagaaaggaagaagctgcccaaagagactctagaacagcagaagcgcatctgtgagatggcagcctatttcacccactcaaacctgcagcctgtgcacatgatcctggtgctgcgtacagccctcaatctgttcttcaagctcaagaacttcaagacagctgccacctttgctcggcgcctactagaactcgggcccaagcctgaggtggcccaacaggtagatggaactccttcagtgaccatagggaagccagatcagctcttacatggagggagcagaccaaggtccttgcctctgaaacaaagcaataaataacaacattcaacaa

SEQ ID NO: 405949 - DNA, 3683 bp, Homo sapiens
gagaaggggaccttcaggtccaggcaaagggggaacttctgtcgtgggaacgaaaaagaaagaggatttacagggtggggggacagaggggcagcaggaaccagaagggagacagtggcggtcgcaccggggccgatccgagagttccccttagagaacggagctcacgggcggggaggcctcacctgctagtaggacgcagaaagacagaaggcgaaggagaccccctgccgtagccatcttgcctctctgctgagcggaagcccccgttcggctcctgtctgttagcggcctctctaggctaccactgacaccgtctctgtggcccggagcctaagagaccggaagttcgtgtttccaggcgcttccggaaaccgcgggagagggtcgctgacgtggaggcgtccgaagggcagcagggtgtgtcggggctcggattaagacatcggagtcggagacctgagagatgttaaccaaattcgagaccaagagcgcgcgggtcaaagggctcagctttcaccccaaaagaccttggatcctgactagtttacataatggggtcatccagttatgggactatcggatgtgcactctcattgacaagtttgatgaacatgatggtccagtgcgaggcattgacttccataagcagcagccactgttcgtctctggaggagatgactataagattaaggtttggaattacaagcttcggcgctgtcttttcacattgcttgggcacttagattatattcgcaccacgttttttcatcatgaatatccctggattctgagtgcctccgatgatcagaccatccgagtgtggaactggcaatctagaacctgtgtttgtgtgttaacagggcacaaccattatgtgatgtgtgctcagttccaccccacagaagacttggtagtatcagccagcctggaccagactgtgcgcgtttgggatatttctggtctgaggaaaaaaaacctgtcccctggtgcggtggaatcggatgtgagaggaataactggggttgatctatttggaactacagatgcagtggtgaagcatgtactagagggtcacgatcgtggagtaaactgggctgccttccaccccactatgccccttattgtatctggggcagatgatcgtcaagtgaagatctggcgcatgaatgaatcaaaggcatgggaggttgatacctgccggggccattacaacaatgtatcttgtgccgtcttccaccctcgccaagagttgatcctcagcaattctgaggacaagagtattcgagtctgggatatgtctaagcggactggggttcagactttccgcagagaccatgatcgtttctgggtcctagctgctcaccctaaccttaacctctttgcagcaggccatgatggtggtatgattgtgtttaagctggaacgggaacggccagcctatgctgttcatggcaatatgctacactatgtcaaggaccgattcttacgacagctggatttcaacagctccaaagatgtagctgtgatgcagttgcggagtggttccaagtttccagtattcaatatgtcatacaatccagcagaaaatgcagtcctgctttgtacaagagctagcaatctagagaatagtacctatgacctgtacaccatccctaaagatgctgactcccagaatcctgatgcgcctgaagggaaacgatcctcaggcctgacagccgtttgggtcgctcgaaatcggtttgctgtcctagatcggatgcattcgcttctgatcaagaatctgaagaatgagatcaccaaaaaggtacaggtgcccaactgtgatgagatcttctatgctggcacaggcaatctcctgcttcgagatgcggactctatcacactctttgacgtacagcagaagcggactctggcatctgtgaagatttctaaagtgaaatacgttatctggtcagcagacatgtcacatgtagcactactagccaaacacgccattgtgatctgtaaccgcaaactggatgctttatgtaacattcatgagaacattcgtgtcaagagtggggcctgggatgagagtggggtatttatctataccacaagcaaccacatcaaatatgctgtcaccactggggaccacgggatcattcgaactctggatttacccatctatgtcacacgggtgaagggcaacaatgtatactgcctagacagggagtgtcgtccccgggtactcaccattgatcccactgagttcaaattcaagctggccctgatcaacagaaaatatgatgaggtactgcacatggtgaggaatgccaaactagttggccagtctattattgcttatctccagaagaagggctatcctgaagtggcactgcattttgtcaaggatgagaaaactcgctttagtctggcactggagtgtggaaacattgagattgctctggaagcagccaaagcactggatgacaagaactgctgggaaaagctgggagaagtggccctgctgcaggggaaccaccagattgtggaaatgtgctatcagcgtaccaaaaactttgacaaactttccttcctgtatcttatcactggcaacttagaaaaacttcgcaagatgatgaagattgctgagatcagaaaggacatgagtggccactatcagaatgccctatacctgggtgatgtgtcagagcgtgtgcggatcctgaagaactgtggacagaagtccctggcctatctcacagctgctacccatggcttagatgaagaagctgagagcctaaaggagacatttgacccagagaaggagacaatcccagacattgaccctaatgccaagctgctccagccacctgcacctatcatgccattggataccaattggcctttattgactgtatccaaaggattttttgaaggcaccattgccagcaaagggaagggaggagcactggctgctgacattgacattgacactgttggtacagagggctggggagaggatgcagagctgcagttggatgaagatgggtttgtggaggctacagaaggtttgggggatgatgctcttggcaagggacaggaagaaggaggtggctgggatgtagaagaagatctggagctccctcctgagctggatatatcccctggggcagctggtggggctgaagatggtttctttgtgcccccaaccaagggaacaagtccaactcagatctggtgtaataactctcagcttccagttgatcacatcctggcaggctctttcgaaacagccatgcggctccttcatgaccaagtaggggtaatccagtttggcccctacaagcaactgttcctacagacatacgcccgaggccgcacaacctatcaggctctgccctgcctaccctccatgtatggctatcctaatcgcaactggtaaggcccttttctctttgctttcatctgttccaagttgtggtcgatatttcagatggtagcctcagtgacatagtcagaattctctcagagctagggtttcccagtagaaaaagatctttggtttgttactctatggggttggtttacacctgctgtcatcctcttccccagctactttaacaggagacaggagggtagctatgaggatgtttgccagaaaaggaaattgggtcctagttgcctactgactatcc

SEQ ID NO: 405950 - DNA, 1153 bp, Homo sapiens
tggtggtcctttttttcttcttgtgcttgtcccctgctccctgaggcagtgacactggagaaagctagagcatctccccactgctcttggccagtcagtgatgaacaccccaatacctgtctactgtgcccattgaggggtatagggaatacattttctagggttctcaatcttacaaatctctaacttgttcctttgtttgtttttccacaggtgacagagattggcaaagatgtgattggtttaaggatcagtcctctgcagtttcgctaaggccccctttgtgtgcatgggtcagtcaccatatgttccccccagagaatgtgtctatatcctccttctaacagcaccttccccctgcagctactcttcagatctggctctctgtaccctaaaacctagtatctttttctcttctatggaaaatccgaaggtctaaacttgacttttttgaggtcttctcaacttgactacagttgtgctcataattgtccttgcctttccagcttaattattttaaggaacaaatgaaaactctgggctgggtggagtggctcatacctgtaatcccagcactttgggaggctacggtgggcagatcatctgaggccaggagttcgagacctgcctggccaacatggcaacaccccgtctctaataaaaatataaaaattagcctggcatggtagcatgcgcctatagtcccagctgctcaggaggctgaggcatgagaatcgcttgaacctaggaggtggaggttgcattcaactgagatcataccacttcattccagcctgggtgacagagcaagactctgtctcaaaaaaaaaaaaaggaaaactctgtgatggacatttgtttagtaaatcccttcagtatttatccctcctttccccacagcagctttctttcctgtcaactagaaaggagcaggatgtaataaatacattttggtgtgactaggccacaccaactcttaatcatctcccattttccttagacatttaaatttcaaggcaggtaccctctgtgtactcagaaatttgaagaagttatttggttttccaaaatgcacactgcgggttattgatttgttctttacaactattgttctcatatttctcacactaaataaatctctatgagagcttct

SEQ ID NO: 405951 - DNA, 977 bp, Homo sapiens
caggcacttttttaaaagacagaatattctgaactgagtgacagagattggcaaagatgtgattggtttaaggatcagtcctctgcagtttcgctaaggccccctttgtgtgcatgggtcagtcaccatatgttccccccagagaatgtgtctatatcctccttctaacagcaccttccccctgcagctactcttcagatctggctctctgtaccctaaaacctagtatctttttctcttctatggaaaatccgaaggtctaaacttgacttttttgaggtcttctcaacttgactacagttgtgctcataattgtccttgcctttccagcttaattattttaaggaacaaatgaaaactctgggctgggtggagtggctcatacctgtaatcccagcactttgggaggctacggtgggcagatcatctgaggccaggagttcgagacctgcctggccaacatggcaacaccccgtctctaataaaaatataaaaattagcctggcatggtagcatgcgcctatagtcccagctgctcaggaggctgaggcatgagaatcgcttgaacctaggaggtggaggttgcattcaactgagatcataccacttcattccagcctgggtgacagagcaagactctgtctcaaaaaaaaaaaaaggaaaactctgtgatggacatttgtttagtaaatcccttcagtatttatccctcctttccccacagcagctttctttcctgtcaactagaaaggagcaggatgtaataaatacattttggtgtgactaggccacaccaactcttaatcatctcccattttccttagacatttaaatttcaaggcaggtaccctctgtgtactcagaaatttgaagaagttatttggttttccaaaatgcacactgcgggttattgatttgttctttacaactattgttctcatatttctcacactaaataaatctctatgagagcttct

SEQ ID NO: 405952 - DNA, 976 bp, Homo sapiens
cctagttttagaagtttcaatagcagggtcaccacagtgacagagattggcaaagatgtgattggtttaaggatcagtcctctgcagtttcgctaaggccccctttgtgtgcatgggtcagtcaccatatgttccccccagagaatgtgtctatatcctccttctaacagcaccttccccctgcagctactcttcagatctggctctctgtaccctaaaacctagtatctttttctcttctatggaaaatccgaaggtctaaacttgacttttttgaggtcttctcaacttgactacagttgtgctcataattgtccttgcctttccagcttaattattttaaggaacaaatgaaaactctgggctgggtggagtggctcatacctgtaatcccagcactttgggaggctacggtgggcagatcatctgaggccaggagttcgagacctgcctggccaacatggcaacaccccgtctctaataaaaatataaaaattagcctggcatggtagcatgcgcctatagtcccagctgctcaggaggctgaggcatgagaatcgcttgaacctaggaggtggaggttgcattcaactgagatcataccacttcattccagcctgggtgacagagcaagactctgtctcaaaaaaaaaaaaaggaaaactctgtgatggacatttgtttagtaaatcccttcagtatttatccctcctttccccacagcagctttctttcctgtcaactagaaaggagcaggatgtaataaatacattttggtgtgactaggccacaccaactcttaatcatctcccattttccttagacatttaaatttcaaggcaggtaccctctgtgtactcagaaatttgaagaagttatttggttttccaaaatgcacactgcgggttattgatttgttctttacaactattgttctcatatttctcacactaaataaatctctatgagagcttct

SEQ ID NO: 405953 - DNA, 893 bp, Homo sapiens
gcaccttctctggggggaacatatggtgactgacccatgcacacaaagggggccttagcgaatgtgtctatatcctccttctaacagcaccttccccctgcagctactcttcagatctggctctctgtaccctaaaacctagtatctttttctcttctatggaaaatccgaaggtctaaacttgacttttttgaggtcttctcaacttgactacagttgtgctcataattgtccttgcctttccagcttaattattttaaggaacaaatgaaaactctgggctgggtggagtggctcatacctgtaatcccagcactttgggaggctacggtgggcagatcatctgaggccaggagttcgagacctgcctggccaacatggcaacaccccgtctctaataaaaatataaaaattagcctggcatggtagcatgcgcctatagtcccagctgctcaggaggctgaggcatgagaatcgcttgaacctaggaggtggaggttgcattcaactgagatcataccacttcattccagcctgggtgacagagcaagactctgtctcaaaaaaaaaaaaaggaaaactctgtgatggacatttgtttagtaaatcccttcagtatttatccctcctttccccacagcagctttctttcctgtcaactagaaaggagcaggatgtaataaatacattttggtgtgactaggccacaccaactcttaatcatctcccattttccttagacatttaaatttcaaggcaggtaccctctgtgtactcagaaatttgaagaagttatttggttttccaaaatgcacactgcgggttattgatttgttctttacaactattgttctcatatttctcacactaaataaatctctatgagagcttct

SEQ ID NO: 405954 - DNA, 2792 bp, Homo sapiens
gagaaggggaccttcaggtccaggcaaagggggaacttctgtcgtgggaacgaaaaagaaagaggatttacagggtggggggacagaggggcagcaggaaccagaagggagacagtggcggtcgcaccggggccgatccgagagttccccttagagaacggagctcacgggcggggaggcctcacctgctagtaggacgcagaaagacagaaggcgaaggagaccccctgccgtagccatcttgcctctctgctgagcggaagcccccgttcggctcctgtctgttagcggcctctctaggctaccactgacaccgtctctgtggcccggagcctaagagaccggaagttcgtgtttccaggcgcttccggaaaccgcgggagagggtcgctgacgtggaggcgtccgaagggcagcagggtgtgtcggggctcggattaagacatcggagtcggagacctgagagatgttaaccaaattcgagaccaagagcgcgcgggtcaaagggctcagctttcaccccaaaagaccttggatcctgactagtttacataatggggtcatccagttatgggactatcggatgtgcactctcattgacaagtttgatgaacatgatggtccagtgcgaggcattgacttccataagcagcagccactgttcgtctctggaggagatgactataagattaaggtttggaattacaagcttcggcgctgtcttttcacattgcttgggcacttagattatattcgcaccacgttttttcatcatgaatatccctggattctgagtgcctccgatgatcagaccatccgagtgtggaactggcaatctagaacctgtgtttgtgtgttaacagggcacaaccattatgtgatgtgtgctcagttccaccccacagaagacttggtagtatcagccagcctggaccagactgtgcgcgtttgggatatttctggtctgaggaaaaaaaacctgtcccctggtgcggtggaatcggatgtgagaggaataactggggttgatctatttggaactacagatgcagtggtgaagcatgtactagagggtcacgatcgtggagtaaactgggctgccttccaccccactatgccccttattgtatctggggcagatgatcgtcaagtgaagatctggcgcatgaatgaatcaaaggcatgggaggttgatacctgccggggccattacaacaatgtatcttgtgccgtcttccaccctcgccaagagttgatcctcagcaattctgaggacaagagtattcgagtctgggatatgtctaagcggactggggttcagactttccgcagagaccatgatcgtttctgggtcctagctgctcaccctaaccttaacctctttgcagcaggccatgatggtggtatgattgtgtttaagctggaacgggaacggccagcctatgctgttcatggcaatatgctacactatgtcaaggaccgattcttacgacagctggatttcaacagctccaaagatgtagctgtgatgcagttgcggagtggttccaagtttccagtattcaatatgtcatacaatccagcagaaaatgcagtcctgctttgtacaagagctagcaatctagagaatagtacctatgacctgtacaccatccctaaagatgctgactcccagaatcctgatgcgcctgaagggaaacgatcctcaggcctgacagccgtttgggtcgctcgaaatcggtttgctgtcctagatcggatgcattcgcttctgatcaagaatctgaagaatgagatcaccaaaaaggtacaggtgcccaactgtgatgagatcttctatgctggcacaggcaatctcctgcttcgagatgcggactctatcacactctttgacgtacagcagaagcggactctggcatctgtgaagatttctaaagtgaaatacgttatctggtcagcagacatgtcacatgtagcactactagccaaacacgccattgtgatctgtaaccgcaaactggatgctttatgtaacattcatgagaacattcgtgtcaagagtggggcctgggatgagagtggggtatttatctataccacaagcaaccacatcaaatatgctgtcaccactggggaccacgggatcattcgaactctggatttacccatctatgtcacacgggtgaagggcaacaatgtatactgcctagacagggagtgtcgtccccgggtactcaccattgatcccactgagttcaaattcaagctggccctgatcaacagaaaatatgatgaggtactgcacatggtgaggaatgccaaactagttggccagtctattattgcttatctccagaagaagggctatcctgaagtggcactgcattttgtcaaggatgagaaaactcgctttagtctggcactggagtgtggaaacattgaggtgagaggaatatggtcatcagccccatattgtcttagaggtgagagagttagagtgccattgggagggcattattctgggcttgcttctttagccagaataatgaaatttgggattttttttagttgttacattgagccatcttcctgttgctatttgcccatctctacttttacctgcctctgcttctgccaccgcatttctatttttgtcaacctcaattagtgtgaattcagtaacttctaggataaaagcaagatggcatggaatttgaaaatcttattatttccttgacacttgatcttgctgactggctacttagatgaaagagtacctactaagcgttggg

SEQ ID NO: 405955 - DNA, 2104 bp, Homo sapiens
gagaaggggaccttcaggtccaggcaaagggggaacttctgtcgtgggaacgaaaaagaaagaggatttacagggtggggggacagaggggcagcaggaaccagaagggagacagtggcggtcgcaccggggccgatccgagagttccccttagagaacggagctcacgggcggggaggcctcacctgctagtaggacgcagaaagacagaaggcgaaggagaccccctgccgtagccatcttgcctctctgctgagcggaagcccccgttcggctcctgtctgttagcggcctctctaggctaccactgacaccgtctctgtggcccggagcctaagagaccggaagttcgtgtttccaggcgcttccggaaaccgcgggagagggtcgctgacgtggaggcgtccgaagggcagcagggtgtgtcggggctcggattaagacatcggagtcggagacctgagagatgttaaccaaattcgagaccaagagcgcgcgggtcaaagggctcagctttcaccccaaaagaccttggatcctgactagtttacataatggggtcatccagttatgggactatcggatgtgcactctcattgacaagtttgatgaacatgatggtccagtgcgaggcattgacttccataagcagcagccactgttcgtctctggaggagatgactataagattaaggtttggaattacaagcttcggcgctgtcttttcacattgcttgggcacttagattatattcgcaccacgttttttcatcatgaatatccctggattctgagtgcctccgatgatcagaccatccgagtgtggaactggcaatctagaacctgtgtttgtgtgttaacagggcacaaccattatgtgatgtgtgctcagttccaccccacagaagacttggtagtatcagccagcctggaccagactgtgcgcgtttgggatatttctggtctgaggaaaaaaaacctgtcccctggtgcggtggaatcggatgtgagaggaataactggggttgatctatttggaactacagatgcagtggtgaagcatgtactagagggtcacgatcgtggagtaaactgggctgccttccaccccactatgccccttattgtatctggggcagatgatcgtcaagtgaagatctggcgcatgaatgaatcaaaggcatgggaggttgatacctgccggggccattacaacaatgtatcttgtgccgtcttccaccctcgccaagagttgatcctcagcaattctgaggacaagagtattcgagtctgggatatgtctaagcggactggggttcagactttccgcagagaccatgatcgtttctgggtcctagctgctcaccctaaccttaacctctttgcagcaggccatgatggtggtatgattgtgtttaagctggaacgggaacggccagcctatgctgttcatggcaatatgctacactatgtcaaggaccgattcttacgacagctggatttcaacagctccaaagatgtagctgtgatgcagttgcggagtggttccaagtttccagtattcaatatgtcatacaatccagcagaaaatgcagtcctgctttgtacaagagctagcaatctagagaatagtacctatgacctgtacaccatccctaaagatgctgactcccagaatcctgatgcgcctgaagggaaacgatcctcaggcctgacagccgtttgggtcgctcgaaatcggtttgctgtcctagatcggatgcattcgcttctgatcaagaatctgaagaatgagatcaccaaaaaggtacaggtgcccaactgtgatgagatcttctatgctggcacaggcaatctcctgcttcgagatgcggactctatcacactctttgacgtacagcagaagcggactctggcatctgtgaagatttctaaagtgaaatacgttatctggtcagcagacatgtcacatgtagcactactagccaaacacgccattgtgatctgtaaccgcaaactggatgctttgaaaattacttggttgaagtaaaaaaactgtcccatcctttatcctgtgtgccataataaaatagtaaaaaaccta

SEQ ID NO: 405956 - DNA, 1599 bp, Homo sapiens
gagaaggggaccttcaggtccaggcaaagggggaacttctgtcgtgggaacgaaaaagaaagaggatttacagggtggggggacagaggggcagcaggaaccagaagggagacagtggcggtcgcaccggggccgatccgagagttccccttagagaacggagctcacgggcggggaggcctcacctgctagtaggacgcagaaagacagaaggcgaaggagaccccctgccgtagccatcttgcctctctgctgagcggaagcccccgttcggctcctgtctgttagcggcctctctaggctaccactgacaccgtctctgtggcccggagcctaagagaccggaagttcgtgtttccaggcgcttccggaaaccgcgggagagggtcgctgacgtggaggcgtccgaagggcagcagggtgtgtcggggctcggattaagacatcggagtcggagacctgagagatgttaaccaaattcgagaccaagagcgcgcgggtcaaagggctcagctttcaccccaaaagaccttggatcctgactagtttacataatggggtcatccagttatgggactatcggatgtgcactctcattgacaagtttgatgaacatgatggtccagtgcgaggcattgacttccataagcagcagccactgttcgtctctggaggagatgactataagattaaggtttggaattacaagcttcggcgctgtcttttcacattgcttgggcacttagattatattcgcaccacgttttttcatcatgaatatccctggattctgagtgcctccgatgatcagaccatccgagtgtggaactggcaatctagaacctgtgtttgtgtgttaacagggcacaaccattatgtgatgtgtgctcagttccaccccacagaagacttggtagtatcagccagcctggaccagactgtgcgcgtttgggatatttctggtctgaggaaaaaaaacctgtcccctggtgcggtggaatcggatgtgagaggaataactggggttgatctatttggaactacagatgcagtggtgaagcatgtactagagggtcacgatcgtggagtaaactgggctgccttccaccccactatgccccttattgtatctggggcagatgatcgtcaagtgaagatctggcgcatgaatgaatcaaaggcatgggaggttgatacctgccggggccattacaacaatgtatcttgtgccgtcttccaccctcgccaagagttgatcctcagcaattctgaggacaagagtattcgagtctgggatatgtctaagcggactggggttcagactttccgcagagaccatgatcgtttctgggtcctagctgctcaccctaaccttaacctctttgcagcaggccatgatggtggtatgattgtgtttaagctggaacgggaacggccagcctatgctgttcatggcaatatgctacactatgtcaaggaccgattcttacgacagctggatttcaacagctccaaagatgtagctgtgatgcagttgcggaggtaaatcggacttgtttctttcctccaaaccctctcatctgtcaccctgatacaact

SEQ ID NO: 405957 - DNA, 683 bp, Homo sapiens
gtgactctagtggatcccgagtgtcttcaagaagtgattcaaattgctgctcagattttaaaacttacttgtaactatcagtgtaaagacccatgcctggatccctgtatcatttagatatcaacttggtaaaaatgctgtgcttgacaccctgtcctctctatcctccctcaaaccacatgtgatctctgaaaaaataaaattagccaagtgtggtagtgcacgcctgcggtcccagctgctcaggaggctgaggcatgagaatcgcttgaacctaggaggtggaggttgcattcaactgagatcataccacttcattccagcctgggtgacagagcaagactctgtctcaaaaaaaaaaaaaggaaaactctgtgatggacatttgtttagtaaatcccttcagtatttatccctcctttccccacagcagctttctttcctgtcaactagaaaggagcaggatgtaataaatacattttggtgtgactaggccacaccaactcttaatcatctcccattttccttagacatttaaatttcaaggcaggtaccctctgtgtactcagaaatttgaagaagttatttggttttccaaaatgcacactgcgggttattgatttgttctttacaactattgttctcatatttctcacactaaataaatctctatgagagcttct

SEQ ID NO: 405958 - DNA, 1107 bp, Homo sapiens
  misc_feature (1080)..(1080): n is a, c, g, or t
  misc_feature (1093)..(1093): n is a, c, g, or t
gagaaggggaccttcaggtccaggcaaagggggaacttctgtcgtgggaacgaaaaagaaagaggatttacagggtggggggacagaggggcagcaggaaccagaagggagacagtggcggtcgcaccggggccgatccgagagttccccttagagaacggagctcacgggcggggaggcctcacctgctagtaggacgcagaaagacagaaggcgaaggagaccccctgccgtagccatcttgcctctctgctgagcggaagcccccgttcggctcctgtctgttagcggcctctctaggctaccactgacaccgtctctgtggcccggagcctaagagaccggaagttcgtgtttccaggcgcttccggaaaccgcgggagagggtcgctgacgtggaggcgtccgaagggcagcagggtgtgtcggggctcggattaagacatcggagtcggagacctgagagatgttaaccaaattcgagaccaagagcgcgcgggtcaaagggctcagctttcaccccaaaagaccttggatcctgactagtttacataatggggtcatccagttatgggactatcggatgtgcactctcattgacaagtttgatgaacatgatggtccagtgcgaggcattgacttccataagcagcagccactgttcgtctctggaggagatgactataagattaaggtttggaattacaagcttcggcgctgtcttttcacattgcttgggcacttagattatattcgcaccacgttttttcatcatgaatatccctggattctgagtgcctccgatgatcagaccatccgagtgtggaactggcaatctagaacctgtgtttgtgtgttaacagggcacaaccattatgtgatgtgtgctcagttccaccccacagaagacttggtagtatcagccagcctggaccagactgtgcgcgtttgggatatttctggtctgaggaaaaaaaacctgtcccctggtgcggtggaatcggatgtgagaggaataactggggttgatctatttggaactacagatgcagtggtgaagcatgtactagagggtcacgnacagtggtctggntcctctagagtcgc

SEQ ID NO: 405959 - DNA, 1123 bp, Homo sapiens
gagaaggggaccttcaggtccaggcaaagggggaacttctgtcgtgggaacgaaaaagaaagaggatttacagggtggggggacagaggggcagcaggaaccagaagggagacagtggcggtcgcaccggggccgatccgagagttccccttagagaacggagctcacgggcggggaggcctcacctgctagtaggacgcagaaagacagaaggcgaaggagaccccctgccgtagccatcttgcctctctgctgagcggaagcccccgttcggctcctgtctgttagcggcctctctaggctaccactgacaccgtctctgtggcccggagcctaagagaccggaagttcgtgtttccaggcgcttccggaaaccgcgggagagggtcgctgacgtggaggcgtccgaagggcagcagggtgtgtcggggctcggattaagacatcggagtcggagacctgagagatgttaaccaaattcgagaccaagagcgcgcgggtcaaagggctcagctttcaccccaaaagaccttggatcctgactagtttacataatggggtcatccagttatgggactatcggatgtgcactctcattgacaagtttgatgaacatgatggtccagtgcgaggcattgacttccataagcagcagccactgttcgtctctggaggagatgactataagattaaggtttggaattacaagcttcggcgctgtcttttcacattgcttgggcacttagattatattcgcaccacgttttttcatcatgaatatccctggattctgagtgcctccgatgatcagaccatccgagtgtggaactggcaatctagaacctgtgtttgtgtgttaacagggcacaaccattatgtgatgtgtgctcagttccaccccacagaagacttggtagtatcagccagcctggaccagactgtgcgcgtttgggatatttctggtctgaggaaaaaaaacctgtcccctggtgcggtggaatcggatgtgagaggaataactggggttgatctatttggacacatcacataatggttgtgccctgttaacacacaaacacaggttctagattaccagttccacactcggatggtctgagtcgac

SEQ ID NO: 405960 - DNA, 1494 bp, Homo sapiens
gagaaggggaccttcaggtccaggcaaagggggaacttctgtcgtgggaacgaaaaagaaagaggatttacagggtggggggacagaggggcagcaggaaccagaagggagacagtggcggtcgcaccggggccgatccgagagttccccttagagaacggagctcacgggcggggaggcctcacctgctagtaggacgcagaaagacagaaggcgaaggagaccccctgccgtagccatcttgcctctctgctgagcggaagcccccgttcggctcctgtctgttagcggcctctctaggctaccactgacaccgtctctgtggcccggagcctaagagaccggaagttcgtgtttccaggcgcttccggaaaccgcgggagagggtcgctgacgtggaggcgtccgaagggcagcagggtgtgtcggggctcggattaagacatcggagtcggagacctgagagatgttaaccaaattcgagaccaagagcgcgcgggtcaaagggctcagctttcaccccaaaagaccttggatcctgactagtttacataatggggtcatccagttatgggactatcggatgtgcactctcattgacaagtttgatgaacatgatggtccagtgcgaggcattgacttccataagcagcagccactgttcgtctctggaggagatgactataagattaaggtacagagggtctgtcataactgagaataaaggacagaggatgtgggaaggtttgggaatcatgaaaggaactgaaagacaggaaatttcattcatacagagctcaggcctttgacaacattatccggagaacttactcagcaaacatttattgaatgcttactgtgtaccagacactgttttcttttttgggaattcaaaaataaataagaaatggcttctgttttcaaggagcttttattctaatagagaagataaacatatatccaagtaatagcatgtacagtttggtaagcaatataatagagagatattcacagtgaaataggaaagagcagtataggtgcaaagacaaaaagcatgacacagctagatacagggcagctgttattggttttgtatggagaaaacctggagaaatggtgagagaaggggcagaagatgagaggggccagatcatggagtacctgtttgtggcgctcaggagtttagatgttatcatgcagataactaggagccatttgaggaacttaaatacaggagtgataccagatttatatgtttttaaaatgattacttggtggtaattaaagaaaagattggatgatttgggcaagacaggaggcaaaaataccagttaggaaacctgagcttaggtagtaggcaaaaaaaaaaacacaaacaacacaacacctgtgtgggggcctggggcccggaaaagggtttcaagaacaatgttggggcggggggcccagggcaggcaacccggacaaaggcgtccccgagaacccgggccaaga

SEQ ID NO: 405961 - DNA, 336 bp, Homo sapiens
aaaatatgatgaaggtatgaagtgaggatgcaaactagagtattaagagaggcagcactctttttttttttcttttcctgtaagtgatgtctacttcttgcccgactccaccccaaatgtctaggtactgcacatggtgaggaatgccaaactagttggccagtctattattgcttatctccagaagaagggctatcctgaagtggcactgcattttgtcaaggatgagaaaactcgctttagtctggcactggagtgtggaaacattgaggtgagaggaatatggtcatcagccccatattgtcttagaggtgagagagttagagtgccattggg

SEQ ID NO: 405962 - DNA, 691 bp, Homo sapiens
ggactataaccagttccgttctgttccttccctctgtagggaagggaggagcactggctgctgacattgacattgacactgttggtacagagggctggggagaggatgcagagctgcagttggatgaaggtaaaagtgctgttttaagactgttctggggtgatggacaccttggattgggactgggttgtgggtagctctgcagacttccaggccatgaaacgaactaggattgattttacttcctttggctaagattatgccactgcccaaatctgttttgagcttgaattttccttacagatgggtttgtggaggctacagaaggtttgggggatgatgctcttggcaagggacaggaagaaggaggtggctgggatgtagaagaagatctggagctccctcctgagctggtatgtggaatttgtacccttagaaggttctctccgtatctccctgtggaagccagaggccttattgtcccctaccactatcctcaggtctcctatcctatcccctaccactatcctaaggtcagcccttctgggaaggggactagaccctcctagtctgatgcttatctcccatttgaaagaaggaagatggctgggcacggtgactcatgcctgtaatcccagcactttgggaggctaaggcaggacaattgcttgagcccaggagttcaagacca

SEQ ID NO: 405963 - DNA, 360 bp, Homo sapiens
gtctgttaatttgtggagtagagagcatttcttactttcattcagataatatctgcatctttggaggataaagaaaataaagtgacatcagtgctgatgtgtttggcaaagagccctataactcatagatgtagaaacagtcaaatgccctctgggtgaagggtaagaaaagtatggtttcagattggtgtctgtgcaatggaactgttttctctgtcagagtaaattggaaaactggtatcttgggtgcttctcactaacattttaatttccccttttcttctacaagagctagcaatctagagaatagtacctatgacctgtacaccatccctaaagatgctgactcccagaatcctg

SEQ ID NO: 405964 - DNA, 250 bp, Homo sapiens
agtgtagtaagaaggaagtgtaaataagaaatacttccttttctcaacaatcttatagactccaaaaaggctaaattgtctttacatgttactttctgctttgcttgctgagacctgggaattttttgaaactggacagaaagaagtcagacaataaaataatattcccatcctagagttaaaggtagaagagtctttcacaggatcttaatttacatgattaactgtatataaatacacacacacacac

SEQ ID NO: 405965 - DNA, 5042 bp, Homo sapiens
gagaaggggaccttcaggtccaggcaaagggggaacttctgtcgtgggaacgaaaaagaaagaggatttacagggtggggggacagaggggcagcaggaaccagaagggagacagtggcggtcgcaccggggccgatccgagagttccccttagagaacggagctcacgggcggggaggcctcacctgctagtaggacgcagaaagacagaaggcgaaggagaccccctgccgtagccatcttgcctctctgctgagcggaagcccccgttcggctcctgtctgttagcggcctctctaggctaccactgacaccgtctctgtggcccggagcctaagagaccggaagttcgtgtttccaggcgcttccggaaaccgcgggagagggtcgctgacgtggaggcgtccgaagggcagcagggtgtgtcggggctcggattaagacatcggagtcggagacctgagagatgttaaccaaattcgagaccaagagcgcgcgggtcaaagggctcagctttcaccccaaaagaccttggatcctgactagtttacataatggggtcatccagttatgggactatcggatgtgcactctcattgacaagtttgatgaacatgatggtccagtgcgaggcattgacttccataagcagcagccactgttcgtctctggaggagatgactataagattaaggtttggaattacaagcttcggcgctgtcttttcacattgcttgggcacttagattatattcgcaccacgttttttcatcatgaatatccctggattctgagtgcctccgatgatcagaccatccgagtgtggaactggcaatctagaacctgtgtttgtgtgttaacagggcacaaccattatgtgatgtgtgctcagttccaccccacagaagacttggtagtatcagccagcctggaccagactgtgcgcgtttgggatatttctggtctgaggaaaaaaaacctgtcccctggtgcggtggaatcggatgtgagaggaataactggggttgatctatttggaactacagatgcagtggtgaagcatgtactagagggtcacgatcgtggagtaaactgggctgccttccaccccactatgccccttattgtatctggggcagatgatcgtcaagtgaagatctggcgcatgaatgaatcaaaggcatgggaggttgatacctgccggggccattacaacaatgtatcttgtgccgtcttccaccctcgccaagagttgatcctcagcaattctgaggacaagagtattcgagtctgggatatgtctaagcggactggggttcagactttccgcagagaccatgatcgtttctgggtcctagctgctcaccctaaccttaacctctttgcagcaggccatgatggtggtatgattgtgtttaagctggaacgggaacggccagcctatgctgttcatggcaatatgctacactatgtcaaggaccgattcttacgacagctggatttcaacagctccaaagatgtagctgtgatgcagttgcggagtggttccaagtttccagtattcaatatgtcatacaatccagcagaaaatgcagtcctgctttgtacaagagctagcaatctagagaatagtacctatgacctgtacaccatccctaaagatgctgactcccagaatcctgatgcgcctgaagggaaacgatcctcaggcctgacagccgtttgggtcgctcgaaatcggtttgctgtcctagatcggatgcattcgcttctgatcaagaatctgaagaatgagatcaccaaaaaggtacaggtgcccaactgtgatgagatcttctatgctggcacaggcaatctcctgcttcgagatgcggactctatcacactctttgacgtacagcagaagcggactctggcatctgtgaagatttctaaagtgaaatacgttatctggtcagcagacatgtcacatgtagcactactagccaaacacgccattgtgatctgtaaccgcaaactggatgctttatgtaacattcatgagaacattcgtgtcaagagtggggcctgggatgagagtggggtatttatctataccacaagcaaccacatcaaatatgctgtcaccactggggaccacgggatcattcgaactctggatttacccatctatgtcacacgggtgaagggcaacaatgtatactgcctagacagggagtgtcgtccccgggtactcaccattgatcccactgagttcaaattcaagctggccctgatcaacagaaaatatgatgaggtactgcacatggtgaggaatgccaaactagttggccagtctattattgcttatctccagaagaagggctatcctgaagtggcactgcattttgtcaaggatgagaaaactcgctttagtctggcactggagtgtggaaacattgagattgctctggaagcagccaaagcactggatgacaagaactgctgggaaaagctgggagaagtggccctgctgcaggggaaccaccagattgtggaaatgtgctatcagcgtaccaaaaactttgacaaactttccttcctgtatcttatcactggcaacttagaaaaacttcgcaagatgatgaagattgctgagatcagaaaggacatgagtggccactatcagaatgccctatacctgggtgatgtgtcagagcgtgtgcggatcctgaagaactgtggacagaagtccctggcctatctcacagctgctacccatggcttagatgaagaagctgagagcctaaaggagacatttgacccagagaaggagacaatcccagacattgaccctaatgccaagctgctccagccacctgcacctatcatgccattggataccaattggcctttattgactgtatccaaaggattttttgaaggcaccattgccagcaaagggaagggaggagcactggctgctgacattgacattgacactgttggtacagagggctggggagaggatgcagagctgcagttggatgaagatgggtttgtggaggctacagaaggtttgggggatgatgctcttggcaagggacaggaagaaggaggtggctgggatgtagaagaagatctggagctccctcctgagctggatatatcccctggggcagctggtggggctgaagatggtttctttgtgcccccaaccaagggaacaagtccaactcagatctggtgtaataactctcagcttccagttgatcacatcctggcaggctctttcgaaacagccatgcggctccttcatgaccaagtaggggtaatccagtttggcccctacaagcaactgttcctacagacatacgcccgaggccgcacaacctatcaggctctgccctgcctaccctccatgtatggctatcctaatcgcaactggaaggatgcagggctgaagaatggtgtaccagctgtgggcctgaagcttaatgacctcatccaacggttgcagctgtgctaccagctcaccacagttggcaaatttgaggaggctgtggaaaaattccgttccatccttctcagtgtgccacttcttgttgtggacaataaacaagagattgcagaggcccagcagctcatcaccatttgccgtgagtacattgtgggtttgtccgtggagacagaaaggaagaagctgcccaaagagactctagaacagcagaagcgcatctgtgagatggcagcctatttcacccactcaaacctgcagcctgtgcacatgatcctggtgctgcgtacagccctcaatctgttcttcaagctcaagaacttcaagacagctgccacctttgctcggcgcctactagaactcgggcccaagcctgaggtggcccaacagacccgaaaaatcctgtctgcctgtgagaagaatcccacagatgcctaccagctcaattatgacatgcacaacccctttgacatttgtgctgcatcatatcggcccatctaccgtggaaagccagtagaaaagtgtccactcagtggggcctgctattcccctgagttcaaaggtcaaatctgcagggtcaccacagtgacagagattggcaaagatgtgattggtttaaggatcagtcctctgcagtttcgctaaggccccctttgtgtgcatgggtcagtcaccatatgttccccccagagaatgtgtctatatcctccttctaacagcaccttccccctgcagctactcttcagatctggctctctgtaccctaaaacctagtatctttttctcttctatggaaaatccgaaggtctaaacttgacttttttgaggtcttctcaacttgactacagttgtgctcataattgtccttgcctttccagcttaattattttaaggaacaaatgaaaactctgggctgggtggagtggctcatacctgtaatcccagcactttgggaggctacggtgggcagatcatctgaggccaggagttcgagacctgcctggccaacatggcaacaccccgtctctaataaaaatataaaaattagcctggcatggtagcatgcgcctatagtcccagctgctcaggaggctgaggcatgagaatcgcttgaacctaggaggtggaggttgcattcaactgagatcataccacttcattccagcctgggtgacagagcaagactctgtctcaaaaaaaaaaaaaaaaaaaaaaaaaaaaaaaaaaggaaaactctgtgatggacatttgtttagtaaatcccttcagtatttatccctcctttccccacagcagctttctttcctgtcaactagaaaggagcaggatgtaataaatacattttggtgtgactaggccacaccaactcttaatcatctcccattttccttagacatttaaatttcaaggcaggtaccctctgtgtactcagaaatttgaagaagttatttggttttccaaaatgcacactgcgggttattgatttgttctttacaactattgttctcatatttctcacactaaataaatctctatgagagcttct

SEQ ID NO: 405966 - DNA, 5712 bp, Homo sapiens
gagaaggggaccttcaggtccaggcaaagggggaacttctgtcgtgggaacgaaaaagaaagaggatttacagggtggggggacagaggggcagcaggaaccagaagggagacagtggcggtcgcaccggggccgatccgagagttccccttagagaacggagctcacgggcggggaggcctcacctgctagtaggacgcagaaagacagaaggcgaaggagaccccctgccgtagccatcttgcctctctgctgagcggaagcccccgttcggctcctgtctgttagcggcctctctaggctaccactgacaccgtctctgtggcccggagcctaagagaccggaagttcgtgtttccaggcgcttccggaaaccgcgggagagggtcgctgacgtggaggcgtccgaagggcagcagggtgtgtcggggctcggattaagacatcggagtcggagacctgagagatgttaaccaaattcgagaccaagagcgcgcgggtcaaagggctcagctttcaccccaaaagaccttggatcctgactagtttacataatggggtcatccagttatgggactatcggatgtgcactctcattgacaagtttgatgaacatgatggtccagtgcgaggcattgacttccataagcagcagccactgttcgtctctggaggagatgactataagattaaggtttggaattacaagcttcggcgctgtcttttcacattgcttgggcacttagattatattcgcaccacgttttttcatcatgaatatccctggattctgagtgcctccgatgatcagaccatccgagtgtggaactggcaatctagaacctgtgtttgtgtgttaacagggcacaaccattatgtgatgtgtgctcagttccaccccacagaagacttggtagtatcagccagcctggaccagactgtgcgcgtttgggatatttctggtctgaggaaaaaaaacctgtcccctggtgcggtggaatcggatgtgagaggaataactggggttgatctatttggaactacagatgcagtggtgaagcatgtactagagggtcacgatcgtggagtaaactgggctgccttccaccccactatgccccttattgtatctggggcagatgatcgtcaagtgaagatctggcgcatgaatgaatcaaaggcatgggaggttgatacctgccggggccattacaacaatgtatcttgtgccgtcttccaccctcgccaagagttgatcctcagcaattctgaggacaagagtattcgagtctgggatatgtctaagcggactggggttcagactttccgcagagaccatgatcgtttctgggtcctagctgctcaccctaaccttaacctctttgcagcaggccatgatggtggtatgattgtgtttaagctggaacgggaacggccagcctatgctgttcatggcaatatgctacactatgtcaaggaccgattcttacgacagctggatttcaacagctccaaagatgtagctgtgatgcagttgcggagtggttccaagtttccagtattcaatatgtcatacaatccagcagaaaatgcagtcctgctttgtacaagagctagcaatctagagaatagtacctatgacctgtacaccatccctaaagatgctgactcccagaatcctgatgcgcctgaagggaaacgatcctcaggcctgacagccgtttgggtcgctcgaaatcggtttgctgtcctagatcggatgcattcgcttctgatcaagaatctgaagaatgagatcaccaaaaaggtacaggtgcccaactgtgatgagatcttctatgctggcacaggcaatctcctgcttcgagatgcggactctatcacactctttgacgtacagcagaagcggactctggcatctgtgaagatttctaaagtgaaatacgttatctggtcagcagacatgtcacatgtagcactactagccaaacacgccattgtgatctgtaaccgcaaactggatgctttatgtaacattcatgagaacattcgtgtcaagagtggggcctgggatgagagtggggtatttatctataccacaagcaaccacatcaaatatgctgtcaccactggggaccacgggatcattcgaactctggatttacccatctatgtcacacgggtgaagggcaacaatgtatactgcctagacagggagtgtcgtccccgggtactcaccattgatcccactgagttcaaattcaagctggccctgatcaacagaaaatatgatgaggtactgcacatggtgaggaatgccaaactagttggccagtctattattgcttatctccagaagaagggctatcctgaagtggcactgcattttgtcaaggatgagaaaactcgctttagtctggcactggagtgtggaaacattgagattgctctggaagcagccaaagcactggatgacaagaactgctgggaaaagctgggagaagtggccctgctgcaggggaaccaccagattgtggaaatgtgctatcagcgtaccaaaaactttgacaaactttccttcctgtatcttatcactggcaacttagaaaaacttcgcaagatgatgaagattgctgagatcagaaaggacatgagtggccactatcagaatgccctatacctgggtgatgtgtcagagcgtgtgcggatcctgaagaactgtggacagaagtccctggcctatctcacagctgctacccatggcttagatgaagaagctgagagcctaaaggagacatttgacccagagaaggagacaatcccagacattgaccctaatgccaagctgctccagccacctgcacctatcatgccattggataccaattggcctttattgactgtatccaaaggattttttgaaggcaccattgccagcaaagggaagggaggagcactggctgctgacattgacattgacactgttggtacagagggctggggagaggatgcagagctgcagttggatgaagatgggtttgtggaggctacagaaggtttgggggatgatgctcttggcaagggacaggaagaaggaggtggctgggatgtagaagaagatctggagctccctcctgagctggatatatcccctggggcagctggtggggctgaagatggtttctttgtgcccccaaccaagggaacaagtccaactcagatctggtgtaataactctcagcttccagttgatcacatcctggcaggctctttcgaaacagccatgcggctccttcatgaccaagtaggggtaatccagtttggcccctacaagcaactgttcctacagacatacgcccgaggccgcacaacctatcaggctctgccctgcctaccctccatgtatggctatcctaatcgcaactggaaggatgcagggctgaagaatggtgtaccagctgtgggcctgaagcttaatgacctcatccaacggttgcagctgtgctaccagctcaccacagttggcaaatttgaggaggctgtggaaaaattccgttccatccttctcagtgtgccacttcttgttgtggacaataaacaagagattgcagaggcccagcagctcatcaccatttgccgtgagtacattgtgggtttgtccgtggagacagaaaggaagaagctgcccaaagagactctagaacagcagaagcgcatctgtgagatggcagcctatttcacccactcaaacctgcagcctgtgcacatgatcctggtgctgcgtacagccctcaatctgttcttcaagctcaagaacttcaagacagctgccacctttgctcggcgcctactagaactcgggcccaagcctgaggtggcccaacagacccgaaaaatcctgtctgcctgtgagaagaatcccacagatgcctaccagctcaattatgacatgcacaacccctttgacatttgtgctgcatcatatcggcccatctaccgtggaaagccagtagaaaagtgtccactcagtggggcctgctattcccctgagttcaaaggtcaaatctgcagggtcaccacagtgacagagattggcaaagatgtgattggtttaaggatcagtcctctgcagtttcgctaaggccccctttgtgtgcatgggtcagtcaccatatgttccccccagagaatgtgtctatatcctccttctaacagcaccttccccctgcagctactcttcagatctggctctctgtaccctaaaacctagtatctttttctcttctatggaaaatccgaaggtctaaacttgacttttttgaggtcttctcaacttgactacagttgtgctcataattgtccttgcctttccagcttaattattttaaggaacaaatgaaaactctgggctgggtggagtggctcatacctgtaatcccagcactttgggaggctacggtgggcagatcatctgaggccaggagttcgagacctgcctggccaacatggcaacaccccgtctctaataaaaatataaaaattagcctggcatggtagcatgcgcctatagtcccagctgctcaggaggctgaggcatgagaatcgcttgaacctaggaggtggaggttgcattcaactgagatcataccacttcattccagcctgggtgacagagcaagactctgtctcaaaaaaaaaaaaaggaaaactctgtgatggacatttgtttagtaaatcccttcagtatttatccctcctttccccacagcagctttctttcctgtcaactagaaaggagcaggatgtaataaatacattttggtgtgactaggccacaccaactcttaatcatctcccattttccttagacatttaaatttcaaggcaggtaccctctgtgtactcagaaatttgaagaagttatttggttttccaaaatgcacactgcgggttattgatttgttctttacaactattgttctcatatttctcacactaaataaatctctatgagagcttcttgacttggccatttatttcttggacactctcatgttcttgttcacccatgcaggcaccccaccaaagtacatatcttccttccagtaataatttttaattacaaaataaacatccactattggaaaaaaaaaaaaaaagctagccgggcatggtggtgggtgcctgtaatcccagctactctggaggctgaggcagaggattgcttgaacccgggaggcggaggttgcagtaagctgagatcgcgccaccgcactccagcctgggcgacagagtgagactccatctcaaaaaaaaagaaagaaaaaaagaagcacatgtttttcatagggtatatatgaggacctaaactgctgtgaaaatgatagaaagcaagtagctcccttattctgtttttgattgcagccttttatcttttgctaattatagcaatatttattgagcacctgccatgtgactgtcactgttctagatattttacatgtaatatacagataaaagaatagtactttatatatattacaatgatacaatgattacattaacaatacaatattttgcttgtcatatgctaagaataattgggtagagtgacattactgtgccttcgattaaaataagtacttttttgcgtgttaaattcatgttttcaataaataataaatgcatatagttgaaaaatcagtaaatata

SEQ ID NO: 405967 - DNA, 5082 bp, Homo sapiens
gagaaggggaccttcaggtccaggcaaagggggaacttctgtcgtgggaacgaaaaagaaagaggatttacagggtggggggacagaggggcagcaggaaccagaagggagacagtggcggtcgcaccggggccgatccgagagttccccttagagaacggagctcacgggcggggaggcctcacctgctagtaggacgcagaaagacagaaggcgaaggagaccccctgccgtagccatcttgcctctctgctgagcggaagcccccgttcggctcctgtctgttagcggcctctctaggctaccactgacaccgtctctgtggcccggagcctaagagaccggaagttcgtgtttccaggcgcttccggaaaccgcgggagagggtcgctgacgtggaggcgtccgaagggcagcagggtgtgtcggggctcggattaagacatcggagtcggagacctgagagatgttaaccaaattcgagaccaagagcgcgcgggtcaaagggctcagctttcaccccaaaagaccttggatcctgactagtttacataatggggtcatccagttatgggactatcggatgtgcactctcattgacaagtttgatgaacatgatggtccagtgcgaggcattgacttccataagcagcagccactgttcgtctctggaggagatgactataagattaaggtttggaattacaagcttcggcgctgtcttttcacattgcttgggcacttagattatattcgcaccacgttttttcatcatgaatatccctggattctgagtgcctccgatgatcagaccatccgagtgtggaactggcaatctagaacctgtgtttgtgtgttaacagggcacaaccattatgtgatgtgtgctcagttccaccccacagaagacttggtagtatcagccagcctggaccagactgtgcgcgtttgggatatttctggtctgaggaaaaaaaacctgtcccctggtgcggtggaatcggatgtgagaggaataactggggttgatctatttggaactacagatgcagtggtgaagcatgtactagagggtcacgatcgtggagtaaactgggctgccttccaccccactatgccccttattgtatctggggcagatgatcgtcaagtgaagatctggcgcatgaatgaatcaaaggcatgggaggttgatacctgccggggccattacaacaatgtatcttgtgccgtcttccaccctcgccaagagttgatcctcagcaattctgaggacaagagtattcgagtctgggatatgtctaagcggactggggttcagactttccgcagagaccatgatcgtttctgggtcctagctgctcaccctaaccttaacctctttgcagcaggccatgatggtggtatgattgtgtttaagctggaacgggaacggccagcctatgctgttcatggcaatatgctacactatgtcaaggaccgattcttacgacagctggatttcaacagctccaaagatgtagctgtgatgcagttgcggagtggttccaagtttccagtattcaatatgtcatacaatccagcagaaaatgcagtcctgctttgtacaagagctagcaatctagagaatagtacctatgacctgtacaccatccctaaagatgctgactcccagaatcctgatgcgcctgaagggaaacgatcctcaggcctgacagccgtttgggtcgctcgaaatcggtttgctgtcctagatcggatgcattcgcttctgatcaagaatctgaagaatgagatcaccaaaaaggtacaggtgcccaactgtgatgagatcttctatgctggcacaggcaatctcctgcttcgagatgcggactctatcacactctttgacgtacagcagaagcggactctggcatctgtgaagatttctaaagtgaaatacgttatctggtcagcagacatgtcacatgtagcactactagccaaacacgccattgtgatctgtaaccgcaaactggatgctttatgtaacattcatgagaacattcgtgtcaagagtggggcctgggatgagagtggggtatttatctataccacaagcaaccacatcaaatatgctgtcaccactggggaccacgggatcattcgaactctggatttacccatctatgtcacacgggtgaagggcaacaatgtatactgcctagacagggagtgtcgtccccgggtactcaccattgatcccactgagttcaaattcaagctggccctgatcaacagaaaatatgatgaggtactgcacatggtgaggaatgccaaactagttggccagtctattattgcttatctccagaagaagggctatcctgaagtggcactgcattttgtcaaggatgagaaaactcgctttagtctggcactggagtgtggaaacattgagattgctctggaagcagccaaagcactggatgacaagaactgctgggaaaagctgggagaagtggccctgctgcaggggaaccaccagattgtggaaatgtgctatcagcgtaccaaaaactttgacaaactttccttcctgtatcttatcactggcaacttagaaaaacttcgcaagatgatgaagattgctgagatcagaaaggacatgagtggccactatcagaatgccctatacctgggtgatgtgtcagagcgtgtgcggatcctgaagaactgtggacagaagtccctggcctatctcacagctgctacccatggcttagatgaagaagctgagagcctaaaggagacatttgacccagagaaggagacaatcccagacattgaccctaatgccaagctgctccagccacctgcacctatcatgccattggataccaattggcctttattgactgtatccaaaggattttttgaaggcaccattgccagcaaagggaagggaggagcactggctgctgacattgacattgacactgttggtacagagggctggggagaggatgcagagctgcagttggatgaagatgggtttgtggaggctacagaaggtttgggggatgatgctcttggcaagggacaggaagaaggaggtggctgggatgtagaagaagatctggagctccctcctgagctggatatatcccctggggcagctggtggggctgaagatggtttctttgtgcccccaaccaagggaacaagtccaactcagatctggtgtaataactctcagcttccagttgatcacatcctggcaggctctttcgaaacagccatgcggctccttcatgaccaagtaggggtaatccagtttggcccctacaagcaactgttcctacagacatacgcccgaggccgcacaacctatcaggctctgccctgcctaccctccatgtatggctatcctaatcgcaactggaaggatgcagggctgaagaatggtgtaccagctgtgggcctgaagcttaatgacctcatccaacggttgcagctgtgctaccagctcaccacagttggcaaatttgaggaggctgtggaaaaattccgttccatccttctcagtgtgccacttcttgttgtggacaataaacaagagattgcagaggcccagcagctcatcaccatttgccgtgagtacattgtgggtttgtccgtggagacagaaaggaagaagctgcccaaagagactctagaacagcagaagcgcatctgtgagatggcagcctatttcacccactcaaacctgcagcctgtgcacatgatcctggtgctgcgtacagccctcaatctgttcttcaagctcaagaacttcaagacagctgccacctttgctcggcgcctactagaactcgggcccaagcctgaggtggcccaacagacccgaaaaatcctgtctgcctgtgagaagaatcccacagatgcctaccagctcaattatgacatgcacaacccctttgacatttgtgctgcatcatatcggcccatctaccgtggaaagccagtagaaaagtgtccactcagtggggcctgctattcccctgagttcaaaggtcaaatctgcagggtcaccacagtgacagagattggcaaagatgtgattggtttaaggatcagtcctctgcagtttcgctaaggccccctttgtgtgcatgggtcagtcaccatatgttccccccagagaatgtgtctatatcctccttctaacagcaccttccccctgcagctactcttcagatctggctctctgtaccctaaaacctagtatctttttctcttctatggaaaatccgaaggtctaaacttgacttttttgaggtcttctcaacttgactacagttgtgctcataattgtccttgcctttccagcttaattattttaaggaacaaatgaaaactctgggctgggtggagtggctcatacctgtaatcccagcactttgggaggctacggtgggcagatcatctgaggccaggagttcgagacctgcctggccaacatggcaacaccccgtctctaataaaaatataaaaattagcctggcatggtagcatgcgcctatagtcccagctgctcaggaggctgaggcatgagaatcgcttgaacctaggaggtggaggttgcattcaactgagatcataccacttcattccagcctgggtgacagagcaagactctgtctcaaaaaaaaaaaaaggaaaactctgtgatggacatttgtttagtaaatcccttcagtatttatccctcctttccccacagcagctttctttcctgtcaactagaaaggagcaggatgtaataaatacattttggtgtgactaggccacaccaactcttaatcatctcccattttccttagacatttaaatttcaaggcaggtaccctctgtgtactcagaaatttgaagaagttatttggttttccaaaatgcacactgcgggttattgatttgttctttacaactattgttctcatatttctcacactaaataaatctctatgagagcttctaaaaaaaaaaaacacaagacaaacaacatttgtgggcccaggccccaaaaaagtttaaaca

SEQ ID NO: 405968 - DNA, 5520 bp, Homo sapiens
gagaaggggaccttcaggtccaggcaaagggggaacttctgtcgtgggaacgaaaaagaaagaggatttacagggtggggggacagaggggcagcaggaaccagaagggagacagtggcggtcgcaccggggccgatccgagagttccccttagagaacggagctcacgggcggggaggcctcacctgctagtaggacgcagaaagacagaaggcgaaggagaccccctgccgtagccatcttgcctctctgctgagcggaagcccccgttcggctcctgtctgttagcggcctctctaggctaccactgacaccgtctctgtggcccggagcctaagagaccggaagttcgtgtttccaggcgcttccggaaaccgcgggagagggtcgctgacgtggaggcgtccgaagggcagcagggtgtgtcggggctcggattaagacatcggagtcggagacctgagagatgttaaccaaattcgagaccaagagcgcgcgggtcaaagggctcagctttcaccccaaaagaccttggatcctgactagtttacataatggggtcatccagttatgggactatcggatgtgcactctcattgacaagtttgatgaacatgatggtccagtgcgaggcattgacttccataagcagcagccactgttcgtctctggaggagatgactataagattaaggtttggaattacaagcttcggcgctgtcttttcacattgcttgggcacttagattatattcgcaccacgttttttcatcatgaatatccctggattctgagtgcctccgatgatcagaccatccgagtgtggaactggcaatctagaacctgtgtttgtgtgttaacagggcacaaccattatgtgatgtgtgctcagttccaccccacagaagacttggtagtatcagccagcctggaccagactgtgcgcgtttgggatatttctggtctgaggaaaaaaaacctgtcccctggtgcggtggaatcggatgtgagaggaataactggggttgatctatttggaactacagatgcagtggtgaagcatgtactagagggtcacgatcgtggagtaaactgggctgccttccaccccactatgccccttattgtatctggggcagatgatcgtcaagtgaagatctggcgcatgaatgaatcaaaggcatgggaggttgatacctgccggggccattacaacaatgtatcttgtgccgtcttccaccctcgccaagagttgatcctcagcaattctgaggacaagagtattcgagtctgggatatgtctaagcggactggggttcagactttccgcagagaccatgatcgtttctgggtcctagctgctcaccctaaccttaacctctttgcagcaggccatgatggtggtatgattgtgtttaagctggaacgggaacggccagcctatgctgttcatggcaatatgctacactatgtcaaggaccgattcttacgacagctggatttcaacagctccaaagatgtagctgtgatgcagttgcggagtggttccaagtttccagtattcaatatgtcatacaatccagcagaaaatgcagtcctgctttgtacaagagctagcaatctagagaatagtacctatgacctgtacaccatccctaaagatgctgactcccagaatcctgatgcgcctgaagggaaacgatcctcaggcctgacagccgtttgggtcgctcgaaatcggtttgctgtcctagatcggatgcattcgcttctgatcaagaatctgaagaatgagatcaccaaaaaggtacaggtgcccaactgtgatgagatcttctatgctggcacaggcaatctcctgcttcgagatgcggactctatcacactctttgacgtacagcagaagcggactctggcatctgtgaagatttctaaagtgaaatacgttatctggtcagcagacatgtcacatgtagcactactagccaaacacgccattgtgatctgtaaccgcaaactggatgctttatgtaacattcatgagaacattcgtgtcaagagtggggcctgggatgagagtggggtatttatctataccacaagcaaccacatcaaatatgctgtcaccactggggaccacgggatcattcgaactctggatttacccatctatgtcacacgggtgaagggcaacaatgtatactgcctagacagggagtgtcgtccccgggtactcaccattgatcccactgagttcaaattcaagctggccctgatcaacagaaaatatgatgaggtactgcacatggtgaggaatgccaaactagttggccagtctattattgcttatctccagaagaagggctatcctgaagtggcactgcattttgtcaaggatgagaaaactcgctttagtctggcactggagtgtggaaacattgagattgctctggaagcagccaaagcactggatgacaagaactgctgggaaaagctgggagaagtggccctgctgcaggggaaccaccagattgtggaaatgtgctatcagcgtaccaaaaactttgacaaactttccttcctgtatcttatcactggcaacttagaaaaacttcgcaagatgatgaagattgctgagatcagaaaggacatgagtggccactatcagaatgccctatacctgggtgatgtgtcagagcgtgtgcggatcctgaagaactgtggacagaagtccctggcctatctcacagctgctacccatggcttagatgaagaagctgagagcctaaaggagacatttgacccagagaaggagacaatcccagacattgaccctaatgccaagctgctccagccacctgcacctatcatgccattggataccaattggcctttattgactgtatccaaaggattttttgaaggcaccattgccagcaaagggaagggaggagcactggctgctgacattgacattgacactgttggtacagagggctggggagaggatgcagagctgcagttggatgaagatgggtttgtggaggctacagaaggtttgggggatgatgctcttggcaagggacaggaagaaggaggtggctgggatgtagaagaagatctggagctccctcctgagctggatatatcccctggggcagctggtggggctgaagatggtttctttgtgcccccaaccaagggaacaagtccaactcagatctggtgtaataactctcagcttccagttgatcacatcctggcaggctctttcgaaacagccatgcggctccttcatgaccaagtaggggtaatccagtttggcccctacaagcaactgttcctacagacatacgcccgaggccgcacaacctatcaggctctgccctgcctaccctccatgtatggctatcctaatcgcaactggaaggatgcagggctgaagaatggtgtaccagctgtgggcctgaagcttaatgacctcatccaacggttgcagctgtgctaccagctcaccacagttggcaaatttgaggaggctgtggaaaaattccgttccatccttctcagtgtgccacttcttgttgtggacaataaacaagagattgcagaggcccagcagctcatcaccatttgccgtgagtacattgtgggtttgtccgtggagacagaaaggaagaagctgcccaaagagactctagaacagcagaagcgcatctgtgagatggcagcctatttcacccactcaaacctgcagcctgtgcacatgatcctggtgctgcgtacagccctcaatctgttcttcaagctcaagaacttcaagacagctgccacctttgctcggcgcctactagaactcgggcccaagcctgaggtggcccaacagacccgaaaaatcctgtctgcctgtgagaagaatcccacagatgcctaccagctcaattatgacatgcacaacccctttgacatttgtgctgcatcatatcggcccatctaccgtggaaagccagtagaaaagtgtccactcagtggggcctgctattcccctgagttcaaaggtcaaatctgcagggtcaccacagtgacagagattggcaaagatgtgattggtttaaggatcagtcctctgcagtttcgctaaggccccctttgtgtgcatgggtcagtcaccatatgttccccccagagaatgtgtctatatcctccttctaacagcaccttccccctgcagctactcttcagatctggctctctgtaccctaaaacctagtatctttttctcttctatggaaaatccgaaggtctaaacttgacttttttgaggtcttctcaacttgactacagttgtgctcataattgtccttgcctttccagcttaattattttaaggaacaaatgaaaactctgggctgggtggagtggctcatacctgtaatcccagcactttgggaggctacggtgggcagatcatctgaggccaggagttcgagacctgcctggccaacatggcaacaccccgtctctaataaaaatataaaaattagcctggcatggtagcatgcgcctatagtcccagctgctcaggaggctgaggcatgagaatcgcttgaacctaggaggtggaggttgcattcaactgagatcataccacttcattccagcctgggtgacagagcaagactctgtctcaaaaaaaaaaaactctgtgtactcagaaatttgaagaagttatttggttttccaaaatgcacactgcgggttattgatttgttctttacaactattgttctcatatttctcacactaaataaatctctatgagagcttcttgacttggccatttatttcttggacactctcatgttcttgttcacccatgcaggcaccccaccaaagtacatatcttccttccagtaataatttttaattacaaaataaacatccactattggaaaaaaaaaaaaaaagctagccgggcatggtggtgggtgcctgtaatcccagctactctggaggctgaggcagaggattgcttgaacccgggaggcggaggttgcagtaagctgagatcgcgccaccgcactccagcctgggcgacagagtgagactccatctcaaaaaaaaagaaagaaaaaaagaagcacatgtttttcatagggtatatatgaggacctaaactgctgtgaaaatgatagaaagcaagtagctcccttattctgtttttgattgcagccttttatcttttgctaattatagcaatatttattgagcacctgccatgtgactgtcactgttctagatattttacatgtaatatacagataaaagaatagtactttatatatattacaatgatacaatgattacattaacaatacaatattttgcttgtcatatgctaagaataattgggtagagtgacattactgtgccttcgattaaaataagtacttttttgcgtgttaaattcatgttttcaataaataataaatgcatatagttgaaaaatcagtaaatata

SEQ ID NO: 405969 - DNA, 4519 bp, Homo sapiens
ctttaaaagggataccctactaaaatctcacagataatttacagtatggattactgagattacatttattttgatattttaaaatatttttgagagaagagctatgtaatcttagtcctcctgaaattagtaatatttaaatactaaagcattagaggcaagaagagaactattgttaaaatagctgactgggcttattattattagttcagaattggtaggatgacctgcctttgtctccataaaagtaaaactggataagcatttattgaatatggagaaaggtatttagtttaggagtctgttgacttccacctctaatttggtattgtcttttttttttcttgcagtgtgttaacagggcacaaccattatgtgatgtgtgctcagttccaccccacagaagacttggtagtatcagccagcctggaccagactgtgcgcgtttgggatatttctggtctgaggaaaaaaaacctgtcccctggtgcggtggaatcggatgtgagaggaataactggggttgatctatttggaactacagatgcagtggtgaagcatgtactagagggtcacgatcgtggagtaaactgggctgccttccaccccactatgccccttattgtatctggggcagatgatcgtcaagtgaagatctggcgcatgaatgaatcaaaggcatgggaggttgatacctgccggggccattacaacaatgtatcttgtgccgtcttccaccctcgccaagagttgatcctcagcaattctgaggacaagagtattcgagtctgggatatgtctaagcggactggggttcagactttccgcagagaccatgatcgtttctgggtcctagctgctcaccctaaccttaacctctttgcagcaggccatgatggtggtatgattgtgtttaagctggaacgggaacggccagcctatgctgttcatggcaatatgctacactatgtcaaggaccgattcttacgacagctggatttcaacagctccaaagatgtagctgtgatgcagttgcggagtggttccaagtttccagtattcaatatgtcatacaatccagcagaaaatgcagtcctgctttgtacaagagctagcaatctagagaatagtacctatgacctgtacaccatccctaaagatgctgactcccagaatcctgatgcgcctgaagggaaacgatcctcaggcctgacagccgtttgggtcgctcgaaatcggtttgctgtcctagatcggatgcattcgcttctgatcaagaatctgaagaatgagatcaccaaaaaggtacaggtgcccaactgtgatgagatcttctatgctggcacaggcaatctcctgcttcgagatgcggactctatcacactctttgacgtacagcagaagcggactctggcatctgtgaagatttctaaagtgaaatacgttatctggtcagcagacatgtcacatgtagcactactagccaaacacgccattgtgatctgtaaccgcaaactggatgctttatgtaacattcatgagaacattcgtgtcaagagtggggcctgggatgagagtggggtatttatctataccacaagcaaccacatcaaatatgctgtcaccactggggaccacgggatcattcgaactctggatttacccatctatgtcacacgggtgaagggcaacaatgtatactgcctagacagggagtgtcgtccccgggtactcaccattgatcccactgagttcaaattcaagctggccctgatcaacagaaaatatgatgaggtactgcacatggtgaggaatgccaaactagttggccagtctattattgcttatctccagaagaagggctatcctgaagtggcactgcattttgtcaaggatgagaaaactcgctttagtctggcactggagtgtggaaacattgagattgctctggaagcagccaaagcactggatgacaagaactgctgggaaaagctgggagaagtggccctgctgcaggggaaccaccagattgtggaaatgtgctatcagcgtaccaaaaactttgacaaactttccttcctgtatcttatcactggcaacttagaaaaacttcgcaagatgatgaagattgctgagatcagaaaggacatgagtggccactatcagaatgccctatacctgggtgatgtgtcagagcgtgtgcggatcctgaagaactgtggacagaagtccctggcctatctcacagctgctacccatggcttagatgaagaagctgagagcctaaaggagacatttgacccagagaaggagacaatcccagacattgaccctaatgccaagctgctccagccacctgcacctatcatgccattggataccaattggcctttattgactgtatccaaaggattttttgaaggcaccattgccagcaaagggaagggaggagcactggctgctgacattgacattgacactgttggtacagagggctggggagaggatgcagagctgcagttggatgaagatgggtttgtggaggctacagaaggtttgggggatgatgctcttggcaagggacaggaagaaggaggtggctgggatgtagaagaagatctggagctccctcctgagctggatatatcccctggggcagctggtggggctgaagatggtttctttgtgcccccaaccaagggaacaagtccaactcagatctggtgtaataactctcagcttccagttgatcacatcctggcaggctctttcgaaacagccatgcggctccttcatgaccaagtaggggtaatccagtttggcccctacaagcaactgttcctacagacatacgcccgaggccgcacaacctatcaggctctgccctgcctaccctccatgtatggctatcctaatcgcaactggaaggatgcagggctgaagaatggtgtaccagctgtgggcctgaagcttaatgacctcatccaacggttgcagctgtgctaccagctcaccacagttggcaaatttgaggaggctgtggaaaaattccgttccatccttctcagtgtgccacttcttgttgtggacaataaacaagagattgcagaggcccagcagctcatcaccatttgccgtgagtacattgtgggtttgtccgtggagacagaaaggaagaagctgcccaaagagactctagaacagcagaagcgcatctgtgagatggcagcctatttcacccactcaaacctgcagcctgtgcacatgatcctggtgctgcgtacagccctcaatctgttcttcaagctcaagaacttcaagacagctgccacctttgctcggcgcctactagaactcgggcccaagcctgaggtggcccaacagacccgaaaaatcctgtctgcctgtgagaagaatcccacagatgcctaccagctcaattatgacatgcacaacccctttgacatttgtgctgcatcatatcggcccatctaccgtggaaagccagtagaaaagtgtccactcagtggggcctgctattcccctgagttcaaaggtcaaatctgcagggtcaccacagtgacagagattggcaaagatgtgattggtttaaggatcagtcctctgcagtttcgctaaggccccctttgtgtgcatgggtcagtcaccatatgttccccccagagaatgtgtctatatcctccttctaacagcaccttccccctgcagctactcttcagatctggctctctgtaccctaaaacctagtatctttttctcttctatggaaaatccgaaggtctaaacttgacttttttgaggtcttctcaacttgactacagttgtgctcataattgtccttgcctttccagcttaattattttaaggaacaaatgaaaactctgggctgggtggagtggctcatacctgtaatcccagcactttgggaggctacggtgggcagatcatctgaggccaggagttcgagacctgcctggccaacatggcaacaccccgtctctaataaaaatataaaaattagcctggcatggtagcatgcgcctatagtcccagctgctcaggaggctgaggcatgagaatcgcttgaacctaggaggtggaggttgcattcaactgagatcataccacttcattccagcctgggtgacagagcaagactctgtctcaaaaaaaaaaaaaggaaaactctgtgatggacatttgtttagtaaatcccttcagtatttatccctcctttccccacagcagctttctttcctgtcaactagaaaggagcaggatgtaataaatacattttggtgtgactaggccacaccaactcttaatcatctcccattttccttagacatttaaatttcaaggcaggtaccctctgtgtactcagaaatttgaagaagttatttggttttccaaaatgcacactgcgggttattgatttgttctttacaactattgttctcatatttctcacactaaataaatctctatgagagcttct

SEQ ID NO: 405970 - DNA, 4006 bp, Homo sapiens
acggatgtgagaggatacgggtagactacagatgcagtggtgaagcatgtactagagggtcacgatcgtggagtaaactgggctgccttccaccccactatgccccttattgtatctggggcagatgatcgtcaagtgaagatctggcgcatgaatgaatcaaaggcatgggaggttgatacctgccggggccattacaacaatgtatcttgtgccgtcttccaccctcgccaagagttgatcctcagcaattctgaggacaagagtattcgagtctgggatatgtctaagcggactggggttcagactttccgcagagaccatgatcgtttctgggtcctagctgctcaccctaaccttaacctctttgcagcaggccatgatggtggtatgattgtgtttaagctggaacgggaacggccagcctatgctgttcatggcaatatgctacactatgtcaaggaccgattcttacgacagctggatttcaacagctccaaagatgtagctgtgatgcagttgcggagtggttccaagtttccagtattcaatatgtcatacaatccagcagaaaatgcagtcctgctttgtacaagagctagcaatctagagaatagtacctatgacctgtacaccatccctaaagatgctgactcccagaatcctgatgcgcctgaagggaaacgatcctcaggcctgacagccgtttgggtcgctcgaaatcggtttgctgtcctagatcggatgcattcgcttctgatcaagaatctgaagaatgagatcaccaaaaaggtacaggtgcccaactgtgatgagatcttctatgctggcacaggcaatctcctgcttcgagatgcggactctatcacactctttgacgtacagcagaagcggactctggcatctgtgaagatttctaaagtgaaatacgttatctggtcagcagacatgtcacatgtagcactactagccaaacacgccattgtgatctgtaaccgcaaactggatgctttatgtaacattcatgagaacattcgtgtcaagagtggggcctgggatgagagtggggtatttatctataccacaagcaaccacatcaaatatgctgtcaccactggggaccacgggatcattcgaactctggatttacccatctatgtcacacgggtgaagggcaacaatgtatactgcctagacagggagtgtcgtccccgggtactcaccattgatcccactgagttcaaattcaagctggccctgatcaacagaaaatatgatgaggtactgcacatggtgaggaatgccaaactagttggccagtctattattgcttatctccagaagaagggctatcctgaagtggcactgcattttgtcaaggatgagaaaactcgctttagtctggcactggagtgtggaaacattgagattgctctggaagcagccaaagcactggatgacaagaactgctgggaaaagctgggagaagtggccctgctgcaggggaaccaccagattgtggaaatgtgctatcagcgtaccaaaaactttgacaaactttccttcctgtatcttatcactggcaacttagaaaaacttcgcaagatgatgaagattgctgagatcagaaaggacatgagtggccactatcagaatgccctatacctgggtgatgtgtcagagcgtgtgcggatcctgaagaactgtggacagaagtccctggcctatctcacagctgctacccatggcttagatgaagaagctgagagcctaaaggagacatttgacccagagaaggagacaatcccagacattgaccctaatgccaagctgctccagccacctgcacctatcatgccattggataccaattggcctttattgactgtatccaaaggattttttgaaggcaccattgccagcaaagggaagggaggagcactggctgctgacattgacattgacactgttggtacagagggctggggagaggatgcagagctgcagttggatgaagatgggtttgtggaggctacagaaggtttgggggatgatgctcttggcaagggacaggaagaaggaggtggctgggatgtagaagaagatctggagctccctcctgagctggatatatcccctggggcagctggtggggctgaagatggtttctttgtgcccccaaccaagggaacaagtccaactcagatctggtgtaataactctcagcttccagttgatcacatcctggcaggctctttcgaaacagccatgcggctccttcatgaccaagtaggggtaatccagtttggcccctacaagcaactgttcctacagacatacgcccgaggccgcacaacctatcaggctctgccctgcctaccctccatgtatggctatcctaatcgcaactggaaggatgcagggctgaagaatggtgtaccagctgtgggcctgaagcttaatgacctcatccaacggttgcagctgtgctaccagctcaccacagttggcaaatttgaggaggctgtggaaaaattccgttccatccttctcagtgtgccacttcttgttgtggacaataaacaagagattgcagaggcccagcagctcatcaccatttgccgtgagtacattgtgggtttgtccgtggagacagaaaggaagaagctgcccaaagagactctagaacagcagaagcgcatctgtgagatggcagcctatttcacccactcaaacctgcagcctgtgcacatgatcctggtgctgcgtacagccctcaatctgttcttcaagctcaagaacttcaagacagctgccacctttgctcggcgcctactagaactcgggcccaagcctgaggtggcccaacagacccgaaaaatcctgtctgcctgtgagaagaatcccacagatgcctaccagctcaattatgacatgcacaacccctttgacatttgtgctgcatcatatcggcccatctaccgtggaaagccagtagaaaagtgtccactcagtggggcctgctattcccctgagttcaaaggtcaaatctgcagggtcaccacagtgacagagattggcaaagatgtgattggtttaaggatcagtcctctgcagtttcgctaaggccccctttgtgtgcatgggtcagtcaccatatgttccccccagagaatgtgtctatatcctccttctaacagcaccttccccctgcagctactcttcagatctggctctctgtaccctaaaacctagtatctttttctcttctatggaaaatccgaaggtctaaacttgacttttttgaggtcttctcaacttgactacagttgtgctcataattgtccttgcctttccagcttaattattttaaggaacaaatgaaaactctgggctgggtggagtggctcatacctgtaatcccagcactttgggaggctacggtgggcagatcatctgaggccaggagttcgagacctgcctggccaacatggcaacaccccgtctctaataaaaatataaaaattagcctggcatggtagcatgcgcctatagtcccagctgctcaggaggctgaggcatgagaatcgcttgaacctaggaggtggaggttgcattcaactgagatcataccacttcattccagcctgggtgacagagcaagactctgtctcaaaaaaaaaaaaaggaaaactctgtgatggacatttgtttagtaaatcccttcagtatttatccctcctttccccacagcagctttctttcctgtcaactagaaaggagcaggatgtaataaatacattttggtgtgactaggccacaccaactcttaatcatctcccattttccttagacatttaaatttcaaggcaggtaccctctgtgtactcagaaatttgaagaagttatttggttttccaaaatgcacactgcgggttattgatttgttctttacaactattgttctcatatttctcacactaaataaatctctatgagagcttct

SEQ ID NO: 405971 - DNA, 3629 bp, Homo sapiens
agatgatgtatagtgcgggcgggtggtgattcggccgaggggcgggccttatgctgttcatggcaatatgctacactatgtcaaggaccgattcttacgacagctggatttcaacagctccaaagatgtagctgtgatgcagttgcggagtggttccaagtttccagtattcaatatgtcatacaatccagcagaaaatgcagtcctgctttgtacaagagctagcaatctagagaatagtacctatgacctgtacaccatccctaaagatgctgactcccagaatcctgatgcgcctgaagggaaacgatcctcaggcctgacagccgtttgggtcgctcgaaatcggtttgctgtcctagatcggatgcattcgcttctgatcaagaatctgaagaatgagatcaccaaaaaggtacaggtgcccaactgtgatgagatcttctatgctggcacaggcaatctcctgcttcgagatgcggactctatcacactctttgacgtacagcagaagcggactctggcatctgtgaagatttctaaagtgaaatacgttatctggtcagcagacatgtcacatgtagcactactagccaaacacgccattgtgatctgtaaccgcaaactggatgctttatgtaacattcatgagaacattcgtgtcaagagtggggcctgggatgagagtggggtatttatctataccacaagcaaccacatcaaatatgctgtcaccactggggaccacgggatcattcgaactctggatttacccatctatgtcacacgggtgaagggcaacaatgtatactgcctagacagggagtgtcgtccccgggtactcaccattgatcccactgagttcaaattcaagctggccctgatcaacagaaaatatgatgaggtactgcacatggtgaggaatgccaaactagttggccagtctattattgcttatctccagaagaagggctatcctgaagtggcactgcattttgtcaaggatgagaaaactcgctttagtctggcactggagtgtggaaacattgagattgctctggaagcagccaaagcactggatgacaagaactgctgggaaaagctgggagaagtggccctgctgcaggggaaccaccagattgtggaaatgtgctatcagcgtaccaaaaactttgacaaactttccttcctgtatcttatcactggcaacttagaaaaacttcgcaagatgatgaagattgctgagatcagaaaggacatgagtggccactatcagaatgccctatacctgggtgatgtgtcagagcgtgtgcggatcctgaagaactgtggacagaagtccctggcctatctcacagctgctacccatggcttagatgaagaagctgagagcctaaaggagacatttgacccagagaaggagacaatcccagacattgaccctaatgccaagctgctccagccacctgcacctatcatgccattggataccaattggcctttattgactgtatccaaaggattttttgaaggcaccattgccagcaaagggaagggaggagcactggctgctgacattgacattgacactgttggtacagagggctggggagaggatgcagagctgcagttggatgaagatgggtttgtggaggctacagaaggtttgggggatgatgctcttggcaagggacaggaagaaggaggtggctgggatgtagaagaagatctggagctccctcctgagctggatatatcccctggggcagctggtggggctgaagatggtttctttgtgcccccaaccaagggaacaagtccaactcagatctggtgtaataactctcagcttccagttgatcacatcctggcaggctctttcgaaacagccatgcggctccttcatgaccaagtaggggtaatccagtttggcccctacaagcaactgttcctacagacatacgcccgaggccgcacaacctatcaggctctgccctgcctaccctccatgtatggctatcctaatcgcaactggaaggatgcagggctgaagaatggtgtaccagctgtgggcctgaagcttaatgacctcatccaacggttgcagctgtgctaccagctcaccacagttggcaaatttgaggaggctgtggaaaaattccgttccatccttctcagtgtgccacttcttgttgtggacaataaacaagagattgcagaggcccagcagctcatcaccatttgccgtgagtacattgtgggtttgtccgtggagacagaaaggaagaagctgcccaaagagactctagaacagcagaagcgcatctgtgagatggcagcctatttcacccactcaaacctgcagcctgtgcacatgatcctggtgctgcgtacagccctcaatctgttcttcaagctcaagaacttcaagacagctgccacctttgctcggcgcctactagaactcgggcccaagcctgaggtggcccaacagacccgaaaaatcctgtctgcctgtgagaagaatcccacagatgcctaccagctcaattatgacatgcacaacccctttgacatttgtgctgcatcatatcggcccatctaccgtggaaagccagtagaaaagtgtccactcagtggggcctgctattcccctgagttcaaaggtcaaatctgcagggtcaccacagtgacagagattggcaaagatgtgattggtttaaggatcagtcctctgcagtttcgctaaggccccctttgtgtgcatgggtcagtcaccatatgttccccccagagaatgtgtctatatcctccttctaacagcaccttccccctgcagctactcttcagatctggctctctgtaccctaaaacctagtatctttttctcttctatggaaaatccgaaggtctaaacttgacttttttgaggtcttctcaacttgactacagttgtgctcataattgtccttgcctttccagcttaattattttaaggaacaaatgaaaactctgggctgggtggagtggctcatacctgtaatcccagcactttgggaggctacggtgggcagatcatctgaggccaggagttcgagacctgcctggccaacatggcaacaccccgtctctaataaaaatataaaaattagcctggcatggtagcatgcgcctatagtcccagctgctcaggaggctgaggcatgagaatcgcttgaacctaggaggtggaggttgcattcaactgagatcataccacttcattccagcctgggtgacagagcaagactctgtctcaaaaaaaaaaaaaggaaaactctgtgatggacatttgtttagtaaatcccttcagtatttatccctcctttccccacagcagctttctttcctgtcaactagaaaggagcaggatgtaataaatacattttggtgtgactaggccacaccaactcttaatcatctcccattttccttagacatttaaatttcaaggcaggtaccctctgtgtactcagaaatttgaagaagttatttggttttccaaaatgcacactgcgggttattgatttgttctttacaactattgttctcatatttctcacactaaataaatctctatgagagcttct

SEQ ID NO: 405972 - DNA, 4981 bp, Homo sapiens
gagaaggggaccttcaggtccaggcaaagggggaacttctgtcgtgggaacgaaaaagaaagaggatttacagggtggggggacagaggggcagcaggaaccagaagggagacagtggcggtcgcaccggggccgatccgagagttccccttagagaacggagctcacgggcggggaggcctcacctgctagtaggacgcagaaagacagaaggcgaaggagaccccctgccgtagccatcttgcctctctgctgagcggaagcccccgttcggctcctgtctgttagcggcctctctaggctaccactgacaccgtctctgtggcccggagcctaagagaccggaagttcgtgtttccaggcgcttccggaaaccgcgggagagggtcgctgacgtggaggcgtccgaagggcagcagggtgtgtcggggctcggattaagacatcggagtcggagacctgagagatgttaaccaaattcgagaccaagagcgcgcgggtcaaagggctcagctttcaccccaaaagaccttggatcctgactagtttacataatggggtcatccagttatgggactatcggatgtgcactctcattgacaagtttgatgaacatgatggtccagtgcgaggcattgacttccataagcagcagccactgttcgtctctggaggagatgactataagattaaggtttggaattacaagcttcggcgctgtcttttcacattgcttgggcacttagattatattcgcaccacgttttttcatcatgaatatccctggattctgagtgcctccgatgatcagaccatccgagtgtggaactggcaatctagaacctgtgtttgtgtgttaacagggcacaaccattatgtgatgtgtgctcagttccaccccacagaagacttggtagtatcagccagcctggaccagactgtgcgcgtttgggatatttctggtctgaggaaaaaaaacctgtcccctggtgcggtggaatcggatgtgagaggaataactggggttgatctatttggaactacagatgcagtggtgaagcatgtactagagggtcacgatcgtggagtaaactgggctgccttccaccccactatgccccttattgtatctggggcagatgatcgtcaagtgaagatctggcgcatgaatgaatcaaaggcatgggaggttgatacctgccggggccattacaacaatgtatcttgtgccgtcttccaccctcgccaagagttgatcctcagcaattctgaggacaagagtattcgagtctgggatatgtctaagcggactggggttcagactttccgcagagaccatgatcgtttctgggtcctagctgctcaccctaaccttaacctctttgcagcaggccatgatggtggtatgattgtgtttaagctggaacgggaacggccagcctatgctgttcatggcaatatgctacactatgtcaaggaccgattcttacgacagctggatttcaacagctccaaagatgtagctgtgatgcagttgcggagtggttccaagtttccagtattcaatatgtcatacaatccagcagaaaatgcagtcctgctttgtacaagagctagcaatctagagaatagtacctatgacctgtacaccatccctaaagatgctgactcccagaatcctgatgcgcctgaagggaaacgatcctcaggcctgacagccgtttgggtcgctcgaaatcggtttgctgtcctagatcggatgcattcgcttctgatcaagaatctgaagaatgagatcaccaaaaaggtacaggtgcccaactgtgatgagatcttctatgctggcacaggcaatctcctgcttcgagatgcggactctatcacactctttgacgtacagcagaagcggactctggcatctgtgaagatttctaaagtgaaatacgttatctggtcagcagacatgtcacatgtagcactactagccaaacacgccattgtgatctgtaaccgcaaactggatgctttatgtaacattcatgagaacattcgtgtcaagagtggggcctgggatgagagtggggtatttatctataccacaagcaaccacatcaaatatgctgtcaccactggggaccacgggatcattcgaactctggatttacccatctatgtcacacgggtgaagggcaacaatgtatactgcctagacagggagtgtcgtccccgggtactcaccattgatcccactgagttcaaattcaagctggccctgatcaacagaaaatatgatgaggtactgcacatggtgaggaatgccaaactagttggccagtctattattgcttatctccagaagaagggctatcctgaagtggcactgcattttgtcaaggatgagaaaactcgctttagtctggcactggagtgtggaaacattgagattgctctggaagcagccaaagcactggatgacaagaactgctgggaaaagctgggagaagtggccctgctgcaggggaaccaccagattgtggaaatgtgctatcagcgtaccaaaaactttgacaaactttccttcctgtatcttatcactggcaacttagaaaaacttcgcaagatgatgaagattgctgagatcagaaaggacatgagtggccactatcagaatgccctatacctgggtgatgtgtcagagcgtgtgcggatcctgaagaactgtggacagaagtccctggcctatctcacagctgctacccatggcttagatgaagaagctgagagcctaaaggagacatttgacccagagaaggagacaatcccagacattgaccctaatgccaagctgctccagccacctgcacctatcatgccattggataccaattggcctttattgactgtatccaaaggattttttgaaggcaccattgccagcaaagggaagggaggagcactggctgctgacattgacattgacactgttggtacagagggctggggagaggatgcagagctgcagttggatgaagatgggtttgtggaggctacagaaggtttgggggatgatgctcttggcaagggacaggaagaaggaggtggctgggatgtagaagaagatctggtggggctgaagatggtttctttgtgcccccaaccaagggaacaagtccaactcagatctggtgtaataactctcagcttccagttgatcacatcctggcaggctctttcgaaacagccatgcggctccttcatgaccaagtaggggtaatccagtttggcccctacaagcaactgttcctacagacatacgcccgaggccgcacaacctatcaggctctgccctgcctaccctccatgtatggctatcctaatcgcaactggaaggatgcagggctgaagaatggtgtaccagctgtgggcctgaagcttaatgacctcatccaacggttgcagctgtgctaccagctcaccacagttggcaaatttgaggaggctgtggaaaaattccgttccatccttctcagtgtgccacttcttgttgtggacaataaacaagagattgcagaggcccagcagctcatcaccatttgccgtgagtacattgtgggtttgtccgtggagacagaaaggaagaagctgcccaaagagactctagaacagcagaagcgcatctgtgagatggcagcctatttcacccactcaaacctgcagcctgtgcacatgatcctggtgctgcgtacagccctcaatctgttcttcaagctcaagaacttcaagacagctgccacctttgctcggcgcctactagaactcgggcccaagcctgaggtggcccaacagacccgaaaaatcctgtctgcctgtgagaagaatcccacagatgcctaccagctcaattatgacatgcacaacccctttgacatttgtgctgcatcatatcggcccatctaccgtggaaagccagtagaaaagtgtccactcagtggggcctgctattcccctgagttcaaaggtcaaatctgcagggtcaccacagtgacagagattggcaaagatgtgattggtttaaggatcagtcctctgcagtttcgctaaggccccctttgtgtgcatgggtcagtcaccatatgttccccccagagaatgtgtctatatcctccttctaacagcaccttccccctgcagctactcttcagatctggctctctgtaccctaaaacctagtatctttttctcttctatggaaaatccgaaggtctaaacttgacttttttgaggtcttctcaacttgactacagttgtgctcataattgtccttgcctttccagcttaattattttaaggaacaaatgaaaactctgggctgggtggagtggctcatacctgtaatcccagcactttgggaggctacggtgggcagatcatctgaggccaggagttcgagacctgcctggccaacatggcaacaccccgtctctaataaaaatataaaaattagcctggcatggtagcatgcgcctatagtcccagctgctcaggaggctgaggcatgagaatcgcttgaacctaggaggtggaggttgcattcaactgagatcataccacttcattccagcctgggtgacagagcaagactctgtctcaaaaaaaaaaaaaggaaaactctgtgatggacatttgtttagtaaatcccttcagtatttatccctcctttccccacagcagctttctttcctgtcaactagaaaggagcaggatgtaataaatacattttggtgtgactaggccacaccaactcttaatcatctcccattttccttagacatttaaatttcaaggcaggtaccctctgtgtactcagaaatttgaagaagttatttggttttccaaaatgcacactgcgggttattgatttgttctttacaactattgttctcatatttctcacactaaataaatctctatgagagcttct

SEQ ID NO: 405973 - DNA, 3364 bp, Homo sapiens
tcggaccaattcagagccacgcgggatgcgcctgaagggaaacgatcctcaggcctgacagccgtttgggtcgctcgaaatcggtttgctgtcctagatcggatgcattcgcttctgatcaagaatctgaagaatgagatcaccaaaaaggtacaggtgcccaactgtgatgagatcttctatgctggcacaggcaatctcctgcttcgagatgcggactctatcacactctttgacgtacagcagaagcggactctggcatctgtgaagatttctaaagtgaaatacgttatctggtcagcagacatgtcacatgtagcactactagccaaacacgccattgtgatctgtaaccgcaaactggatgctttatgtaacattcatgagaacattcgtgtcaagagtggggcctgggatgagagtggggtatttatctataccacaagcaaccacatcaaatatgctgtcaccactggggaccacgggatcattcgaactctggatttacccatctatgtcacacgggtgaagggcaacaatgtatactgcctagacagggagtgtcgtccccgggtactcaccattgatcccactgagttcaaattcaagctggccctgatcaacagaaaatatgatgaggtactgcacatggtgaggaatgccaaactagttggccagtctattattgcttatctccagaagaagggctatcctgaagtggcactgcattttgtcaaggatgagaaaactcgctttagtctggcactggagtgtggaaacattgagattgctctggaagcagccaaagcactggatgacaagaactgctgggaaaagctgggagaagtggccctgctgcaggggaaccaccagattgtggaaatgtgctatcagcgtaccaaaaactttgacaaactttccttcctgtatcttatcactggcaacttagaaaaacttcgcaagatgatgaagattgctgagatcagaaaggacatgagtggccactatcagaatgccctatacctgggtgatgtgtcagagcgtgtgcggatcctgaagaactgtggacagaagtccctggcctatctcacagctgctacccatggcttagatgaagaagctgagagcctaaaggagacatttgacccagagaaggagacaatcccagacattgaccctaatgccaagctgctccagccacctgcacctatcatgccattggataccaattggcctttattgactgtatccaaaggattttttgaaggcaccattgccagcaaagggaagggaggagcactggctgctgacattgacattgacactgttggtacagagggctggggagaggatgcagagctgcagttggatgaagatgggtttgtggaggctacagaaggtttgggggatgatgctcttggcaagggacaggaagaaggaggtggctgggatgtagaagaagatctggagctccctcctgagctggatatatcccctggggcagctggtggggctgaagatggtttctttgtgcccccaaccaagggaacaagtccaactcagatctggtgtaataactctcagcttccagttgatcacatcctggcaggctctttcgaaacagccatgcggctccttcatgaccaagtaggggtaatccagtttggcccctacaagcaactgttcctacagacatacgcccgaggccgcacaacctatcaggctctgccctgcctaccctccatgtatggctatcctaatcgcaactggaaggatgcagggctgaagaatggtgtaccagctgtgggcctgaagcttaatgacctcatccaacggttgcagctgtgctaccagctcaccacagttggcaaatttgaggaggctgtggaaaaattccgttccatccttctcagtgtgccacttcttgttgtggacaataaacaagagattgcagaggcccagcagctcatcaccatttgccgtgagtacattgtgggtttgtccgtggagacagaaaggaagaagctgcccaaagagactctagaacagcagaagcgcatctgtgagatggcagcctatttcacccactcaaacctgcagcctgtgcacatgatcctggtgctgcgtacagccctcaatctgttcttcaagctcaagaacttcaagacagctgccacctttgctcggcgcctactagaactcgggcccaagcctgaggtggcccaacagacccgaaaaatcctgtctgcctgtgagaagaatcccacagatgcctaccagctcaattatgacatgcacaacccctttgacatttgtgctgcatcatatcggcccatctaccgtggaaagccagtagaaaagtgtccactcagtggggcctgctattcccctgagttcaaaggtcaaatctgcagggtcaccacagtgacagagattggcaaagatgtgattggtttaaggatcagtcctctgcagtttcgctaaggccccctttgtgtgcatgggtcagtcaccatatgttccccccagagaatgtgtctatatcctccttctaacagcaccttccccctgcagctactcttcagatctggctctctgtaccctaaaacctagtatctttttctcttctatggaaaatccgaaggtctaaacttgacttttttgaggtcttctcaacttgactacagttgtgctcataattgtccttgcctttccagcttaattattttaaggaacaaatgaaaactctgggctgggtggagtggctcatacctgtaatcccagcactttgggaggctacggtgggcagatcatctgaggccaggagttcgagacctgcctggccaacatggcaacaccccgtctctaataaaaatataaaaattagcctggcatggtagcatgcgcctatagtcccagctgctcaggaggctgaggcatgagaatcgcttgaacctaggaggtggaggttgcattcaactgagatcataccacttcattccagcctgggtgacagagcaagactctgtctcaaaaaaaaaaaaaggaaaactctgtgatggacatttgtttagtaaatcccttcagtatttatccctcctttccccacagcagctttctttcctgtcaactagaaaggagcaggatgtaataaatacattttggtgtgactaggccacaccaactcttaatcatctcccattttccttagacatttaaatttcaaggcaggtaccctctgtgtactcagaaatttgaagaagttatttggttttccaaaatgcacactgcgggttattgatttgttctttacaactattgttctcatatttctcacactaaataaatctctatgagagcttct

SEQ ID NO: 405974 - DNA, 2783 bp, Homo sapiens
ccagtaccctagggttctacggtcgcgaggctgggtggcgagaaaatatgactgacgggtactgcacatggtgaggaatgccaaactagttggccagtctattattgcttatctccagaagaagggctatcctgaagtggcactgcattttgtcaaggatgagaaaactcgctttagtctggcactggagtgtggaaacattgagattgctctggaagcagccaaagcactggatgacaagaactgctgggaaaagctgggagaagtggccctgctgcaggggaaccaccagattgtggaaatgtgctatcagcgtaccaaaaactttgacaaactttccttcctgtatcttatcactggcaacttagaaaaacttcgcaagatgatgaagattgctgagatcagaaaggacatgagtggccactatcagaatgccctatacctgggtgatgtgtcagagcgtgtgcggatcctgaagaactgtggacagaagtccctggcctatctcacagctgctacccatggcttagatgaagaagctgagagcctaaaggagacatttgacccagagaaggagacaatcccagacattgaccctaatgccaagctgctccagccacctgcacctatcatgccattggataccaattggcctttattgactgtatccaaaggattttttgaaggcaccattgccagcaaagggaagggaggagcactggctgctgacattgacattgacactgttggtacagagggctggggagaggatgcagagctgcagttggatgaagatgggtttgtggaggctacagaaggtttgggggatgatgctcttggcaagggacaggaagaaggaggtggctgggatgtagaagaagatctggagctccctcctgagctggatatatcccctggggcagctggtggggctgaagatggtttctttgtgcccccaaccaagggaacaagtccaactcagatctggtgtaataactctcagcttccagttgatcacatcctggcaggctctttcgaaacagccatgcggctccttcatgaccaagtaggggtaatccagtttggcccctacaagcaactgttcctacagacatacgcccgaggccgcacaacctatcaggctctgccctgcctaccctccatgtatggctatcctaatcgcaactggaaggatgcagggctgaagaatggtgtaccagctgtgggcctgaagcttaatgacctcatccaacggttgcagctgtgctaccagctcaccacagttggcaaatttgaggaggctgtggaaaaattccgttccatccttctcagtgtgccacttcttgttgtggacaataaacaagagattgcagaggcccagcagctcatcaccatttgccgtgagtacattgtgggtttgtccgtggagacagaaaggaagaagctgcccaaagagactctagaacagcagaagcgcatctgtgagatggcagcctatttcacccactcaaacctgcagcctgtgcacatgatcctggtgctgcgtacagccctcaatctgttcttcaagctcaagaacttcaagacagctgccacctttgctcggcgcctactagaactcgggcccaagcctgaggtggcccaacagacccgaaaaatcctgtctgcctgtgagaagaatcccacagatgcctaccagctcaattatgacatgcacaacccctttgacatttgtgctgcatcatatcggcccatctaccgtggaaagccagtagaaaagtgtccactcagtggggcctgctattcccctgagttcaaaggtcaaatctgcagggtcaccacagtgacagagattggcaaagatgtgattggtttaaggatcagtcctctgcagtttcgctaaggccccctttgtgtgcatgggtcagtcaccatatgttccccccagagaatgtgtctatatcctccttctaacagcaccttccccctgcagctactcttcagatctggctctctgtaccctaaaacctagtatctttttctcttctatggaaaatccgaaggtctaaacttgacttttttgaggtcttctcaacttgactacagttgtgctcataattgtccttgcctttccagcttaattattttaaggaacaaatgaaaactctgggctgggtggagtggctcatacctgtaatcccagcactttgggaggctacggtgggcagatcatctgaggccaggagttcgagacctgcctggccaacatggcaacaccccgtctctaataaaaatataaaaattagcctggcatggtagcatgcgcctatagtcccagctgctcaggaggctgaggcatgagaatcgcttgaacctaggaggtggaggttgcattcaactgagatcataccacttcattccagcctgggtgacagagcaagactctgtctcaaaaaaaaaaaaaggaaaactctgtgatggacatttgtttagtaaatcccttcagtatttatccctcctttccccacagcagctttctttcctgtcaactagaaaggagcaggatgtaataaatacattttggtgtgactaggccacaccaactcttaatcatctcccattttccttagacatttaaatttcaaggcaggtaccctctgtgtactcagaaatttgaagaagttatttggttttccaaaatgcacactgcgggttattgatttgttctttacaactattgttctcatatttctcacactaaataaatctctatgagagcttct

SEQ ID NO: 405975 - DNA, 2470 bp, Homo sapiens
  misc_feature (16)..(16): n is a, c, g, or t
tgccagctcagacttnctgttttagagaaagggtcttgctctgttgccctggctagaatgctgggattatccgtgtgaaccagcgtgcctggcccccatctcagttatctggaaatagtttccaacaaacgggtgcaacgtgcaaatttcacatcacggggatgcacctgtctgtgcaagtccctggcctatctcacagctgctacccatggcttagatgaagaagctgagagcctaaaggagacatttgacccagagaaggagacaatcccagacattgaccctaatgccaagctgctccagccacctgcacctatcatgccattggataccaattggcctttattgactgtatccaaaggattttttgaaggcaccattgccagcaaagggaagggaggagcactggctgctgacattgacattgacactgttggtacagagggctggggagaggatgcagagctgcagttggatgaagatgggtttgtggaggctacagaaggtttgggggatgatgctcttggcaagggacaggaagaaggaggtggctgggatgtagaagaagatctggagctccctcctgagctggatatatcccctggggcagctggtggggctgaagatggtttctttgtgcccccaaccaagggaacaagtccaactcagatctggtgtaataactctcagcttccagttgatcacatcctggcaggctctttcgaaacagccatgcggctccttcatgaccaagtaggggtaatccagtttggcccctacaagcaactgttcctacagacatacgcccgaggccgcacaacctatcaggctctgccctgcctaccctccatgtatggctatcctaatcgcaactggaaggatgcagggctgaagaatggtgtaccagctgtgggcctgaagcttaatgacctcatccaacggttgcagctgtgctaccagctcaccacagttggcaaatttgaggaggctgtggaaaaattccgttccatccttctcagtgtgccacttcttgttgtggacaataaacaagagattgcagaggcccagcagctcatcaccatttgccgtgagtacattgtgggtttgtccgtggagacagaaaggaagaagctgcccaaagagactctagaacagcagaagcgcatctgtgagatggcagcctatttcacccactcaaacctgcagcctgtgcacatgatcctggtgctgcgtacagccctcaatctgttcttcaagctcaagaacttcaagacagctgccacctttgctcggcgcctactagaactcgggcccaagcctgaggtggcccaacagacccgaaaaatcctgtctgcctgtgagaagaatcccacagatgcctaccagctcaattatgacatgcacaacccctttgacatttgtgctgcatcatatcggcccatctaccgtggaaagccagtagaaaagtgtccactcagtggggcctgctattcccctgagttcaaaggtcaaatctgcagggtcaccacagtgacagagattggcaaagatgtgattggtttaaggatcagtcctctgcagtttcgctaaggccccctttgtgtgcatgggtcagtcaccatatgttccccccagagaatgtgtctatatcctccttctaacagcaccttccccctgcagctactcttcagatctggctctctgtaccctaaaacctagtatctttttctcttctatggaaaatccgaaggtctaaacttgacttttttgaggtcttctcaacttgactacagttgtgctcataattgtccttgcctttccagcttaattattttaaggaacaaatgaaaactctgggctgggtggagtggctcatacctgtaatcccagcactttgggaggctacggtgggcagatcatctgaggccaggagttcgagacctgcctggccaacatggcaacaccccgtctctaataaaaatataaaaattagcctggcatggtagcatgcgcctatagtcccagctgctcaggaggctgaggcatgagaatcgcttgaacctaggaggtggaggttgcattcaactgagatcataccacttcattccagcctgggtgacagagcaagactctgtctcaaaaaaaaaaaaaggaaaactctgtgatggacatttgtttagtaaatcccttcagtatttatccctcctttccccacagcagctttctttcctgtcaactagaaaggagcaggatgtaataaatacattttggtgtgactaggccacaccaactcttaatcatctcccattttccttagacatttaaatttcaaggcaggtaccctctgtgtactcagaaatttgaagaagttatttggttttccaaaatgcacactgcgggttattgatttgttctttacaactattgttctcatatttctcacactaaataaatctctatgagagcttct

SEQ ID NO: 405976 - DNA, 4181 bp, Homo sapiens
gagaaggggaccttcaggtccaggcaaagggggaacttctgtcgtgggaacgaaaaagaaagaggatttacagggtggggggacagaggggcagcaggaaccagaagggagacagtggcggtcgcaccggggccgatccgagagttccccttagagaacggagctcacgggcggggaggcctcacctgctagtaggacgcagaaagacagaaggcgaaggagaccccctgccgtagccatcttgcctctctgctgagcggaagcccccgttcggctcctgtctgttagcggcctctctaggctaccactgacaccgtctctgtggcccggagcctaagagaccggaagttcgtgtttccaggcgcttccggaaaccgcgggagagggtcgctgacgtggaggcgtccgaagggcagcagggtgtgtcggggctcggattaagacatcggagtcggagacctgagagatgttaaccaaattcgagaccaagagcgcgcgggtcaaagggctcagctttcaccccaaaagaccttggatcctgactagtttacataatggggtcatccagttatgggactatcggatgtgcactctcattgacaagtttgatgaacatgatggtccagtgcgaggcattgacttccataagcagcagccactgttcgtctctggaggagatgactataagattaaggtttggaattacaagcttcggcgctgtcttttcacattgcttgggcacttagattatattcgcaccacgttttttcatcatgaatatccctggattctgagtgcctccgatgatcagaccatccgagtgtggaactggcaatctagaacctgtgtttgtgtgttaacagggcacaaccattatgtgatgtgtgctcagttccaccccacagaagacttggtagtatcagccagcctggaccagactgtgcgcgtttgggatatttctggtctgaggaaaaaaaacctgtcccctggtgcggtggaatcggatgtgagaggaataactggggttgatctatttggaactacagatgcagtggtgaagcatgtactagagggtcacgatcgtggagtaaactgggctgccttccaccccactatgccccttattgtatctggggcagatgatcgtcaagtgaagatctggcgcatgaatgaatcaaaggcatgggaggttgatacctgccggggccattacaacaatgtatcttgtgccgtcttccaccctcgccaagagttgatcctcagcaattctgaggacaagagtattcgagtctgggatatgtctaagcggactggggttcagactttccgcagagaccatgatcgtttctgggtcctagctgctcaccctaaccttaacctctttgcagcaggccatgatggtggtatgattgtgtttaagctggaacgggaacggccagcctatgctgttcatggcaatatgctacactatgtcaaggaccgattcttacgacagctggatttcaacagctccaaagatgtagctgtgatgcagttgcggagtggttccaagtttccagtattcaatatgtcatacaatccagcagaaaatgcagtcctgctttgtacaagagctagcaatctagagaatagtacctatgacctgtacaccatccctaaagatgctgactcccagaatcctgatgcgcctgaagggaaacgatcctcaggcctgacagccgtttgggtcgctcgaaatcggtttgctgtcctagatcggatgcattcgcttctgatcaagaatctgaagaatgagatcaccaaaaaggtacaggtgcccaactgtgatgagatcttctatgctggcacaggcaatctcctgcttcgagatgcggactctatcacactctttgacgtacagcagaagcggactctggcatctgtgaagatttctaaagtgaaatacgttatctggtcagcagacatgtcacatgtagcactactagccaaacacgccattgtgatctgtaaccgcaaactggatgctttatgtaacattcatgagaacattcgtgtcaagagtggggcctgggatgagagtggggtatttatctataccacaagcaaccacatcaaatatgctgtcaccactggggaccacgggatcattcgaactctggatttacccatctatgtcacacgggtgaagggcaacaatgtatactgcctagacagggagtgtcgtccccgggtactcaccattgatcccactgagttcaaattcaagctggccctgatcaacagaaaatatgatgaggtactgcacatggtgaggaatgccaaactagttggccagtctattattgcttatctccagaagaagggctatcctgaagtggcactgcattttgtcaaggatgagaaaactcgctttagtctggcactggagtgtggaaacattgagattgctctggaagcagccaaagcactggatgacaagaactgctgggaaaagctgggagaagtggccctgctgcaggggaaccaccagattgtggaaatgtgctatcagcgtaccaaaaactttgacaaactttccttcctgtatcttatcactggcaacttagaaaaacttcgcaagatgatgaagattgctgagatcagaaaggacatgagtggccactatcagaatgccctatacctgggtgatgtgtcagagcgtgtgcggatcctgaagaactgtggacagaagtccctggcctatctcacagctgctacccatggcttagatgaagaagctgagagcctaaaggagacatttgacccagagaaggagacaatcccagacattgaccctaatgccaagctgctccagccacctgcacctatcatgccattggataccaattggcctttattgactgtatccaaaggattttttgaaggcaccattgccagcaaagggaagggaggagcactggctgctgacattgacattgacactgttggtacagagggctggggagaggatgcagagctgcagttggatgaagatgggtttgtggaggctacagaaggtttgggggatgatgctcttggcaagggacaggaagaaggaggtggctgggatgtagaagaagatctggagctccctcctgagctggatatatcccctggggcagctggtggggctgaagatggtttctttgtgcccccaaccaagggaacaagtccaactcagatctggtgtaataactctcagcttccagttgatcacatcctggcaggctctttcgaaacagccatgcggctccttcatgaccaagtaggggtaatccagtttggcccctacaagcaactgttcctacagacatacgcccgaggccgcacaacctatcaggctctgccctgcctaccctccatgtatggctatcctaatcgcaactggaaggatgcagggctgaagaatggtgtaccagctgtgggcctgaagcttaatgacctcatccaacggttgcagctgtgctaccagctcaccacagttggcaaatttgaggaggctgtggaaaaattccgttccatccttctcagtgtgccacttcttgttgtggacaataaacaagagattgcagaggcccagcagctcatcaccatttgccgtgagtacattgtgggtttgtccgtggagacagaaaggaagaagctgcccaaagagactctagaacagcagaagcgcatctgtgagatggcagcctatttcacccactcaaacctgcagcctgtgcacatgatcctggtgctgcgtacagccctcaatctgttcttcaagctcaagaacttcaagacagctgccacctttgctcggcgcctactagaactcgggcccaagcctgaggtggcccaacagaaccctctaaatccccttgtaaataaaaaaaaaaaaaaaaaaaaaaaaaataaaagcatataaaaaaagggggggggaggcataataataatatttccttcggggggggccaaagtatatatggggttacccaggtttttttcgtgaccaaggggggcctcaatatataggggacgggagtttttattaagcaagggaaagtggggggggcgtttaaaaacggtggggtacgggggaacaaaccgcttaccgtgggactctttgggagaaggaaccttaatcggggggggggaca

SEQ ID NO: 405977 - DNA, 1939 bp, Homo sapiens
ataactgctaacgtttatttaatgttcactgtgtgccaggcactatcctaaatactttaataggtatcattaaatgaggtaggtcttacaattaagtgtattttactgatgaggaaacgtgaacagagaaattaattaccttgcccaaggaaaagtagctttttatgcagcagggccaaaatccttgtttctttccttctgttccagctccttcatgaccaagtaggggtaatccagtttggcccctacaagcaactgttcctacagacatacgcccgaggccgcacaacctatcaggctctgccctgcctaccctccatgtatggctatcctaatcgcaactggaaggatgcagggctgaagaatggtgtaccagctgtgggcctgaagcttaatgacctcatccaacggttgcagctgtgctaccagctcaccacagttggcaaatttgaggaggctgtggaaaaattccgttccatccttctcagtgtgccacttcttgttgtggacaataaacaagagattgcagaggcccagcagctcatcaccatttgccgtgagtacattgtgggtttgtccgtggagacagaaaggaagaagctgcccaaagagactctagaacagcagaagcgcatctgtgagatggcagcctatttcacccactcaaacctgcagcctgtgcacatgatcctggtgctgcgtacagccctcaatctgttcttcaagctcaagaacttcaagacagctgccacctttgctcggcgcctactagaactcgggcccaagcctgaggtggcccaacagacccgaaaaatcctgtctgcctgtgagaagaatcccacagatgcctaccagctcaattatgacatgcacaacccctttgacatttgtgctgcatcatatcggcccatctaccgtggaaagccagtagaaaagtgtccactcagtggggcctgctattcccctgagttcaaaggtcaaatctgcagggtcaccacagtgacagagattggcaaagatgtgattggtttaaggatcagtcctctgcagtttcgctaaggccccctttgtgtgcatgggtcagtcaccatatgttccccccagagaatgtgtctatatcctccttctaacagcaccttccccctgcagctactcttcagatctggctctctgtaccctaaaacctagtatctttttctcttctatggaaaatccgaaggtctaaacttgacttttttgaggtcttctcaacttgactacagttgtgctcataattgtccttgcctttccagcttaattattttaaggaacaaatgaaaactctgggctgggtggagtggctcatacctgtaatcccagcactttgggaggctacggtgggcagatcatctgaggccaggagttcgagacctgcctggccaacatggcaacaccccgtctctaataaaaatataaaaattagcctggcatggtagcatgcgcctatagtcccagctgctcaggaggctgaggcatgagaatcgcttgaacctaggaggtggaggttgcattcaactgagatcataccacttcattccagcctgggtgacagagcaagactctgtctcaaaaaaaaaaaaaggaaaactctgtgatggacatttgtttagtaaatcccttcagtatttatccctcctttccccacagcagctttctttcctgtcaactagaaaggagcaggatgtaataaatacattttggtgtgactaggccacaccaactcttaatcatctcccattttccttagacatttaaatttcaaggcaggtaccctctgtgtactcagaaatttgaagaagttatttggttttccaaaatgcacactgcgggttattgatttgttctttacaactattgttctcatatttctcacactaaataaatctctatgagagcttct

SEQ ID NO: 405978 - DNA, 2346 bp, Homo sapiens
gagaaggggaccttcaggtccaggcaaagggggaacttctgtcgtgggaacgaaaaagaaagaggatttacagggtggggggacagaggggcagcaggaaccagaagggagacagtggcggtcgcaccggggccgatccgagagttccccttagagaacggagctcacgggcggggaggcctcacctgctagtaggacgcagaaagacagaaggcgaaggagaccccctgccgtagccatcttgcctctctgctgagcggaagcccccgttcggctcctgtctgttagcggcctctctaggctaccactgacaccgtctctgtggcccggagcctaagagaccggaagttcgtgtttccaggcgcttccggaaaccgcgggagagggtcgctgacgtggaggcgtccgaagggcagcagggtgtgtcggggctcggattaagacatcggagtcggagacctgagagatgttaaccaaattcgagaccaagagcgcgcgggtcaaagggctcagctttcaccccaaaagaccttggatcctgactagtttacataatggggtcatccagttatgggactatcggatgtgcactctcattgacaagtttgatgaacatgatggtccagtgcgaggcattgacttccataagcagcagccactgttcgtctctggaggagatgactataagattaaggtttggaattacaagcttcggcgctgtcttttcacattgcttgggcacttagattatattcgcaccacgttttttcatcatgaatatccctggattctgagtgcctccgatgatcagaccatccgagtgtggaactggcaatctagaacctgtgtttgtgtgttaacagggcacaaccattatgtgatgtgtgctcagttccaccccacagaagacttggtagtatcagccagcctggaccagactgtgcgcgtttgggatatttctggtctgaggaaaaaaaacctgtcccctggtgcggtggaatcggatgtgagaggaataactggggttgatctatttggaactacagatgcagtggtgaagcatgtactagagggtcacgatcgtggagtaaactgggctgccttccaccccactatgccccttattgtatctggggcagatgatcgtcaagtgaagatctggcgcatgaatgaatcaaaggcatgggaggttgatacctgccggggccattacaacaatgtatcttgtgccgtcttccaccctcgccaagagttgatcctcagcaattctgaggacaagagtattcgagtctgggatatgtctaagcggactggggttcagactttccgcagagaccatgatcgtttctgggtcctagctgctcaccctaaccttaacctctttgcagcaggccatgatggtggtatgattgtgtttaagctggaacgggaacggccagcctatgctgttcatggcaatatgctacactatgtcaaggaccgattcttacgacagctggatttcaacagctccaaagatgtagctgtgatgcagttgcggagtggttccaagtttccagtattcaatatgtcatacaatccagcagaaaatgcagtcctgctttgtacaagagctagcaatctagagaatagtacctatgacctgtacaccatccctaaagatgctgactcccagaatcctgatgcgcctgaagggaaacgatcctcaggcctgacagccgtttgggtcgctcgaaatcggtttgctgtcctagatcggatgcattcgcttctgatcaagaatctgaagaatgagatcaccaaaaaggtacaggtgcccaactgtgatgagatcttctatgctggcacaggcaatctcctgcttcgagatgcggactctatcacactctttgacgtacagcagaagcggactctggcatctgtgaagatttctaaagtgaaatacgttatctggtcagcagacatgtcacatgtagcactactagccaaacacgccattgtgatctgtaaccgcaaactggatgctttatgtaacattcatgagaacattcgtgtcaagagtggggcctgggatgagagtggggtatttatctataccacaagcaaccacatcaaatatgctgtcaccactgggtaagttaattatctgggatacagaatgggagaagacagcttcctgaaatcactgtcttgtcttgagatgtaactgaagtcctccatgaattttcttcatggaaaagccttacctggcatatatgtgcaaggggcatcagaacattcttttttcaacttttttaaaattgagaaatctaaaacaaatatagacaattacattaaaaaaaaata

SEQ ID NO: 405979 - DNA, 1856 bp, Homo sapiens
gagaaggggaccttcaggtccaggcaaagggggaacttctgtcgtgggaacgaaaaagaaagaggatttacagggtggggggacagaggggcagcaggaaccagaagggagacagtggcggtcgcaccggggccgatccgagagttccccttagagaacggagctcacgggcggggaggcctcacctgctagtaggacgcagaaagacagaaggcgaaggagaccccctgccgtagccatcttgcctctctgctgagcggaagcccccgttcggctcctgtctgttagcggcctctctaggctaccactgacaccgtctctgtggcccggagcctaagagaccggaagttcgtgtttccaggcgcttccggaaaccgcgggagagggtcgctgacgtggaggcgtccgaagggcagcagggtgtgtcggggctcggattaagacatcggagtcggagacctgagagatgttaaccaaattcgagaccaagagcgcgcgggtcaaagggctcagctttcaccccaaaagaccttggatcctgactagtttacataatggggtcatccagttatgggactatcggatgtgcactctcattgacaagtttgatgaacatgatggtccagtgcgaggcattgacttccataagcagcagccactgttcgtctctggaggagatgactataagattaaggtttggaattacaagcttcggcgctgtcttttcacattgcttgggcacttagattatattcgcaccacgttttttcatcatgaatatccctggattctgagtgcctccgatgatcagaccatccgagtgtggaactggcaatctagaacctgtgtttgtgtgttaacagggcacaaccattatgtgatgtgtgctcagttccaccccacagaagacttggtagtatcagccagcctggaccagactgtgcgcgtttgggatatttctggtctgaggaaaaaaaacctgtcccctggtgcggtggaatcggatgtgagaggaataactggggttgatctatttggaactacagatgcagtggtgaagcatgtactagagggtcacgatcgtggagtaaactgggctgccttccaccccactatgccccttattgtatctggggcagatgatcgtcaagtgaagatctggcgcatgaatgaatcaaaggcatgggaggttgatacctgccggggccattacaacaatgtatcttgtgccgtcttccaccctcgccaagagttgatcctcagcaattctgaggacaagagtattcgagtctgggatatgtctaagcggactggggttcagactttccgcagagaccatgatcgtttctgggtcctagctgctcaccctaaccttaacctctttgcagcaggccatgatggtggtatgattgtgtttaagctggaacgggaacggccagcctatgctgttcatggcaatatgctacactatgtcaaggaccgattcttacgacagctggatttcaacagctccaaagatgtagctgtgatgcagttgcggagtggttccaagtttccagtattcaatatgtcatacaatccagcagaaaatgcagtcctgctttgtacaagagctagcaatctagagaatagtacctatgacctgtacaccatccctaaagatgctgactcccagaatcctgatggtaagtgttctttttgtctaccccactctgcttccagctctcctcacccgcatcataactcctcttcaagtttttcacattccatccccaagccatggccacatcactcatgtctgttggcaggtgctgctgacaattgcatcagaggcgaccatggtgtgaaatattcat

SEQ ID NO: 405980 - DNA, 2286 bp, Homo sapiens
gagaaggggaccttcaggtccaggcaaagggggaacttctgtcgtgggaacgaaaaagaaagaggatttacagggtggggggacagaggggcagcaggaaccagaagggagacagtggcggtcgcaccggggccgatccgagagttccccttagagaacggagctcacgggcggggaggcctcacctgctagtaggacgcagaaagacagaaggcgaaggagaccccctgccgtagccatcttgcctctctgctgagcggaagcccccgttcggctcctgtctgttagcggcctctctaggctaccactgacaccgtctctgtggcccggagcctaagagaccggaagttcgtgtttccaggcgcttccggaaaccgcgggagagggtcgctgacgtggaggcgtccgaagggcagcagggtgtgtcggggctcggattaagacatcggagtcggagacctgagagatgttaaccaaattcgagaccaagagcgcgcgggtcaaagggctcagctttcaccccaaaagaccttggatcctgactagtttacataatggggtcatccagttatgggactatcggatgtgcactctcattgacaagtttgatgaacatgatggtccagtgcgaggcattgacttccataagcagcagccactgttcgtctctggaggagatgactataagattaaggtttggaattacaagcttcggcgctgtcttttcacattgcttgggcacttagattatattcgcaccacgttttttcatcatgaatatccctggattctgagtgcctccgatgatcagaccatccgagtgtggaactggcaatctagaacctgtgtttgtgtgttaacagggcacaaccattatgtgatgtgtgctcagttccaccccacagaagacttggtagtatcagccagcctggaccagactgtgcgcgtttgggatatttctggtctgaggaaaaaaaacctgtcccctggtgcggtggaatcggatgtgagaggaataactggggttgatctatttggaactacagatgcagtggtgaagcatgtactagaggtacttatctttatagccaggggctgaatatgggctgtcatcttgggaaagtcacagtatgttgttcatttattcattccttcaacaaatatttacagagtgcttattaagtgccaggcactgtttgaggtactagaaatcaaattgtgcgtgaaccaacagagaaatgaagcttatgtgccacctgagggagagtcttattaccttataaacccagtgggaaagggagaaagccaggcgtagacctcatcaccatcccaaagcagagcccattctcaagctttctgtaaggcagggcagcaggaaatttaatcggagttatcgagaaccagccatgtgtaacttttgtgcaggtgggaaaacagaaaagcataagggaaagaaactagtttttgttctaaaaaattatctaatcttcatagctacccactgaagtagatattattatccctatttagcagacaaaaaaaaaaaagagatttagagaaattaagtggtctaccaaaatctacatatatctagtaaataaatgtaagaaataagatttgaatttcgatctgactccaaaacccaggtgcttttcgctgcatcatgatacatctcaataatactgctaattcaaaactgccttatccaggattctgtcacaatataccatataactgtataaatagggtatacagtatcttaaaatcagcagttcttaaactttttggtctgaagatctctttatactcttaaaatttattgaggaccccaaagagtttttgtttatgtgggttatatctgtcaattttttaccacattttagattaaaacaacttttaaaaacatgaaatatatcagcacacattctattagctgtcagagcgatgatatcacatatcatgtgctgggaaactctattgtatacttacgaaagaataagaatgaagaagataaataggctgggtgcagtgggtcacacctgtaatctcagcactttgggagaccgaggccagaggattacttgaggccaggagtttgaaaccagcctaggcaacatagcaagaccttgtctctaccaaaaaaaaaaaaaaaaaaaattagctgggcgtggtggtgctcacttgtagtcctttgggaggccgaggtaggagaatcacttgatcctggaagtttgagacttcagggagcaattaatatgattgcaccactacactccagcctggatg

SEQ ID NO: 405981 - DNA, 1031 bp, Homo sapiens
gagaaggggaccttcaggtccaggcaaagggggaacttctgtcgtgggaacgaaaaagaaagaggatttacagggtggggggacagaggggcagcaggaaccagaagggagacagtggcggtcgcaccggggccgatccgagagttccccttagagaacggagctcacgggcggggaggcctcacctgctagtaggacgcagaaagacagaaggcgaaggagaccccctgccgtagccatcttgcctctctgctgagcggaagcccccgttcggctcctgtctgttagcggcctctctaggctaccactgacaccgtctctgtggcccggagcctaagagaccggaagttcgtgtttccaggcgcttccggaaaccgcgggagagggtcgctgacgtggaggcgtccgaagggcagcagggtgtgtcggggctcggattaagacatcggagtcggagacctgagagatgttaaccaaattcgagaccaagagcgcgcgggtcaaagggctcagctttcaccccaaaagaccttggatcctgactagtttacataatggggtcatccagttatgggactatcggatgtgcactctcattgacaagtttgatgaacatgatggtccagtgcgaggcattgacttccataagcagcagccactgttcgtctctggaggagatgactataagattaaggtttggaattacaagcttcggcgctgtcttttcacattgcttgggcacttagattatattcgcaccacgttttttcatcatgaatatccctggattctgagtgcctccgatgatcagaccatccgagtgtggaactggcaatctagaacctgtgtttggtaaagcaggaggcagagggctcgaaaagagtcttcatttttcctagtttttcataatgagcttctcttagaacaatcttctcccttctcaaatggactatgtcggctgattaattactgattgtatttgtaggatgcttttaagtgcaaaataataaatgtagaggcaatcccataaa

SEQ ID NO: 405982 - DNA, 2578 bp, Homo sapiens
cccaggaaattgtccacctggctccacgggcctgggagggctgtgtgcatgggatggcaggtttacgaggaggagtgaggcctcctgccggagccccacctgcattcagcctgaggccaggccccccacctactctaactaccctgctgagaccaccccactactcacagacctgttcaagaaaaagttgtcctcagggtctctcacacactgggaaatctacttgaaatgtaaacattactttttctcatttttcataaaaggcaacaggctgatgttcatatatttctcttgaatgcggattcagtttcactcattgccctgtcttggaaatccccacgttaatgatggcttaaattaggttgatagagtcctcccttggagtccagcttggaaaatcctcactggagaggggcaggcccacttctctttttggaagatggttcctaactaaagaaagagggaccagattgggcccctggccctgcagtgcgtcccaatttatctgacgtagaaaccgggatttggaaaataccatcctggctttttctctggacttcacaatctagagggcgaggactgtggcccagtcaccttcccacacagtgcacagtagaaactccagacatgctttgtggagtggaaacatttccagtggcttctgactctagttcctgatgtggtttaaactaatttgggcagccatggcagcagaggccaggaacagtattcaatactttctgaacttgtgattctcccccaacctgatttgcatgaagctactttggaacatttgtatctgcgtaaaactaagagacctcagtacacccaatcccctcttccaacacatgtgaggtttccatgtgaaagtactttttcataggttacaataaattgcttgcagttacaaatttggaggtgtttcagcttgtattgtttcacgaggaatttcttaggggcacttggcctacaccctgtttttgttctagaattacctgccgttaaggtcagataaattttcagtaaacagattatggcacaaatcaatgtgtcctttcccggacagaagagatggctctctggccatgtcctaacaccagactgtccttatttaagaggcaggcgtgtcttttgtctaggttgtcttcaaatttaacccattaaaccagttaaccttatttcatatgtgaagggctttgatgtggacaagatgaggcacaaacttttcatataatttccacatttttagcaacaggttttttttctccaacaacagttttcatcataaaaggtgactaaaccagcaaatgagaagacaaataacattgaagaacatgagctattgaaacttactttttattattttttccagttacccagcatgccacaatctgattgctgacctggatggaacagagtgaaataaatgatttacaaagagatatttacattcatctggtttagacttaatatgccacaacgcaccacgaccttcccagggtgacaccgcctcagcctgcagtggggctggtcctcatcaacgcgggcgctgtccccgcacgcagtcgggctggagctggagtctgactctagctgagcagagctcctggtgtatgttttcagaaatggcttgaagttatgtgtttaaatctgctcattcgtatgctaggttatacatatgattttcaataaatgaactttttaaagacttgagttgtaatgtttcctttttatcttgtagtgatgaacaaaacacaccaaaaaggcacatattttaactaggccaaagtatattaaggaccaaactttttttcctgccattcatttttcttttcatgatctatatatcaatcatccttcacctttaatcaatgtcccatcagactccattttatttatttatcgtcctactttgtgcacaatcaatcaatcaggagacaccaggaagcactatgcattactctttccattctgttaaacaacgaaaacagacaaaaaagcatctttggctcggtggtgtcagatttttttcttcaatacgcagtatttgagaggagcctaaaaacgtacttagtgaaattagaaaatttacttagagtatatcaaatatctgtacacagataattatttgtctaaaatagtatttctactatacacaattaagccctcaaatgctttaaagtaataaaaacggacactggacataccgtgttgtatctgagaatgacaaacactaaaggcaaggctgcagttagttaggacaggtccctgaccttcggctgccctgcctggccagcgagccatcatcctcatcaccatctcaacacagagctgatgtcaccatatgctcagccttgcctctcagaagtgatgtggattaggctttggaggcggtggcatgatctacacacagagaccatttgaatctcttgagcatgtaaaaggttcaagcctgaaacagtagaacttctattcagattcagaagttttttatttcatcaaatgtgctagacataaaggctgtcacataagatattttaattgtccttaattctgttttagatatactgtgaataaa

SEQ ID NO: 405983 - DNA, 771 bp, Homo sapiens
agctctgtgcgggattctaggctcccctgtgacagccgcggcaggaagcaggcgggcgctccccggccacaggcctgttgttctcggaagggagaaagcaggacatttccccacgtaactcccagctctgggcctagagtgcgtgcatggcgaagtccccggagaactctaccctggaggagattctggggcagtatcaacggagtctccggggtgagttgctccaaacctctgtccctagccccgaggtgcccagggcctagtgggcgggagcagaccaggtgcgtttcctaacacctgggttctgccccgtccacgctacagaggagcaagatggatgttgctgtggtcttgaggaggatgaaatagtttgatttagtttttacagttaagcaacgatgtttcctcagattcccgtagttacctcaatcaactccttgatcttaacttggcatctttctcaaccggcgacagcagaaactcttggatagctctatgccatttttgttcagttcccatacgttgctatttaatccaataaaagtctgattcacagtttttacacatttaaaatagcaacaggaacaactaaaaaaacatgttgtgggccgccctgggccaaagaatttttaccaccacccggtggggcgcggcccatagggtgcggacagggcaaacgtccacaggaaaccggccgcgacaggctggtttcccccgaaaacgcggggccgggttgacaccgggctgggcatggcctcacgtcggccattc

SEQ ID NO: 405984 - DNA, 572 bp, Homo sapiens
agctctgtgcgggattctaggctcccctgtgacagccgcggcaggaagcaggcgggcgctccccggccacaggcctgttgttctcggaagggagaaagcaggacatttccccacgtaactcccagctctgggcctagagtgcgtgcatggcgaagtccccggagaactctaccctggaggagattctggggcagtatcaacggagtctccggggtgagttgctccaaacctctgtccctagccccgaggtgcccagggcctagtgggcgggagcagaccaggtgcgtttcctaacacctgggttctgccccgtccacgctacagaggagcaagatggatgttgctgtggtcttgaggaggatgaaatagtttgatttagtttttacagttaagcaacgatgtttcctcagattcccgtagttacctcaatcaactccttgatcttaacttggcatctttctcaaccggcgacagcagaaactcttggatagctctatgccatttttgttcagttcccatacgttgctatttaatccaataaaagtctgattcacagtttttacacatttaaa

SEQ ID NO: 405985 - DNA, 734 bp, Homo sapiens
cggcacaggtagggcgccccgcagacccggacaacgctgggtgtggctgaaaacagggagtcatggctaaggcagctggataagcacagccaggccacagcccagcagctggtgcagctcctcagcaagcagaaccagcttctcctggagaggcagagcctgtcggaagaggtggaccggctgcggacccagttacccagcatgccacaatctgattgctgacctggatggaacagagtgaaataaatgatttacaaagagatatttacattcatctggtttagacttaatatgccacaacgcaccacgaccttcccagggtgacaccgcctcagcctgcagtggggctggtcctcatcaacgcgggcgctgtccccgcacgcagtcgggctggagctggagtctgactctagctgagcagagctcctggtgtatgttttcagaaatggcttgaagttatgtgtttaaatctgctcattcgtatgctaggttatacatatgattttcaataaatgaactttttcggacacaaaaaaaaagaaacaaactagcaaaacaaaacaactttgtgtgcgggccgcgccttgggccttgagaaaaggtttttaaaccccttcgtgttggggccgcgggggccccaatggggtaccgtgaacaccttggggcaaacggttgtccacaaggagaaactccggggccaggcacaaggggtggggtttctccccaatgaaaag

SEQ ID NO: 405986 - DNA, 1068 bp, Homo sapiens
ggacaaagcctcagtccttccttaaaatgttgactgctaccttgatttacaattcgtaccttccctactttgctgcatttttccttttcagcacctccccccacttttaaaaaactaatttgctcttctctgggctttcccctgcagccctctccacaatagatgattgtcccgcacagatgccgtcctgccacgaaggctcttagcctttctggctgctccgcccgccgctcgccaagtgaggacagagggtctttctctggggtgtgctttatttcatatgtgctcagccggcctaccctggctcttctaatacatattaatgcttttctctccctgacttatgaggacaggatcgtttgatcatttcttgttttgaatgttctttttgtgctgacagagaaagagatgacttgatgtctgcactagtttccgtaaggagcagcttggcagatacgcagcaaagagaagcaagtgcttatgaacaggtgaaacaagttttgcaaatatctgaggaagccaattttgaaaaaaccaagcacccttcacaatagcaaacgtaaacgatggaattgatggaatcaaccgaaattgacggaatcaatctaaatgttcatcactgacagattgtgtaaagaaaatgtggaacatggacaccatggaatagtatgcagccataaaaagaatgagatccgatcttttgcaggaacatgcatggagccggagacagttatccttagcaaactaacgcaggaagagaaagccaaatactgcatattcttacgtataagtgggagctaaatgataagaacttatgagcacaaagtaggaaaccacagacagtggcatctccttgaggatatagggtgggagcagggagaggagcagaagagatcactattgggtactgggcttaatacctgggtgataaaataatctgtataacaaaaccccgtgacatgagtttgcctatgtaacaaaccttcacatgtacccccgaacctaaaataaaagttaaaaaaaaattagggctattcaattctgcattaagcctcttgtcagccattg

SEQ ID NO: 405987 - DNA, 812 bp, Homo sapiens
agctctgtgcgggattctaggctcccctgtgacagccgcggcaggaagcaggcgggcgctccccggccacaggcctgttgttctcggaagggagaaagcaggacatttccccacgtaactcccagctctgggcctagagtgcgtgcatggcgaagtccccggagaactctaccctggaggagattctggggcagtatcaacggagtctccggggaggaactctctggaatgaaaaataaaatacaagtagttgtgcttgaaaacgaagggctccagcaacagctaaaatctcaaagacaagaggagacactgagggaacaaacacttctggatgcatccggaaacatgcacaattcttggattacaacaggtgaagattctggggtgggcgaaacctccaaaagaccattttcccatgacaatgcagattttggcaaagctgcatctgctggtgagcagctagaactggagaagctaaaacttacttatgaggaaaagtgtgaaattgaggaatcccaattgaagtttttgagagaaagagatgacttgatgtctgcactagtttccgtaaggagcagcttggcagatacgcagcaaagagaagcaagtgcttatgaacaggtgaaacaagttttgcaaatatctgaggaagccaattttgaaaaaaccaaggcaagtctaataagatgcaaataaaagtgtctttcttttttttttcttttttcttctgagtatttattgggttattcttctataactaaacttggtttttcaaacacacaaagtgaattatcaatctggaggtatcgact

SEQ ID NO: 405988 - DNA, 979 bp, Homo sapiens
ctgcctgttgcaaagatgagataaaggcgcgggaaagaagggtctgaattaggggttgagctctgaaatcggacgattctgtgtttcctgccgcatggagggcgtgtgtggttcgcaggctgtggggggtttcttgcagcgggggctgctgcctaaacagactccgcgggccccatgatggcaaaccccctcgccccgttcatgacttaatgcctcctagaagaaaaggctaaaaacaagacacacagaacaagaaattgcactctctcaaaacgacagtcgccctgaaacggacgctggaagaggtttccaggcccgtggcgacggctaaggcagctggataagcacagccaggccacagcccagcagctggtgcagctcctcagcaagcagaaccagcttctcctggagaggcagagcctgtcggaagaggtggaccggctgcggacccagagacaaaatctggctctgtcacccaggctagagtgcagggatgtgatcatagttcactgaagcctcaaaactcctggcctcgagcaatcctcctgcctcagcctcctgaagcaatcctcctgcctcagcctccttgagcaatcctcctgcctcagcctcctgagcagctatgaccacaggtgcacaccagtatgcccagctaatattttgttatttagagatgggatctcactatgttgtgcagactagtctcgaactcctctaccttggccttcaaaagtactgagattatagttgtgagctactgtgcccagtcctagtttcttaagatagaagctaaggtcattaattttacacttttcttcttttctaatgtttaaaaatatcttttagtactataaattgtatttagtactataaatttaagtattgctttagctgtatatcacagctaaacacattgtgttttcgttttcagtccattcaaaatactttctcatttccctttgatttcttctttgatcca

SEQ ID NO: 405989 - DNA, 618 bp, Homo sapiens
caggacaacgaactgctgtctagtatcaatgtacaccttgtgggtaggtctgatgagctgtgtaatcagtggtgctttactgcggagttcggttcatcccgcagcgccagttctgccccgtccacgctacagaggagcaagatggatgttgctgtggtcttgaggaggatgaaatagtttgatttagtttttacagttaagcaacgatgtttcctcagattcccgtagttacctcaatcaactccttgatcttaacttggcatctttctcaaccggcgacagcagaaactcttggatagctctatgccatttttgttcagttcccatacgttgctatttaatccaataaaagtctgattcacagtttttacacatttaaattatggcacagtggattgaatgtgatttatgggatcagtggggggaaacactaataattattttaatcacaagagcccccttttaattgatttaggctatttacatacagtaaatcatctgcagcttacaccaatcgtgtgaatattttacacatggggaaagcgaagctcagagaggttgaattacaggccagagcccacacagctggttagttgcagagccaggtattatcaggct

SEQ ID NO: 405990 - DNA, 3464 bp, Homo sapiens
agctctgtgcgggattctaggctcccctgtgacagccgcggcaggaagcaggcgggcgctccccggccacaggcctgttgttctcggaagggagaaagcaggacatttccccacgtaactcccagctctgggcctagagtgcgtgcatggcgaagtccccggagaactctaccctggaggagattctggggcagtatcaacggagtctccgggaacatgccagcagaagcattcaccaactgacatgtgccctgaaagaaggcgatgtcactattggagaagatgcaccaaatctttcttttagcaccagtgtgggaaatgaggacgccaggacagcctggcccgaattacaacagagccatgctgttaatcagctcaaagatttgttgcgccaacaagcagataaggaaagtgaagtatctccgtcaagaagaagaaaaatgtcccccttgaggtcattagaacatgaggaaaccaatatgcctactatgcacgaccttgttcatactattaatgaccagtctcaatatattcatcatttagaggcagaagttaagttctgcaaggaggaactctctggaatgaaaaataaaatacaagtagttgtgcttgaaaacgaagggctccagcaacagctaaaatctcaaagacaagaggagacactgagggaacaaacacttctggatgcatccggaaacatgcacaattcttggattacaacaggtgaagattctggggtgggcgaaacctccaaaagaccattttcccatgacaatgcagattttggcaaagctgcatctgctggtgagcagctagaactggagaagctaaaacttacttatgaggaaaagtgtgaaattgaggaatcccaattgaagtttttgaggaacgacttagctgaatatcagagaacttgtgaagatcttaaagagcaactaaagcataaagaatttcttctggctgctaatacttgtaaccgtgttggtggtctttgtttgaaatgtgctcagcatgaagctgttctttcccaaacccatactaatgttcatatgcagaccatcgaaagactggttaaagaaagagatgacttgatgtctgcactagtttccgtaaggagcagcttggcagatacgcagcaaagagaagcaagtgcttatgaacaggtgaaacaagttttgcaaatatctgaggaagccaattttgaaaaaaccaaggctttaatccagtgtgaccagttgaggaaggagctggagaggcaggcggagcgacttgaaaaagaacttgcatctcagcaagagaaaagggccattgagaaagacatgatgaaaaaggaaataacgaaagaaagggagtacatgggatcaaagatgttgatcttgtctcagaatattgcccaactggaggcccaggtggaaaaggttacaaaggaaaagatttcagctattaatcaactggaggaaattcaaagccagctggcttctcgggaaatggatgtcacaaaggtgtgtggagaaatgcgctatcagctgaataaaaccaacatggagaaggatgaggcagaaaaggagcacagagagttcagagcaaaaactaacagggatcttgaaattaaagatcaggaaatagagaaattgagaatagaactggatgaaagcaaacaacacttggaacaggagcagcagaaggcagccctggccagagaggagtgcctgagactaacagaactgctgggcgaatctgagcaccaactgcacctcaccagacaggaaaaagatagcattcagcagagctttagcaaggaagcaaaggcccaagcccttcaggcccagcaaagagagcaggagctgacacagaagatacagcaaatggaggcccagcatgacaaaactgaaaatgaacagtatttgttgctgacctcccagaatacatttttgacaaagttaaaggaagaatgctgtacattagccaagaaactggaacaaatctctcaaaaaaccagatctgaaatagctcaactcagtcaagaaaaaaggtatacatatgataaattgggaaagttacagagaagaaatgaagaattggaggaacagtgtgtccagcatgggagagtacatgagacgatgaagcaaaggctaaggcagctggataagcacagccaggccacagcccagcagctggtgcagctcctcagcaagcagaaccagcttctcctggagaggcagagcctgtcggaagaggtggaccggctgcggacccagttacccagcatgccacaatctgattgctgacctggatggaacagagtgaaataaatgatttacaaagagatatttacattcatctggtttagacttaatatgccacaacgcaccacgaccttcccagggtgacaccgcctcagcctgcagtggggctggtcctcatcaacgcgggcgctgtccccgcacgcagtcgggctggagctggagtctgactctagctgagcagagctcctggtgtatgttttcagaaatggcttgaagttatgtgtttaaatctgctcattcgtatgctaggttatacatatgattttcaataaatgaactttttaaagacttgagttgtaatgtttcctttttatcttgtagtgatgaacaaaacacaccaaaaaggcacatattttaactaggccaaagtatattaaggaccaaactttttttcctgccattcatttttcttttcatgatctatatatcaatcatccttcacctttaatcaatgtcccatcagactccattttatttatttatcgtcctactttgtgcacaatcaatcaatcaggagacaccaggaagcactatgcattactctttccattctgttaaacaacgaaaacagacaaaaaagcatctttggctcggtggtgtcagatttttttcttcaatacgcagtatttgagaggagcctaaaaacgtacttagtgaaattagaaaatttacttagagtatatcaaatatctgtacacagataattatttgtctaaaatagtatttctactatacacaattaagccctcaaatgctttaaagtaataaaaacggacactggacataccgtgttgtatctgagaatgacaaacactaaaggcaaggctgcagttagttaggacaggtccctgaccttcggctgccctgcctggccagcgagccatcatcctcatcaccatctcaacacagagctgatgtcaccatatgctcagccttgcctctcagaagtgatgtggattaggctttggaggcggtggcatgatctacacacagagaccatttgaatctcttgagcatgtaaaaggttcaagcctgaaacagtagaacttctattcagattcagaagttttttatttcatcaaatgtgctagacataaaggctgtcacataagatattttaattgtccttaattctgttttagatatactgtgaataaa

SEQ ID NO: 405991 - DNA, 3323 bp, Homo sapiens
agctctgtgcgggattctaggctcccctgtgacagccgcggcaggaagcaggcgggcgctccccggccacaggcctgttgttctcggaagggagaaagcaggacatttccccacgtaactcccagctctgggcctagagtgcgtgcatggcgaagtccccggagaactctaccctggaggagattctggggcagtatcaacggagtctccgggaacatgccagcagaagcattcaccaactgacatgtgccctgaaagaaggcgatgtcactattggagaagatgcaccaaatctttcttttagcaccagtgtgggaaatgaggacgccaggacagcctggcccgaattacaacagagccatgctgttaatcagctcaaagatttgttgcgccaacaagcagataaggaaagtgaagtatctccgtcaagaagaagaaaaatgtcccccttgaggtcattagaacatgaggaaaccaatatgcctactatgcacgaccttgttcatactattaatgaccagtctcaatatattcatcatttagaggcagaagttaagttctgcaaggaggaactctctggaatgaaaaataaaatacaagtagttgtgcttgaaaacgaagggctccagcaacagctaaaatctcaaagacaagaggagacactgagggaacaaacacttctggatgcatccggaaacatgcacaattcttggattacaacaggtgaagattctggggtgggcgaaacctccaaaagaccattttcccatgacaatgcagattttggcaaagctgcatctgctggtgagcagctagaactgaactttttgatcatctcaaacaaaaagtctggacgtattaaacaatatctccattcccctccctgccaacccctgatgacctctcttcaactttcggagaagctaaaacttacttatgaggaaaagtgtgaaattgaggaatcccaattgaagtttttgaggaacgacttagctgaatatcagagaacttgtgaagatcttaaagagcaactaaagcataaagaatttcttctggctgctaatacttgtaaccgtgttggtggtctttgtttgaaatgtgctcagcatgaagctgttctttcccaaacccatactaatgttcatatgcagaccatcgaaagactggttaaagaaagagatgacttgatgtctgcactagtttccgtaaggagcagcttggcagatacgcagcaaagagaagcaagtgcttatgaacaggtgaaacaagttttgcaaatatctgaggaagccaattttgaaaaaaccaaggctttaatccagtgtgaccagttgaggaaggagctggagaggcaggcggagcgacttgaaaaagaacttgcatctcagcaagagaaaagggccattgagaaagacatgatgaaaaaggaaataacgaaagaaagggagtacatgggatcaaagatgttgatcttgtctcagaatattgcccaactggaggcccaggtggaaaaggttacaaaggaaaagatttcagctattaatcaactggaggaaattcaaagccagctggcttctcgggaaatggatgtcacaaaggtgtgtggagaaatgcgctatcagctgaataaaaccaacatggagaaggatgaggcagaaaaggagcacagagagttcagagcaaaaactaacagggatcttgaaattaaagatcaggaaatagagaaattgagaatagaactggatgaaagcaaacaacacttggaacaggagcagcagaaggcagccctggccagagaggagtgcctgagactaacagaactgctgggcgaatctgagcaccaactgcacctcaccagatctgaaatagctcaactcagtcaagaaaaaaggtatacatatgataaattgggaaagttacagagaagaaatgaagaattggaggaacagtgtgtccagcatgggagagtacatgagacgatgaagcaaaggctaaggcagctggataagcacagccaggccacagcccagcagctggtgcagctcctcagcaagcagaaccagcttctcctggagaggcagagcctgtcggaagaggtggaccggctgcggacccagttacccagcatgccacaatctgattgctgacctggatggaacagagtgaaataaatgatttacaaagagatatttacattcatctggtttagacttaatatgccacaacgcaccacgaccttcccagggtgacaccgcctcagcctgcagtggggctggtcctcatcaacgcgggcgctgtccccgcacgcagtcgggctggagctggagtctgactctagctgagcagagctcctggtgtatgttttcagaaatggcttgaagttatgtgtttaaatctgctcattcgtatgctaggttatacatatgattttcaataaatgaactttttaaagacttgagttgtaatgtttcctttttatcttgtagtgatgaacaaaacacaccaaaaaggcacatattttaactaggccaaagtatattaaggaccaaactttttttcctgccattcatttttcttttcatgatctatatatcaatcatccttcacctttaatcaatgtcccatcagactccattttatttatttatcgtcctactttgtgcacaatcaatcaatcaggagacaccaggaagcactatgcattactctttccattctgttaaacaacgaaaacagacaaaaaagcatctttggctcggtggtgtcagatttttttcttcaatacgcagtatttgagaggagcctaaaaacgtacttagtgaaattagaaaatttacttagagtatatcaaatatctgtacacagataattatttgtctaaaatagtatttctactatacacaattaagccctcaaatgctttaaagtaataaaaacggacactggacataccgtgttgtatctgagaatgacaaacactaaaggcaaggctgcagttagttaggacaggtccctgaccttcggctgccctgcctggccagcgagccatcatcctcatcaccatctcaacacagagctgatgtcaccatatgctcagccttgcctctcagaagtgatgtggattaggctttggaggcggtggcatgatctacacacagagaccatttgaatctcttgagcatgtaaaaggttcaagcctgaaacagtagaacttctattcagattcagaagttttttatttcatcaaatgtgctagacataaaggctgtcacataagatattttaattgtccttaattctgttttagatatactgtgaataaa

SEQ ID NO: 405992 - DNA, 3337 bp, Homo sapiens
agctctgtgcgggattctaggctcccctgtgacagccgcggcaggaagcaggcgggcgctccccggccacaggcctgttgttctcggaagggagaaagcaggacatttccccacgtaactcccagctctgggcctagagtgcgtgcatggcgaagtccccggagaactctaccctggaggagattctggggcagtatcaacggagtctccgggaacatgccagcagaagcattcaccaactgacatgtgccctgaaagaaggcgatgtcactattggagaagatgcaccaaatctttcttttagcaccagtgtgggaaatgaggacgccaggacagcctggcccgaattacaacagagccatgctgttaatcagctcaaagatttgttgcgccaacaagcagataaggaaagtgaagtatctccgtcaagaagaagaaaaatgtcccccttgaggtcattagaacatgaggaaaccaatatgcctactatgcacgaccttgttcatactattaatgaccagtctcaatatattcatcatttagaggcagaagttaagttctgcaaggaggaactctctggaatgaaaaataaaatacaagtagttgtgcttgaaaacgaagggctccagcaacagctaaaatctcaaagacaagaggagacactgagggaacaaacacttctggatgcatccggaaacatgcacaattcttggattacaacaggtgaagattctggggtgggcgaaacctccaaaagaccattttcccatgacaatgcagattttggcaaagctgcatctgctggtgagcagctagaactggagaagctaaaacttacttatgaggaaaagtgtgaaattgaggaatcccaattgaagtttttgaggaacgacttagctgaatatcagagaacttgtgaagatcttaaagagcaactaaagcataaagaatttcttctggctgctaatacttgtaaccgtgttggtggtctttgtttgaaatgtgctcagcatgaagctgttctttcccaaacccatactaatgttcatatgcagaccatcgaaagactggttaaagaaagagatgacttgatgtctgcactagtttccgtaaggagcagcttggcagatacgcagcaaagagaagcaagtgcttatgaacaggtgaaacaagttttgcaaatatctgaggaagccaattttgaaaaaaccaaggctttaatccagtgtgaccagttgaggaaggagctggagaggcaggcggagcgacttgaaaaagaacttgcatctcagcaagagaaaagggccattgagaaagacatgatgaaaaaggaaataacgaaagaaagggagtacatgggatcaaagatgttgatcttgtctcagaatattgcccaactggaggcccaggtggaaaaggttacaaaggaaaagatttcagctattaatcaactggaggaaattcaaagccagctggcttctcgggaaatggatgtcacaaaggtgtgtggagaaatgcgctatcagctgaataaaaccaacatggagaaggatgaggcagaaaaggagcacagagagttcagagcaaaaactaacagggatcttgaaattaaagatcaggaaatagagaaattgagaatagaactggatgaaagcaaacaacacttggaacaggagcagcagaaggcagccctggccagagaggagtgcctgagactaacagaactgctgggcgaatctgagcaccaactgcacctcaccagacaggaaaaagatagcattcagcagagctttagcaaggaagcaaaggcccaagcccttcaggcccagcaaagagagcaggagctgacacagaagatacagcaaatggaggcccagcatgacaaaactgaaaatgaacagtatttgttgctgacctcccagaatacatttttgacaaagttaaaggaagaatgctgtacattagccaagaaactggaacaaatctctcaaaaaaccagatctgaaatagctcaactcagtcaagaaaaaaggtatacatatgataaattgggaaagttacagagaagaaatgaagaattggaggaacagtgtgtccagcatgggagagtacatgagacgatgaagcaaagttacccagcatgccacaatctgattgctgacctggatggaacagagtgaaataaatgatttacaaagagatatttacattcatctggtttagacttaatatgccacaacgcaccacgaccttcccagggtgacaccgcctcagcctgcagtggggctggtcctcatcaacgcgggcgctgtccccgcacgcagtcgggctggagctggagtctgactctagctgagcagagctcctggtgtatgttttcagaaatggcttgaagttatgtgtttaaatctgctcattcgtatgctaggttatacatatgattttcaataaatgaactttttaaagacttgagttgtaatgtttcctttttatcttgtagtgatgaacaaaacacaccaaaaaggcacatattttaactaggccaaagtatattaaggaccaaactttttttcctgccattcatttttcttttcatgatctatatatcaatcatccttcacctttaatcaatgtcccatcagactccattttatttatttatcgtcctactttgtgcacaatcaatcaatcaggagacaccaggaagcactatgcattactctttccattctgttaaacaacgaaaacagacaaaaaagcatctttggctcggtggtgtcagatttttttcttcaatacgcagtatttgagaggagcctaaaaacgtacttagtgaaattagaaaatttacttagagtatatcaaatatctgtacacagataattatttgtctaaaatagtatttctactatacacaattaagccctcaaatgctttaaagtaataaaaacggacactggacataccgtgttgtatctgagaatgacaaacactaaaggcaaggctgcagttagttaggacaggtccctgaccttcggctgccctgcctggccagcgagccatcatcctcatcaccatctcaacacagagctgatgtcaccatatgctcagccttgcctctcagaagtgatgtggattaggctttggaggcggtggcatgatctacacacagagaccatttgaatctcttgagcatgtaaaaggttcaagcctgaaacagtagaacttctattcagattcagaagttttttatttcatcaaatgtgctagacataaaggctgtcacataagatattttaattgtccttaattctgttttagatatactgtgaataaa

SEQ ID NO: 405993 - DNA, 2472 bp, Homo sapiens
cttccctcggtctgggcttctctgaggcggcgagagatggtcaggtctggagctcgaccgggccaggagaagctaaaacttacttatgaggaaaagtgtgaaattgaggaatcccaattgaagtttttgaggaacgacttagctgaatatcagagaacttgtgaagatcttaaagagcaactaaagcataaagaatttcttctggctgctaatacttgtaaccgtgttggtggtctttgtttgaaatgtgctcagcatgaagctgttctttcccaaacccatactaatgttcatatgcagaccatcgaaagactggttaaagaaagagatgacttgatgtctgcactagtttccgtaaggagcagcttggcagatacgcagcaaagagaagcaagtgcttatgaacaggtgaaacaagttttgcaaatatctgaggaagccaattttgaaaaaaccaaggctttaatccagtgtgaccagttgaggaaggagctggagaggcaggcggagcgacttgaaaaagaacttgcatctcagcaagagaaaagggccattgagaaagacatgatgaaaaaggaaataacgaaagaaagggagtacatgggatcaaagatgttgatcttgtctcagaatattgcccaactggaggcccaggtggaaaaggttacaaaggaaaagatttcagctattaatcaactggaggaaattcaaagccagctggcttctcgggaaatggatgtcacaaaggtgtgtggagaaatgcgctatcagctgaataaaaccaacatggagaaggatgaggcagaaaaggagcacagagagttcagagcaaaaactaacagggatcttgaaattaaagatcaggaaatagagaaattgagaatagaactggatgaaagcaaacaacacttggaacaggagcagcagaaggcagccctggccagagaggagtgcctgagactaacagaactgctgggcgaatctgagcaccaactgcacctcaccagatctgaaatagctcaactcagtcaagaaaaaaggtatacatatgataaattgggaaagttacagagaagaaatgaagaattggaggaacagtgtgtccagcatgggagagtacatgagacgatgaagcaaaggctaaggcagctggataagcacagccaggccacagcccagcagctggtgcagctcctcagcaagcagaaccagcttctcctggagaggcagagcctgtcggaagaggtggaccggctgcggacccagttacccagcatgccacaatctgattgctgacctggatggaacagagtgaaataaatgatttacaaagagatatttacattcatctggtttagacttaatatgccacaacgcaccacgaccttcccagggtgacaccgcctcagcctgcagtggggctggtcctcatcaacgcgggcgctgtccccgcacgcagtcgggctggagctggagtctgactctagctgagcagagctcctggtgtatgttttcagaaatggcttgaagttatgtgtttaaatctgctcattcgtatgctaggttatacatatgattttcaataaatgaactttttaaagacttgagttgtaatgtttcctttttatcttgtagtgatgaacaaaacacaccaaaaaggcacatattttaactaggccaaagtatattaaggaccaaactttttttcctgccattcatttttcttttcatgatctatatatcaatcatccttcacctttaatcaatgtcccatcagactccattttatttatttatcgtcctactttgtgcacaatcaatcaatcaggagacaccaggaagcactatgcattactctttccattctgttaaacaacgaaaacagacaaaaaagcatctttggctcggtggtgtcagatttttttcttcaatacgcagtatttgagaggagcctaaaaacgtacttagtgaaattagaaaatttacttagagtatatcaaatatctgtacacagataattatttgtctaaaatagtatttctactatacacaattaagccctcaaatgctttaaagtaataaaaacggacactggacataccgtgttgtatctgagaatgacaaacactaaaggcaaggctgcagttagttaggacaggtccctgaccttcggctgccctgcctggccagcgagccatcatcctcatcaccatctcaacacagagctgatgtcaccatatgctcagccttgcctctcagaagtgatgtggattaggctttggaggcggtggcatgatctacacacagagaccatttgaatctcttgagcatgtaaaaggttcaagcctgaaacagtagaacttctattcagattcagaagttttttatttcatcaaatgtgctagacataaaggctgtcacataagatattttaattgtccttaattctgttttagatatactgtgaataaa

SEQ ID NO: 405994 - DNA, 2789 bp, Homo sapiens
ggacaaagcctcagtccttccttaaaatgttgactgctaccttgatttacaattcgtaccttccctactttgctgcatttttccttttcagcacctccccccacttttaaaaaactaatttgctcttctctgggctttcccctgcagccctctccacaatagatgattgtcccgcacagatgccgtcctgccacgaaggctcttagcctttctggctgctccgcccgccgctcgccaagtgaggacagagggtctttctctggggtgtgctttatttcatatgtgctcagccggcctaccctggctcttctaatacatattaatgcttttctctccctgacttatgaggacaggatcgtttgatcatttcttgttttgaatgttctttttgtgctgacagagaaagagatgacttgatgtctgcactagtttccgtaaggagcagcttggcagatacgcagcaaagagaagcaagtgcttatgaacaggtgaaacaagttttgcaaatatctgaggaagccaattttgaaaaaaccaaggctttaatccagtgtgaccagttgaggaaggagctggagaggcaggcggagcgacttgaaaaagaacttgcatctcagcaagagaaaagggccattgagaaagacatgatgaaaaaggaaataacgaaagaaagggagtacatgggatcaaagatgttgatcttgtctcagaatattgcccaactggaggcccaggtggaaaaggttacaaaggaaaagatttcagctattaatcaactggaggaaattcaaagccagctggcttctcgggaaatggatgtcacaaaggtgtgtggagaaatgcgctatcagctgaataaaaccaacatggagaaggatgaggcagaaaaggagcacagagagttcagagcaaaaactaacagggatcttgaaattaaagatcaggaaatagagaaattgagaatagaactggatgaaagcaaacaacacttggaacaggagcagcagaaggcagccctggccagagaggagtgcctgagactaacagaactgctgggcgaatctgagcaccaactgcacctcaccagacaggaaaaagatagcattcagcagagctttagcaaggaagcaaaggcccaagcccttcaggcccagcaaagagagcaggagctgacacagaagatacagcaaatggaggcccagcatgacaaaactgaaaatgaacagtatttgttgctgacctcccagaatacatttttgacaaagttaaaggaagaatgctgtacattagccaagaaactggaacaaatctctcaaaaaaccagatctgaaatagctcaactcagtcaagaaaaaaggtatacatatgataaattgggaaagttacagagaagaaatgaagaattggaggaacagtgtgtccagcatgggagagtacatgagacgatgaagcaaaggctaaggcagctggataagcacagccaggccacagcccagcagctggtgcagctcctcagcaagcagaaccagcttctcctggagaggcagagcctgtcggaagaggtggaccggctgcggacccagttacccagcatgccacaatctgattgctgacctggatggaacagagtgaaataaatgatttacaaagagatatttacattcatctggtttagacttaatatgccacaacgcaccacgaccttcccagggtgacaccgcctcagcctgcagtggggctggtcctcatcaacgcgggcgctgtccccgcacgcagtcgggctggagctggagtctgactctagctgagcagagctcctggtgtatgttttcagaaatggcttgaagttatgtgtttaaatctgctcattcgtatgctaggttatacatatgattttcaataaatgaactttttaaagacttgagttgtaatgtttcctttttatcttgtagtgatgaacaaaacacaccaaaaaggcacatattttaactaggccaaagtatattaaggaccaaactttttttcctgccattcatttttcttttcatgatctatatatcaatcatccttcacctttaatcaatgtcccatcagactccattttatttatttatcgtcctactttgtgcacaatcaatcaatcaggagacaccaggaagcactatgcattactctttccattctgttaaacaacgaaaacagacaaaaaagcatctttggctcggtggtgtcagatttttttcttcaatacgcagtatttgagaggagcctaaaaacgtacttagtgaaattagaaaatttacttagagtatatcaaatatctgtacacagataattatttgtctaaaatagtatttctactatacacaattaagccctcaaatgctttaaagtaataaaaacggacactggacataccgtgttgtatctgagaatgacaaacactaaaggcaaggctgcagttagttaggacaggtccctgaccttcggctgccctgcctggccagcgagccatcatcctcatcaccatctcaacacagagctgatgtcaccatatgctcagccttgcctctcagaagtgatgtggattaggctttggaggcggtggcatgatctacacacagagaccatttgaatctcttgagcatgtaaaaggttcaagcctgaaacagtagaacttctattcagattcagaagttttttatttcatcaaatgtgctagacataaaggctgtcacataagatattttaattgtccttaattctgttttagatatactgtgaataaa

SEQ ID NO: 405995 - DNA, 1897 bp, Homo sapiens
  misc_feature (20)..(20): n is a, c, g, or t
  misc_feature (23)..(23): n is a, c, g, or t
  misc_feature (38)..(38): n is a, c, g, or t
ccccccccccctttctctgntanccctttcaggttctngatttaccgatcaggaaatagagaaattgagaatagaactggatgaaagcaaacaacacttggaacaggagcagcagaaggcagccctggccagagaggagtgcctgagactaacagaactgctgggcgaatctgagcaccaactgcacctcaccagacaggaaaaagatagcattcagcagagctttagcaaggaagcaaaggcccaagcccttcaggcccagcaaagagagcaggagctgacacagaagatacagcaaatggaggcccagcatgacaaaactgaaaatgaacagtatttgttgctgacctcccagaatacatttttgacaaagttaaaggaagaatgctgtacattagccaagaaactggaacaaatctctcaaaaaaccagatctgaaatagctcaactcagtcaagaaaaaaggtatacatatgataaattgggaaagttacagagaagaaatgaagaattggaggaacagtgtgtccagcatgggagagtacatgagacgatgaagcaaaggctaaggcagctggataagcacagccaggccacagcccagcagctggtgcagctcctcagcaagcagaaccagcttctcctggagaggcagagcctgtcggaagaggtggaccggctgcggacccagttacccagcatgccacaatctgattgctgacctggatggaacagagtgaaataaatgatttacaaagagatatttacattcatctggtttagacttaatatgccacaacgcaccacgaccttcccagggtgacaccgcctcagcctgcagtggggctggtcctcatcaacgcgggcgctgtccccgcacgcagtcgggctggagctggagtctgactctagctgagcagagctcctggtgtatgttttcagaaatggcttgaagttatgtgtttaaatctgctcattcgtatgctaggttatacatatgattttcaataaatgaactttttaaagacttgagttgtaatgtttcctttttatcttgtagtgatgaacaaaacacaccaaaaaggcacatattttaactaggccaaagtatattaaggaccaaactttttttcctgccattcatttttcttttcatgatctatatatcaatcatccttcacctttaatcaatgtcccatcagactccattttatttatttatcgtcctactttgtgcacaatcaatcaatcaggagacaccaggaagcactatgcattactctttccattctgttaaacaacgaaaacagacaaaaaagcatctttggctcggtggtgtcagatttttttcttcaatacgcagtatttgagaggagcctaaaaacgtacttagtgaaattagaaaatttacttagagtatatcaaatatctgtacacagataattatttgtctaaaatagtatttctactatacacaattaagccctcaaatgctttaaagtaataaaaacggacactggacataccgtgttgtatctgagaatgacaaacactaaaggcaaggctgcagttagttaggacaggtccctgaccttcggctgccctgcctggccagcgagccatcatcctcatcaccatctcaacacagagctgatgtcaccatatgctcagccttgcctctcagaagtgatgtggattaggctttggaggcggtggcatgatctacacacagagaccatttgaatctcttgagcatgtaaaaggttcaagcctgaaacagtagaacttctattcagattcagaagttttttatttcatcaaatgtgctagacataaaggctgtcacataagatattttaattgtccttaattctgttttagatatactgtgaataaa

SEQ ID NO: 405996 - DNA, 2259 bp, Homo sapiens
catccgcaacgaaagtcaagaaatgcaaaaaggaactgacacatctcagcaaagaaaactgaagggatttggttataagtggagaggatctcagcatatttctggaagatagaaagtggatgaagcatgataatgaaagagagggagtacatgggatcaaagatgttgatcttgtctcagaatattgcccaactggaggcccaggtggaaaaggttacaaaggaaaagatttcagctattaatcaactggaggaaattcaaagccagctggcttctcgggaaatggatgtcacaaaggtgtgtggagaaatgcgctatcagctgaataaaaccaacatggagaaggatgaggcagaaaaggagcacagagagttcagagcaaaaactaacagggatcttgaaattaaagatcaggaaatagagaaattgagaatagaactggatgaaagcaaacaacacttggaacaggagcagcagaaggcagccctggccagagaggagtgcctgagactaacagaactgctgggcgaatctgagcaccaactgcacctcaccagacaggaaaaagatagcattcagcagagctttagcaaggaagcaaaggcccaagcccttcaggcccagcaaagagagcaggagctgacacagaagatacagcaaatggaggcccagcatgacaaaactgaaaatgaacagtatttgttgctgacctcccagaatacatttttgacaaagttaaaggaagaatgctgtacattagccaagaaactggaacaaatctctcaaaaaaccagatctgaaatagctcaactcagtcaagaaaaaaggtatacatatgataaattgggaaagttacagagaagaaatgaagaattggaggaacagtgtgtccagcatgggagagtacatgagacgatgaagcaaaggctaaggcagctggataagcacagccaggccacagcccagcagctggtgcagctcctcagcaagcagaaccagcttctcctggagaggcagagcctgtcggaagaggtggaccggctgcggacccagttacccagcatgccacaatctgattgctgacctggatggaacagagtgaaataaatgatttacaaagagatatttacattcatctggtttagacttaatatgccacaacgcaccacgaccttcccagggtgacaccgcctcagcctgcagtggggctggtcctcatcaacgcgggcgctgtccccgcacgcagtcgggctggagctggagtctgactctagctgagcagagctcctggtgtatgttttcagaaatggcttgaagttatgtgtttaaatctgctcattcgtatgctaggttatacatatgattttcaataaatgaactttttaaagacttgagttgtaatgtttcctttttatcttgtagtgatgaacaaaacacaccaaaaaggcacatattttaactaggccaaagtatattaaggaccaaactttttttcctgccattcatttttcttttcatgatctatatatcaatcatccttcacctttaatcaatgtcccatcagactccattttatttatttatcgtcctactttgtgcacaatcaatcaatcaggagacaccaggaagcactatgcattactctttccattctgttaaacaacgaaaacagacaaaaaagcatctttggctcggtggtgtcagatttttttcttcaatacgcagtatttgagaggagcctaaaaacgtacttagtgaaattagaaaatttacttagagtatatcaaatatctgtacacagataattatttgtctaaaatagtatttctactatacacaattaagccctcaaatgctttaaagtaataaaaacggacactggacataccgtgttgtatctgagaatgacaaacactaaaggcaaggctgcagttagttaggacaggtccctgaccttcggctgccctgcctggccagcgagccatcatcctcatcaccatctcaacacagagctgatgtcaccatatgctcagccttgcctctcagaagtgatgtggattaggctttggaggcggtggcatgatctacacacagagaccatttgaatctcttgagcatgtaaaaggttcaagcctgaaacagtagaacttctattcagattcagaagttttttatttcatcaaatgtgctagacataaaggctgtcacataagatattttaattgtccttaattctgttttagatatactgtgaataaa

SEQ ID NO: 405997 - DNA, 1919 bp, Homo sapiens
caccccgcccgcaaccgacaaaccaaaatttagaaataaaaaaaaaatttaggggaaacaagaaccgagattttgaaatagagaaattgagaatagaactggatgaaagcaaacaacacttggaacaggagcagcagaaggcagccctggccagagaggagtgcctgagactaacagaactgctgggcgaatctgagcaccaactgcacctcaccagacaggaaaaagatagcattcagcagagctttagcaaggaagcaaaggcccaagcccttcaggcccagcaaagagagcaggagctgacacagaagatacagcaaatggaggcccagcatgacaaaactgaaaatgaacagtatttgttgctgacctcccagaatacatttttgacaaagttaaaggaagaatgctgtacattagccaagaaactggaacaaatctctcaaaaaaccagatctgaaatagctcaactcagtcaagaaaaaaggtatacatatgataaattgggaaagttacagagaagaaatgaagaattggaggaacagtgtgtccagcatgggagagtacatgagacgatgaagcaaaggctaaggcagctggataagcacagccaggccacagcccagcagctggtgcagctcctcagcaagcagaaccagcttctcctggagaggcagagcctgtcggaagaggtggaccggctgcggacccagttacccagcatgccacaatctgattgctgacctggatggaacagagtgaaataaatgatttacaaagagatatttacattcatctggtttagacttaatatgccacaacgcaccacgaccttcccagggtgacaccgcctcagcctgcagtggggctggtcctcatcaacgcgggcgctgtccccgcacgcagtcgggctggagctggagtctgactctagctgagcagagctcctggtgtatgttttcagaaatggcttgaagttatgtgtttaaatctgctcattcgtatgctaggttatacatatgattttcaataaatgaactttttaaagacttgagttgtaatgtttcctttttatcttgtagtgatgaacaaaacacaccaaaaaggcacatattttaactaggccaaagtatattaaggaccaaactttttttcctgccattcatttttcttttcatgatctatatatcaatcatccttcacctttaatcaatgtcccatcagactccattttatttatttatcgtcctactttgtgcacaatcaatcaatcaggagacaccaggaagcactatgcattactctttccattctgttaaacaacgaaaacagacaaaaaagcatctttggctcggtggtgtcagatttttttcttcaatacgcagtatttgagaggagcctaaaaacgtacttagtgaaattagaaaatttacttagagtatatcaaatatctgtacacagataattatttgtctaaaatagtatttctactatacacaattaagccctcaaatgctttaaagtaataaaaacggacactggacataccgtgttgtatctgagaatgacaaacactaaaggcaaggctgcagttagttaggacaggtccctgaccttcggctgccctgcctggccagcgagccatcatcctcatcaccatctcaacacagagctgatgtcaccatatgctcagccttgcctctcagaagtgatgtggattaggctttggaggcggtggcatgatctacacacagagaccatttgaatctcttgagcatgtaaaaggttcaagcctgaaacagtagaacttctattcagattcagaagttttttatttcatcaaatgtgctagacataaaggctgtcacataagatattttaattgtccttaattctgttttagatatactgtgaataaa

SEQ ID NO: 405998 - DNA, 2590 bp, Homo sapiens
  misc_feature (327)..(327): n is a, c, g, or t
  misc_feature (329)..(329): n is a, c, g, or t
  misc_feature (331)..(333): n is a, c, g, or t
  misc_feature (336)..(336): n is a, c, g, or t
  misc_feature (338)..(338): n is a, c, g, or t
  misc_feature (345)..(345): n is a, c, g, or t
  misc_feature (348)..(349): n is a, c, g, or t
  misc_feature (352)..(352): n is a, c, g, or t
  misc_feature (354)..(355): n is a, c, g, or t
  misc_feature (362)..(363): n is a, c, g, or t
  misc_feature (369)..(369): n is a, c, g, or t
  misc_feature (372)..(372): n is a, c, g, or t
  misc_feature (375)..(375): n is a, c, g, or t
  misc_feature (380)..(380): n is a, c, g, or t
  misc_feature (384)..(384): n is a, c, g, or t
  misc_feature (387)..(387): n is a, c, g, or t
  misc_feature (390)..(390): n is a, c, g, or t
  misc_feature (393)..(393): n is a, c, g, or t
  misc_feature (1000)..(1000): n is a, c, g, or t
  misc_feature (1087)..(1087): n is a, c, g, or t
  misc_feature (1172)..(1172): n is a, c, g, or t
  misc_feature (2247)..(2247): n is a, c, g, or t
  misc_feature (2366)..(2366): n is a, c, g, or t
  misc_feature (2392)..(2393): n is a, c, g, or t
  misc_feature (2424)..(2424): n is a, c, g, or t
  misc_feature (2507)..(2507): n is a, c, g, or t
  misc_feature (2557)..(2557): n is a, c, g, or t
  misc_feature (2567)..(2567): n is a, c, g, or t
  misc_feature (2570)..(2571): n is a, c, g, or t
ctgcctgttgcaaagatgagataaaggcgcgggaaagaagggtctgaattaggggttgagctctgaaatcggacgattctgtgtttcctgccgcatggagggcgtgtgtggttcgcaggctgtggggggtttcttgcagcgggggctgctgcctaaacagactccgcgggccccatgatggcaaaccccctcgccccgttcatgacttaatgcctcctagaagaaaaggctaaaaacaagacacacagaacaagaaattgcactctctcaaaacgacagtcgccctgaaacggacgctggaagaggtttccaggcccgtggcgacgntnannnggntnaaggtcncanntgnanngcacggnncggcgnctncgnagccngggnagnagncgncgggcgcccgggtcttcctcggagcgcgccccctgggctgggcggcgtgtccctgcctcccgccggcgccctcgtccccgcagcagcgtccccgccgccaccccgctgcctcgtcgcctttctcgcaaacagcggtgccctctacgtgggggatcctggaggctgctgagcacgagcgccctccgcgacccgcccctgctcccgcctccactcttgcctcggggggagggtctcagtcttctgcctaaggcgccctcctcccttgggaagtccgccgtcctctgccgtgaagattgcccctctctcctccagtgcctcctccccagcggcttcggtggctcccaccctccgcaccccgtctcgcgacctccccgccagcccagcccctcaccagaagaggctttctcttccagcccctgaaatctggcttctgccccagccaggaggctccgcagggcgctccgccaccaggtggcatttcccacaaaccggccactccgccctgacccctctcctccctggacctccgtctcccagttttcctccctccaggatcccactctcagtgtcttgccggattccagtccactgccagccattgaaggcngaggttccttaacccctatcctggggcgagcccttccctctcactgcagaagagcttctcagctaggggggtcgtgcgggcccgganagctgcatttttaacaaactccccacactgacaatctttgccaacccttcccaggcaaatcttgcccccacgttcatggtctcgnctcccagcaggtttggcccacccagctagagctccagctcggcccttcctaagccccaagctgcatagctgcctggtgggtgcgtgttccacaggtacctcggactcgccctgaccccagaacgtctcttctacgccaggccgatccctcctgccatcctctgtctgttaaatggcactgccattgcctgcaggacgaagtccatatttgctggtttggctacagagtccagcgtcgccttcctctgagcagcctgcagcctctggtgcagccacactgcacagcttgcagtttccagacacgcattggcctttgcagtgcggccccgaagtgggaaggccccgcccctggccctggccagaaaagcacccactcatcctttcccatcccagcttgcccgctgagtgactttgaatcaatgattcatgttgtctgtgcctcagtttccttaaccttaaagtggcataataattagttcctgcctcatggaattgtgagtgctaaataaacagtaagtctagtgcccgacataaaagtgctcagcatacgacgatcatgagccatgtctaagcaggcgcaagccctcccaggcttctcatctgcaatattggccatttctcttcatgcttcagtgtcctgtttgagttgagcatgttttttttacaagtgagtctctcctccattggccgggaaccgcccgagagccgggagcatttgtcattcttgatggacccccaggtcttaaatcagtacttgacccttaagaggtgttgggcgggcgcggtggctcacgcctgtaatcccagcactttgggaggccaaggcgggcagctcacgaggtcaggagttagagaccagcctggccaacatcgtgaaaccccatctctactaaaaatacaaaaattagacaggtgtggtggtgcgcgcctatagtcccagctacctgggaggctgaggcaggagaatttcttgaacccaggaggcagaggttgcagtgagccaagattatgccactgcactccagcctgggcaacagagcaagactccatctcaaaaaaaaaaaaaagaagaaganccgagctggaactcatagctttcactgtacatggttgtttattttttaaatgttcttatgtttttcatagattaccctgattagttttaggatttctcttagagatttttacttttttncaaagaaatgttaacatttaaaaaannctctaatttttgctttcttgttttttgtccnattttattttattttgattttatttacgacttgattctttagtttttaaagtgatgtatttctagatcattgtacttaagggnatgtgacttattttgtctcattcagaatccagatatttcatctttaattncattaaaatnccnncttgtaatgaaaaaaaaaa

SEQ ID NO: 405999 - DNA, 1354 bp, Homo sapiens
agctctgtgcgggattctaggctcccctgtgacagccgcggcaggaagcaggcgggcgctccccggccacaggcctgttgttctcggaagggagaaagcaggacatttccccacgtaactcccagctctgggcctagagtgcgtgcatggcgaagtccccggagaactctaccctggaggagattctggggcagtatcaacggagtctccgggaacatgccagcagaagcattcaccaactgacatgtgccctgaaagaaggcgatgtcactattggagaagatgcaccaaatctttcttttagcaccagtgtgggaaatgaggacgccaggacagcctggcccgaattacaacagagccatgctgttaatcagctcaaagatttgttgcgccaacaagcagataaggaaagtgaagtatctccgtcaagaagaagaaaaatgtcccccttgaggtcattagaacatgaggaaaccaatatgcctactatgcacgaccttgttcatactattaatgaccagtctcaatatattcatcatttagaggcagaagttaagttctgcaaggaggaactctctggaatgaaaaataaaatacaagtagttgtgcttgaaaacgaagggctccagcaacagctaaaatctcaaagacaagaggagacactgagggaacaaacacttctggatgcatccggaaacatgcacaattcttggattacaacaggtgaagattctggggtgggcgaaacctccaaaagaccattttcccatgacaatgcagattttggcaaagctgcatctgctggtgagcagctagaactggagaagctaaaacttacttatgaggaaaagtgtgaaattgaggaatcccaattgaagtttttgaggaacgacttagctgaatatcagagaacttgtgaagatcttaaagagcaactaaagcataaagaatttcttctggctgctaatacttgtaaccgtgttggtggtctttgtttgaaatgtgctcagcatgaagctgttctttcccaaacccatactaatgttcatatgcagaccatcgaaagactggttaaagaaagagatgacttgatgtctgcactagtttccgtaaggagcagcttggcagatacgcagcaaagagaagcaagtgcttatgaacaggtgaaacaagttttgcaaatatctgaggaagccaattttgaaaaaaccaaggcaagtctaataagatgcaaataaaagtgtctttcttttttttttcttttttcttctgagtatttattgggttattcttctataactaaacttggtttttcaaacacacaaagtgaattatcaatctggaggtatcgact

SEQ ID NO: 406000 - DNA, 1659 bp, Homo sapiens
ctgcctgttgcaaagatgagataaaggcgcgggaaagaagggtctgaattaggggttgagctctgaaatcggacgattctgtgtttcctgccgcatggagggcgtgtgtggttcgcaggctgtggggggtttcttgcagcgggggctgctgcctaaacagactccgcgggccccatgatggcaaaccccctcgccccgttcatgacttaatgcctcctagaagaaaaggctaaaaacaagacacacagaacaagaaattgcactctctcaaaacgacagtcgccctgaaacggacgctggaagaggtttccaggcccgtggcgacggctaaggcagctggataagcacagccaggccacagcccagcagctggtgcagctcctcagcaagcagaaccagcttctcctggagaggcagagcctgtcggaagaggtggaccggctgcggacccagttacccagcatgccacaatctgattgctgacctggatggaacagagtgaaataaatgatttacaaagagatatttacattcatctggtttagacttaatatgccacaacgcaccacgaccttcccagggtgacaccgcctcagcctgcagtggggctggtcctcatcaacgcgggcgctgtccccgcacgcagtcgggctggagctggagtctgactctagctgagcagagctcctggtgtatgttttcagaaatggcttgaagttatgtgtttaaatctgctcattcgtatgctaggttatacatatgattttcaataaatgaactttttaaagacttgagttgtaatgtttcctttttatcttgtagtgatgaacaaaacacaccaaaaaggcacatattttaactaggccaaagtatattaaggaccaaactttttttcctgccattcatttttcttttcatgatctatatatcaatcatccttcacctttaatcaatgtcccatcagactccattttatttatttatcgtcctactttgtgcacaatcaatcaatcaggagacaccaggaagcactatgcattactctttccattctgttaaacaacgaaaacagacaaaaaagcatctttggctcggtggtgtcagatttttttcttcaatacgcagtatttgagaggagcctaaaaacgtacttagtgaaattagaaaatttacttagagtatatcaaatatctgtacacagataattatttgtctaaaatagtatttctactatacacaattaagccctcaaatgctttaaagtaataaaaacggacactggacataccgtgttgtatctgagaatgacaaacactaaaggcaaggctgcagttagttaggacaggtccctgaccttcggctgccctgcctggccagcgagccatcatcctcatcaccatctcaacacagagctgatgtcaccatatgctcagccttgcctctcagaagtgatgtggattaggctttggaggcggtggcatgatctacacacagagaccatttgaatctcttgagcatgtaaaaggttcaagcctgaaacagtagaacttctattcagattcagaagttttttatttcatcaaatgtgctagacataaaggctgtcacataagatattttaattgtccttaattctgttttagatatactgtgaataaa

SEQ ID NO: 406001 - DNA, 1551 bp, Homo sapiens
agctctgtgcgggattctaggctcccctgtgacagccgcggcaggaagcaggcgggcgctccccggccacaggcctgttgttctcggaagggagaaagcaggacatttccccacgtaactcccagctctgggcctagagtgcgtgcatggcgaagtccccggagaactctaccctggaggagattctggggcagtatcaacggagtctccggggaggaactctctggaatgaaaaataaaatacaagtagttgtgcttgaaaacgaagggctccagcaacagctaaaatctcaaagacaagaggagacactgagggaacaaacacttctggatgcatccggaaacatgcacaattcttggattacaacaggtgaagattctggggtgggcgaaacctccaaaagaccattttcccatgacaatgcagattttggcaaagctgcatctgctggtgagcagctagaactggagaagctaaaacttacttatgaggaaaagtgtgaaattgaggaatcccaattgaagtttttgagaaataagaatcacggccgggcgcggtggctcacgcctgtaatcccagcactttgggaggctgaagcgggcgaatcacgaggtcaagagattgagaccatcctggccaacatggtgaaaccccgtttctactaaaaatacagaggcaggagaatcacttgaacctgggaggcggaggttgcagtaagctgagaccacgccactgcactccaacctggcaacagagtgagactccatttcaaaaaagaaaaaaaaaaaaagaaataagaatcactaactgctcttatagaaattatgatattcaagtaaaataatgaaaataaagcactttagttttcaaattattagtattttttctctgtagatagtcttcatctaattttaaaattgcaatgataatataatagtttgagtatttgtatacatgatgaatttgagtatatatgatgaatattcatgtactttttatagaatctatttattagagatcccagtaagacctatatattatagattaaccattagtgatttatgtataatgagtagaaaaagacagcaggaattaatatttttgttgttaaagattatttttaaatagtagtaatgaagtaattttaaatcaaataaactttgaaatattgtttataattttattttaataagtccaatttgaaattttaaaatcttccaggccatagcctatctagagacataactagagtaatactaagagccagaactcagctgattgtggtggcttacgcatgtaatcccaacactttgggaagccaaggcgggtggatcatttgaggtcaagagttcgagactagcctggccaatatggtaaaaccctgtctctactaaaaatataaaaattagctgggtgtggtggcacacatctgtagtcccagctactcaggaggctgaggcagaatcacttgaacccaggagatagaggttgcagtgagccaagatcatgccactgcactccagcctgggtgacagagggagactccatct

SEQ ID NO: 406002 - DNA, 3227 bp, Homo sapiens
agctctgtgcgggattctaggctcccctgtgacagccgcggcaggaagcaggcgggcgctccccggccacaggcctgttgttctcggaagggagaaagcaggacatttccccacgtaactcccagctctgggcctagagtgcgtgcatggcgaagtccccggagaactctaccctggaggagattctggggcagtatcaacggagtctccgggaacatgccagcagaagcattcaccaactgacatgtgccctgaaagaaggcgatgtcactattggagaagatgcaccaaatctttcttttagcaccagtgtgggaaatgaggacgccaggacagcctggcccgaattacaacagagccatgctgttaatcagctcaaagatttgttgcgccaacaagcagataaggaaagtgaagtatctccgtcaagaagaagaaaaatgtcccccttgaggtcattagaacatgaggaaaccaatatgcctactatgcacgaccttgttcatactattaatgaccagtctcaatatattcatcatttagaggcagaagttaagttctgcaaggaggaactctctggaatgaaaaataaaatacaagtagttgtgcttgaaaacgaagggctccagcaacagctaaaatctcaaagacaagaggagacactgagggaacaaacacttctggatgcatccggaaacatgcacaattcttggattacaacaggtgaagattctggggtgggcgaaacctccaaaagaccattttcccatgacaatgcagattttggcaaagctgcatctgctggtgagcagctagaactggagaagctaaaacttacttatgaggaaaagtgtgaaattgaggaatcccaattgaagtttttgaggaacgacttagctgaatatcagagaacttgtgaagatcttaaagagcaactaaagcataaagaatttcttctggctgctaatacttgtaaccgtgttggtggtctttgtttgaaatgtgctcagcatgaagctgttctttcccaaacccatactaatgttcatatgcagaccatcgaaagactggttaaagaaagagatgacttgatgtctgcactagtttccgtaaggagcagcttggcagatacgcagcaaagagaagcaagtgcttatgaacaggtgaaacaagttttgcaaatatctgaggaagccaattttgaaaaaaccaaggctttaatccagtgtgaccagttgaggaaggagctggagaggcaggcggagcgacttgaaaaagaacttgcatctcagcaagagaaaagggccattgagaaagacatgatgaaaaaggaaataacgaaagaaagggagtacatgggatcaaagatgttgatcttgtctcagaatattgcccaactggaggcccaggtggaaaaggttacaaaggaaaagatttcagctattaatcaactggaggaaattcaaagccagctggcttctcgggaaatggatgtcacaaaggtgtgtggagaaatgcgctatcagctgaataaaaccaacatggagaaggatgaggcagaaaaggagcacagagagttcagagcaaaaactaacagggatcttgaaattaaagatcaggaaatagagaaattgagaatagaactggatgaaagcaaacaacacttggaacaggagcagcagaaggcagccctggccagagaggagtgcctgagactaacagaactgctgggcgaatctgagcaccaactgcacctcaccagatctgaaatagctcaactcagtcaagaaaaaaggtatacatatgataaattgggaaagttacagagaagaaatgaagaattggaggaacagtgtgtccagcatgggagagtacatgagacgatgaagcaaaggctaaggcagctggataagcacagccaggccacagcccagcagctggtgcagctcctcagcaagcagaaccagcttctcctggagaggcagagcctgtcggaagaggtggaccggctgcggacccagttacccagcatgccacaatctgattgctgacctggatggaacagagtgaaataaatgatttacaaagagatatttacattcatctggtttagacttaatatgccacaacgcaccacgaccttcccagggtgacaccgcctcagcctgcagtggggctggtcctcatcaacgcgggcgctgtccccgcacgcagtcgggctggagctggagtctgactctagctgagcagagctcctggtgtatgttttcagaaatggcttgaagttatgtgtttaaatctgctcattcgtatgctaggttatacatatgattttcaataaatgaactttttaaagacttgagttgtaatgtttcctttttatcttgtagtgatgaacaaaacacaccaaaaaggcacatattttaactaggccaaagtatattaaggaccaaactttttttcctgccattcatttttcttttcatgatctatatatcaatcatccttcacctttaatcaatgtcccatcagactccattttatttatttatcgtcctactttgtgcacaatcaatcaatcaggagacaccaggaagcactatgcattactctttccattctgttaaacaacgaaaacagacaaaaaagcatctttggctcggtggtgtcagatttttttcttcaatacgcagtatttgagaggagcctaaaaacgtacttagtgaaattagaaaatttacttagagtatatcaaatatctgtacacagataattatttgtctaaaatagtatttctactatacacaattaagccctcaaatgctttaaagtaataaaaacggacactggacataccgtgttgtatctgagaatgacaaacactaaaggcaaggctgcagttagttaggacaggtccctgaccttcggctgccctgcctggccagcgagccatcatcctcatcaccatctcaacacagagctgatgtcaccatatgctcagccttgcctctcagaagtgatgtggattaggctttggaggcggtggcatgatctacacacagagaccatttgaatctcttgagcatgtaaaaggttcaagcctgaaacagtagaacttctattcagattcagaagttttttatttcatcaaatgtgctagacataaaggctgtcacataagatattttaattgtccttaattctgttttagatatactgtgaataaa

SEQ ID NO: 406003 - DNA, 3412 bp, Homo sapiens
agctctgtgcgggattctaggctcccctgtgacagccgcggcaggaagcaggcgggcgctccccggccacaggcctgttgttctcggaagggagaaagcaggacatttccccacgtaactcccagctctgggcctagagtgcgtgcatggcgaagtccccggagaactctaccctggaggagattctggggcagtatcaacggagtctccgggaacatgccagcagaagcattcaccaactgacatgtgccctgaaagaaggcgatgtcactattggagaagatgcaccaaatctttcttttagcaccagtgtgggaaatgaggacgccaggacagcctggcccgaattacaacagagccatgctgttaatcagctcaaagatttgttgcgccaacaagcagataaggaaagtgaagtatctccgtcaagaagaagaaaaatgtcccccttgaggtcattagaacatgaggaaaccaatatgcctactatgcacgaccttgttcatactattaatgaccagtctcaatatattcatcatttagaggcagaagttaagttctgcaaggaggaactctctggaatgaaaaataaaatacaagtagttgtgcttgaaaacgaagggctccagcaacagctaaaatctcaaagacaagaggagacactgagggaacaaacacttctggatgcatccggaaacatgcacaattcttggattacaacaggtgaagattctggggtgggcgaaacctccaaaagaccattttcccatgacaatgcagattttggcaaagctgcatctgctggtgagcagctagaactggagaagctaaaacttacttatgaggaaaagtgtgaaattgaggaatcccaattgaagtttttgaggaacgacttagctgaatatcagagaacttgtgaagatcttaaagagcaactaaagcataaagaatttcttctggctgctaatacttgtaaccgtgttggtggtctttgtttgaaatgtgctcagcatgaagctgttctttcccaaacccatactaatgttcatatgcagaccatcgaaagactggttaaagaaagagatgacttgatgtctgcactagtttccgtaaggagcagcttggcagatacgcagcaaagagaagcaagtgcttatgaacaggtgaaacaagttttgcaaatatctgaggaagccaattttgaaaaaaccaaggctttaatccagtgtgaccagttgaggaaggagctggagaggcaggcggagcgacttgaaaaagaacttgcatctcagcaagagaaaagggccattgagaaagacatgatgaaaaaggaaataacgaaagaaagggagtacatgggatcaaagatgttgatcttgtctcagaatattgcccaactggaggcccaggtggaaaaggttacaaaggaaaagatttcagctattaatcaactggaggaaattcaaagccagctggcttctcgggaaatggatgtcacaaaggtgtgtggagaaatgcgctatcagctgaataaaaccaacatggagaaggatgaggcagaaaaggagcacagagagttcagagcaaaaactaacagggatcttgaaattaaagatcaggaaatagagaaattgagaatagaactggatgaaagcaaacaacacttggaacaggagcagcagaaggcagccctggccagagaggagtgcctgagactaacagaactgctgggcgaatctgagcaccaactgcacctcaccagacaggaaaaagatagcattcagcagagctttagcaaggaagcaaaggcccaagcccttcaggcccagcaaagagagcaggagctgacacagaagatacagcaaatggaggcccagcatgacaaaactgaaaatgaacagtatttgttgctgacctcccagaatacatttttgacaaagttaaaggaagaatgctgtacattagccaagaaactggaacaaatctctcaaaaaaccagatctgaaatagctcaactcagtcaagaaaaaaggaacagtgtgtccagcatgggagagtacatgagacgatgaagcaaaggctaaggcagctggataagcacagccaggccacagcccagcagctggtgcagctcctcagcaagcagaaccagcttctcctggagaggcagagcctgtcggaagaggtggaccggctgcggacccagttacccagcatgccacaatctgattgctgacctggatggaacagagtgaaataaatgatttacaaagagatatttacattcatctggtttagacttaatatgccacaacgcaccacgaccttcccagggtgacaccgcctcagcctgcagtggggctggtcctcatcaacgcgggcgctgtccccgcacgcagtcgggctggagctggagtctgactctagctgagcagagctcctggtgtatgttttcagaaatggcttgaagttatgtgtttaaatctgctcattcgtatgctaggttatacatatgattttcaataaatgaactttttaaagacttgagttgtaatgtttcctttttatcttgtagtgatgaacaaaacacaccaaaaaggcacatattttaactaggccaaagtatattaaggaccaaactttttttcctgccattcatttttcttttcatgatctatatatcaatcatccttcacctttaatcaatgtcccatcagactccattttatttatttatcgtcctactttgtgcacaatcaatcaatcaggagacaccaggaagcactatgcattactctttccattctgttaaacaacgaaaacagacaaaaaagcatctttggctcggtggtgtcagatttttttcttcaatacgcagtatttgagaggagcctaaaaacgtacttagtgaaattagaaaatttacttagagtatatcaaatatctgtacacagataattatttgtctaaaatagtatttctactatacacaattaagccctcaaatgctttaaagtaataaaaacggacactggacataccgtgttgtatctgagaatgacaaacactaaaggcaaggctgcagttagttaggacaggtccctgaccttcggctgccctgcctggccagcgagccatcatcctcatcaccatctcaacacagagctgatgtcaccatatgctcagccttgcctctcagaagtgatgtggattaggctttggaggcggtggcatgatctacacacagagaccatttgaatctcttgagcatgtaaaaggttcaagcctgaaacagtagaacttctattcagattcagaagttttttatttcatcaaatgtgctagacataaaggctgtcacataagatattttaattgtccttaattctgttttagatatactgtgaataaa

SEQ ID NO: 406004 - DNA, 3098 bp, Homo sapiens
agctctgtgcgggattctaggctcccctgtgacagccgcggcaggaagcaggcgggcgctccccggccacaggcctgttgttctcggaagggagaaagcaggacatttccccacgtaactcccagctctgggcctagagtgcgtgcatggcgaagtccccggagaactctaccctggaggagattctggggcagtatcaacggagtctccgggaacatgccagcagaagcattcaccaactgacatgtgccctgaaagaaggcgatgtcactattggagaagatgcaccaaatctttcttttagcaccagtgtgggaaatgaggacgccaggacagcctggcccgaattacaacagagccatgctgttaatcagctcaaagatttgttgcgccaacaagcagataaggaaagtgaagtatctccgtcaagaagaagaaaaatgtcccccttgaggtcattagaacatgaggaaaccaatatgcctactatgcacgaccttgttcatactattaatgaccagtctcaatatattcatcatttagaggcagaagttaagttctgcaaggaggaactctctggaatgaaaaataaaatacaagtagttgtgcttgaaaacgaagggctccagcaacagctaaaatctcaaagacaagaggagacactgagggaacaaacacttctggatgcatccgagaagctaaaacttacttatgaggaaaagtgtgaaattgaggaatcccaattgaagtttttgaggaacgacttagctgaatatcagagaacttgtgaagatcttaaagagcaactaaagcataaagaatttcttctggctgctaatacttgtaaccgtgttggtggtctttgtttgaaatgtgctcagcatgaagctgttctttcccaaacccatactaatgttcatatgcagaccatcgaaagactggttaaagaaagagatgacttgatgtctgcactagtttccgtaaggagcagcttggcagatacgcagcaaagagaagcaagtgcttatgaacaggtgaaacaagttttgcaaatatctgaggaagccaattttgaaaaaaccaaggctttaatccagtgtgaccagttgaggaaggagctggagaggcaggcggagcgacttgaaaaagaacttgcatctcagcaagagaaaagggccattgagaaagacatgatgaaaaaggaaataacgaaagaaagggagtacatgggatcaaagatgttgatcttgtctcagaatattgcccaactggaggcccaggtggaaaaggttacaaaggaaaagatttcagctattaatcaactggaggaaattcaaagccagctggcttctcgggaaatggatgtcacaaaggtgtgtggagaaatgcgctatcagctgaataaaaccaacatggagaaggatgaggcagaaaaggagcacagagagttcagagcaaaaactaacagggatcttgaaattaaagatcaggaaatagagaaattgagaatagaactggatgaaagcaaacaacacttggaacaggagcagcagaaggcagccctggccagagaggagtgcctgagactaacagaactgctgggcgaatctgagcaccaactgcacctcaccagatctgaaatagctcaactcagtcaagaaaaaaggtatacatatgataaattgggaaagttacagagaagaaatgaagaattggaggaacagtgtgtccagcatgggagagtacatgagacgatgaagcaaaggctaaggcagctggataagcacagccaggccacagcccagcagctggtgcagctcctcagcaagcagaaccagcttctcctggagaggcagagcctgtcggaagaggtggaccggctgcggacccagttacccagcatgccacaatctgattgctgacctggatggaacagagtgaaataaatgatttacaaagagatatttacattcatctggtttagacttaatatgccacaacgcaccacgaccttcccagggtgacaccgcctcagcctgcagtggggctggtcctcatcaacgcgggcgctgtccccgcacgcagtcgggctggagctggagtctgactctagctgagcagagctcctggtgtatgttttcagaaatggcttgaagttatgtgtttaaatctgctcattcgtatgctaggttatacatatgattttcaataaatgaactttttaaagacttgagttgtaatgtttcctttttatcttgtagtgatgaacaaaacacaccaaaaaggcacatattttaactaggccaaagtatattaaggaccaaactttttttcctgccattcatttttcttttcatgatctatatatcaatcatccttcacctttaatcaatgtcccatcagactccattttatttatttatcgtcctactttgtgcacaatcaatcaatcaggagacaccaggaagcactatgcattactctttccattctgttaaacaacgaaaacagacaaaaaagcatctttggctcggtggtgtcagatttttttcttcaatacgcagtatttgagaggagcctaaaaacgtacttagtgaaattagaaaatttacttagagtatatcaaatatctgtacacagataattatttgtctaaaatagtatttctactatacacaattaagccctcaaatgctttaaagtaataaaaacggacactggacataccgtgttgtatctgagaatgacaaacactaaaggcaaggctgcagttagttaggacaggtccctgaccttcggctgccctgcctggccagcgagccatcatcctcatcaccatctcaacacagagctgatgtcaccatatgctcagccttgcctctcagaagtgatgtggattaggctttggaggcggtggcatgatctacacacagagaccatttgaatctcttgagcatgtaaaaggttcaagcctgaaacagtagaacttctattcagattcagaagttttttatttcatcaaatgtgctagacataaaggctgtcacataagatattttaattgtccttaattctgttttagatatactgtgaataaa

SEQ ID NO: 406005 - DNA, 2680 bp, Homo sapiens
tccagtctcatcatattcaacgtgtcaattagaatcaccacaccaaagtttcagggtcgtggtaaaaattaataaggtattggacgtaaactaaagcataaggaacgacttagctgaatatcagagaacttgtgaagatcttaaagagcaactaaagcataaagaatttcttctggctgctaatacttgtaaccgtgttggtggtctttgtttgaaatgtgctcagcatgaagctgttctttcccaaacccatactaatgttcatatgcagaccatcgaaagactggttaaagaaagagatgacttgatgtctgcactagtttccgtaaggagcagcttggcagatacgcagcaaagagaagcaagtgcttatgaacaggtgaaacaagttttgcaaatatctgaggaagccaattttgaaaaaaccaaggctttaatccagtgtgaccagttgaggaaggagctggagaggcaggcggagcgacttgaaaaagaacttgcatctcagcaagagaaaagggccattgagaaagacatgatgaaaaaggaaataacgaaagaaagggagtacatgggatcaaagatgttgatcttgtctcagaatattgcccaactggaggcccaggtggaaaaggttacaaaggaaaagatttcagctattaatcaactggaggaaattcaaagccagctggcttctcgggaaatggatgtcacaaaggtgtgtggagaaatgcgctatcagctgaataaaaccaacatggagaaggatgaggcagaaaaggagcacagagagttcagagcaaaaactaacagggatcttgaaattaaagatcaggaaatagagaaattgagaatagaactggatgaaagcaaacaacacttggaacaggagcagcagaaggcagccctggccagagaggagtgcctgagactaacagaactgctgggcgaatctgagcaccaactgcacctcaccagacaggaaaaagatagcattcagcagagctttagcaaggaagcaaaggcccaagcccttcaggcccagcaaagagagcaggagctgacacagaagatacagcaaatggaggcccagcatgacaaaactgaaaatgaacagtatttgttgctgacctcccagaatacatttttgacaaagttaaaggaagaatgctgtacattagccaagaaactggaacaaatctctcaaaaaaccagatctgaaatagctcaactcagtcaagaaaaaaggtatacatatgataaattgggaaagttacagagaagaaatgaagaattggaggaacagtgtgtccagcatgggagagtacatgagacgatgaagcaaaggctaaggcagctggataagcacagccaggccacagcccagcagctggtgcagctcctcagcaagcagaaccagcttctcctggagaggcagagcctgtcggaagaggtggaccggctgcggacccagttacccagcatgccacaatctgattgctgacctggatggaacagagtgaaataaatgatttacaaagagatatttacattcatctggtttagacttaatatgccacaacgcaccacgaccttcccagggtgacaccgcctcagcctgcagtggggctggtcctcatcaacgcgggcgctgtccccgcacgcagtcgggctggagctggagtctgactctagctgagcagagctcctggtgtatgttttcagaaatggcttgaagttatgtgtttaaatctgctcattcgtatgctaggttatacatatgattttcaataaatgaactttttaaagacttgagttgtaatgtttcctttttatcttgtagtgatgaacaaaacacaccaaaaaggcacatattttaactaggccaaagtatattaaggaccaaactttttttcctgccattcatttttcttttcatgatctatatatcaatcatccttcacctttaatcaatgtcccatcagactccattttatttatttatcgtcctactttgtgcacaatcaatcaatcaggagacaccaggaagcactatgcattactctttccattctgttaaacaacgaaaacagacaaaaaagcatctttggctcggtggtgtcagatttttttcttcaatacgcagtatttgagaggagcctaaaaacgtacttagtgaaattagaaaatttacttagagtatatcaaatatctgtacacagataattatttgtctaaaatagtatttctactatacacaattaagccctcaaatgctttaaagtaataaaaacggacactggacataccgtgttgtatctgagaatgacaaacactaaaggcaaggctgcagttagttaggacaggtccctgaccttcggctgccctgcctggccagcgagccatcatcctcatcaccatctcaacacagagctgatgtcaccatatgctcagccttgcctctcagaagtgatgtggattaggctttggaggcggtggcatgatctacacacagagaccatttgaatctcttgagcatgtaaaaggttcaagcctgaaacagtagaacttctattcagattcagaagttttttatttcatcaaatgtgctagacataaaggctgtcacataagatattttaattgtccttaattctgttttagatatactgtgaataaa

SEQ ID NO: 406006 - DNA, 2054 bp, Homo sapiens
agctctgtgcgggattctaggctcccctgtgacagccgcggcaggaagcaggcgggcgctccccggccacaggcctgttgttctcggaagggagaaagcaggacatttccccacgtaactcccagctctgggcctagagtgcgtgcatggcgaagtccccggagaactctaccctggaggagattctggggcagtatcaacggagtctccgggaacatgccagcagaagcattcaccaactgacatgtgccctgaaagaaggcgatgtcactattggagaagatgcaccaaatctttcttttagcaccagtgtgggaaatgaggacgccaggacagcctggcccgaattacaacagagccatgctgttaatcagctcaaagatttgttgcgccaacaagcagataaggaaagtgaagtatctccgtcaagaagaagaaaaatgtcccccttgaggtcattagaacatgaggaaaccaatatgcctactatgcacgaccttgttcatactattaatgaccagtctcaatatattcatcatttagaggcagaagttaagttctgcaaggaggaactctctggaatgaaaaataaaatacaagtagttgtgcttgaaaacgaagggctccagcaacagctaaaatctcaaagacaagaggagacactgagggaacaaacacttctggatgcatccggaaacatgcacaattcttggattacaacaggtgaagattctggggtgggcgaaacctccaaaagaccattttcccatgacaatgcagattttggcaaagctgcatctgctggtgagcagctagaactgaactttttgatcatctcaaacaaaaagtctggacgtattaaacaatatctccattcccctccctgccaacccctgatgacctctcttcaactttcggagaagctaaaacttacttatgaggaaaagtgtgaaattgaggaatcccaattgaagtttttgagaaataagaatcacggccgggcgcggtggctcacgcctgtaatcccagcactttgggaggctgaagcgggcgaatcacgaggtcaagagattgagaccatcctggccaacatggtgaaaccccgtttctactaaaaatacaaaaattagctgggcctggtagcacgtgcctgtagtcccagctacttgggaggctgaggcaggagaatcacttgaacctgggaggcggaggttgcagtaagctgagaccacgccactgcactccaacctggcaacagagtgagactccatttcaaaaaagaaaaaaaaaaaaagaaataagaatcactaactgctcttatagaaattatgatattcaagtaaaataatgaaaataaagcactttagttttcaaattattagtattttttctctgtagatagtcttcatctaattttaaaattgcaatgataatataatagtttgagtatttgtatacatgatgaatttgagtatatatgatgaatattcatgtactttttatagaatctatttattagagatcccagtaagacctatatattatagattaaccattagtgatttatgtataatgagtagaaaaagacagcaggaattaatatttttgttgttaaagattatttttaaatagtagtaatgaagtaattttaaatcaaataaactttgaaatattgtttataattttattttaataagtccaatttgaaattttaaaatcttccaggccatagcctatctagagacataactagagtaatactaagagccagaactcagctgattgtggtggcttacgcatgtaatcccaacactttgggaagccaaggcgggtggatcatttgaggtcaagagttcgagactagcctggccaatatggtaaaaccctgtctctactaaaaatataaaaattagctgggtgtggtggcacacatctgtagtcccagctactcaggaggctgaggcagaatcacttgaacccaggagatagaggttgcagtgagccaagatcatgccactgcactccagcctgggtgacagagggagactccatct

SEQ ID NO: 406007 - DNA, 1919 bp, Homo sapiens
  misc_feature (16)..(16): n is a, c, g, or t
  misc_feature (64)..(64): n is a, c, g, or t
cagagacccgcacccnacgaatatactaacatgtattaaaaatatattataaataattttaggngaataaccacgaaatagagaaattgagaatagaactggatgaaagcaaacaacacttggaacaggagcagcagaaggcagccctggccagagaggagtgcctgagactaacagaactgctgggcgaatctgagcaccaactgcacctcaccagacaggaaaaagatagcattcagcagagctttagcaaggaagcaaaggcccaagcccttcaggcccagcaaagagagcaggagctgacacagaagatacagcaaatggaggcccagcatgacaaaactgaaaatgaacagtatttgttgctgacctcccagaatacatttttgacaaagttaaaggaagaatgctgtacattagccaagaaactggaacaaatctctcaaaaaaccagatctgaaatagctcaactcagtcaagaaaaaaggtatacatatgataaattgggaaagttacagagaagaaatgaagaattggaggaacagtgtgtccagcatgggagagtacatgagacgatgaagcaaaggctaaggcagctggataagcacagccaggccacagcccagcagctggtgcagctcctcagcaagcagaaccagcttctcctggagaggcagagcctgtcggaagaggtggaccggctgcggacccagttacccagcatgccacaatctgattgctgacctggatggaacagagtgaaataaatgatttacaaagagatatttacattcatctggtttagacttaatatgccacaacgcaccacgaccttcccagggtgacaccgcctcagcctgcagtggggctggtcctcatcaacgcgggcgctgtccccgcacgcagtcgggctggagctggagtctgactctagctgagcagagctcctggtgtatgttttcagaaatggcttgaagttatgtgtttaaatctgctcattcgtatgctaggttatacatatgattttcaataaatgaactttttaaagacttgagttgtaatgtttcctttttatcttgtagtgatgaacaaaacacaccaaaaaggcacatattttaactaggccaaagtatattaaggaccaaactttttttcctgccattcatttttcttttcatgatctatatatcaatcatccttcacctttaatcaatgtcccatcagactccattttatttatttatcgtcctactttgtgcacaatcaatcaatcaggagacaccaggaagcactatgcattactctttccattctgttaaacaacgaaaacagacaaaaaagcatctttggctcggtggtgtcagatttttttcttcaatacgcagtatttgagaggagcctaaaaacgtacttagtgaaattagaaaatttacttagagtatatcaaatatctgtacacagataattatttgtctaaaatagtatttctactatacacaattaagccctcaaatgctttaaagtaataaaaacggacactggacataccgtgttgtatctgagaatgacaaacactaaaggcaaggctgcagttagttaggacaggtccctgaccttcggctgccctgcctggccagcgagccatcatcctcatcaccatctcaacacagagctgatgtcaccatatgctcagccttgcctctcagaagtgatgtggattaggctttggaggcggtggcatgatctacacacagagaccatttgaatctcttgagcatgtaaaaggttcaagcctgaaacagtagaacttctattcagattcagaagttttttatttcatcaaatgtgctagacataaaggctgtcacataagatattttaattgtccttaattctgttttagatatactgtgaataaa

SEQ ID NO: 406008 - DNA, 1743 bp, Homo sapiens
agctctgtgcgggattctaggctcccctgtgacagccgcggcaggaagcaggcgggcgctccccggccacaggcctgttgttctcggaagggagaaagcaggacatttccccacgtaactcccagctctgggcctagagtgcgtgcatggcgaagtccccggagaactctaccctggaggagattctggggcagtatcaacggagtctccgggaacatgccagcagaagcattcaccaactgacatgtgccctgaaagaaggcgatgtcactattggagaagatgcaccaaatctttcttttagcaccagtgtgggaaatgaggacgccaggacagcctggcccgaattacaacagagccatgctgttaatcagctcaaagatttgttgcgccaacaagcagataaggaaagtgaagtatctccgtcaagaagaagaaaaatgtcccccttgaggtcattagaacatgaggaaaccaatatgcctactatgcacgaccttgttcatactattaatgaccagtctcaatatattcatcatttagaggcagaagttaagttctgcaaggaggaactctctggaatgaaaaataaaatacaagtagttgtgcttgaaaacgaagggctccagcaacagctaaaatctcaaagacaagaggagacactgagggaacaaacacttctggatgcatccggaaacatgcacaattcttggattacaacaggtgaagattctggggtgggcgaaacctccaaaagaccattttcccatgacaatgcagattttggcaaagctgcatctgctggtgagcagctagaactggagaagctaaaacttacttatgaggaaaagtgtgaaattgaggaatcccaattgaagtttttgaggaacgacttagctgaatatcagagaacttgtgaagatcttaaagagcaactaaagcataaagaatttcttctggctgctaatacttgtaaccgtgttggtggtctttgtttgaaatgtgctcagcatgaagctgttctttcccaaacccatactaatgttcatatgcagaccatcgaaagactggttaaagaaagagatgacttgatgtctgcactagtttccgtaaggagcagcttggcagatacgcagcaaagagaagcaagtgcttatgaacaggtgaaacaagttttgcaaatatctgaggaagccaattttgaaaaaaccaagcacccttcacaatagcaaacgtaaacgatggaattgatggaatcaaccgaaattgacggaatcaatctaaatgttcatcactgacagattgtgtaaagaaaatgtggaacatggacaccatggaatagtatgcagccataaaaagaatgagatccgatcttttgcaggaacatgcatggagccggagacagttatccttagcaaactaacgcaggaagagaaagccaaatactgcatattcttacgtataagtgggagctaaatgataagaacttatgagcacaaagtaggaaaccacagacagtggcatctccttgaggatatagggtgggagcagggagaggagcagaagagatcactattgggtactgggcttaatacctgggtgataaaataatctgtataacaaaaccccgtgacatgagtttgcctatgtaacaaaccttcacatgtacccccgaacctaaaataaaagttaaaaaaaaattagggctattcaattctgcattaagcctcttgtcagccattg

SEQ ID NO: 406009 - DNA, 1958 bp, Homo sapiens
agctctgtgcgggattctaggctcccctgtgacagccgcggcaggaagcaggcgggcgctccccggccacaggcctgttgttctcggaagggagaaagcaggacatttccccacgtaactcccagctctgggcctagagtgcgtgcatggcgaagtccccggagaactctaccctggaggagattctggggcagtatcaacggagtctccgggaacatgccagcagaagcattcaccaactgacatgtgccctgaaagaaggcgatgtcactattggagaagatgcaccaaatctttcttttagcaccagtgtgggaaatgaggacgccaggacagcctggcccgaattacaacagagccatgctgttaatcagctcaaagatttgttgcgccaacaagcagataaggaaagtgaagtatctccgtcaagaagaagaaaaatgtcccccttgaggtcattagaacatgaggaaaccaatatgcctactatgcacgaccttgttcatactattaatgaccagtctcaatatattcatcatttagaggcagaagttaagttctgcaaggaggaactctctggaatgaaaaataaaatacaagtagttgtgcttgaaaacgaagggctccagcaacagctaaaatctcaaagacaagaggagacactgagggaacaaacacttctggatgcatccggaaacatgcacaattcttggattacaacaggtgaagattctggggtgggcgaaacctccaaaagaccattttcccatgacaatgcagattttggcaaagctgcatctgctggtgagcagctagaactggagaagctaaaacttacttatgaggaaaagtgtgaaattgaggaatcccaattgaagtttttgagaaataagaatcacggccgggcgcggtggctcacgcctgtaatcccagcactttgggaggctgaagcgggcgaatcacgaggtcaagagattgagaccatcctggccaacatggtgaaaccccgtttctactaaaaatacaaaaattagctgggcctggtagcacgtgcctgtagtcccagctacttgggaggctgaggcaggagaatcacttgaacctgggaggcggaggttgcagtaagctgagaccacgccactgcactccaacctggcaacagagtgagactccatttcaaaaaagaaaaaaaaaaaaagaaataagaatcactaactgctcttatagaaattatgatattcaagtaaaataatgaaaataaagcactttagttttcaaattattagtattttttctctgtagatagtcttcatctaattttaaaattgcaatgataatataatagtttgagtatttgtatacatgatgaatttgagtatatatgatgaatattcatgtactttttatagaatctatttattagagatcccagtaagacctatatattatagattaaccattagtgatttatgtataatgagtagaaaaagacagcaggaattaatatttttgttgttaaagattatttttaaatagtagtaatgaagtaattttaaatcaaataaactttgaaatattgtttataattttattttaataagtccaatttgaaattttaaaatcttccaggccatagcctatctagagacataactagagtaatactaagagccagaactcagctgattgtggtggcttacgcatgtaatcccaacactttgggaagccaaggcgggtggatcatttgaggtcaagagttcgagactagcctggccaatatggtaaaaccctgtctctactaaaaatataaaaattagctgggtgtggtggcacacatctgtagtcccagctactcaggaggctgaggcagaatcacttgaacccaggagatagaggttgcagtgagccaagatcatgccactgcactccagcctgggtgacagagggagactccatct

SEQ ID NO: 406010 - DNA, 2207 bp, Homo sapiens
tttttttgagacagggttggccaggctggcctctttatctgtttttgtattgttttctcagaggcgctgagtgaagatggtcagatatgtgtgtatttttttaaaaacgatttgaaaaaatatgatgttcctttgtcgtgggaacaagccaggttgcagacgcagaaggagctacagctgagagagggacgacggtgaggttcatgttcagtatgtttctgttgcttgctaaactgtatttttcttgcaaagtaaatagaaattaacatcctacatgccaaatccagtccactgtgggcagactgtgacaaatcctcaaggaacagatcattcccatgcagtagaaactattctagaacaaagttaaagcatctcacttcatttatcaggcatacctgaccctgaaatcatacctaaccaggagagtacagctgacatttcatctcacttccaaatttggttccaaagcacagtacctaaaaaagttcacaagtatgctttctcccaggataaacaataacagtgaaaatctattaatgtaatttgttgccataatagaaaaataagtggtaattttagcaggcgttgaaatacgtttcttaaaatttatacctgttcctgataaaatttctttattttgggtactttctttagcttgggttaaaaaaaaaaaaaaaaagtcctaacttgataaggctacctaacataaaactaccaaaatagaaaaaaaacatgcttcttggtagaatgttaggaacagtggaatcagaaccagcctgttgtcccgactattattcactattgtcctggaaatcctgaccagtacagggatgtgggatagacaggcacaaatactgaaaggaaggagaaactgtcatttccagacagtacagttgtcagtccaagaaaagtcaagtccatagaaccattctcagttcaataaggtgatcagatagatagatccacaacatgttaaaaaaaaaaaaattctcattcacaacaataaacctgaacagaaagggcacaggatggtggaactttgctgttccttcttgttccccatagagatccttgaagtaccttctccaactccatgatactctaaaaactgttcatcttcataataggagtggagcctaatccttggtctcctcacctcctggtttcccggaatgtctttctcattaacatatgagttctcagggcctgtatgtgcaaaggaaacctgaaccattgaggttcagactaggttgttgacaggatacaatgctgtgaagatgtcagtactggtaagttctaaaattcatcaggataaacaaatatgcatcaattgctgagaaagttttaaataagactaacatggtttgcttggcctgataccaagacatacagtaaagctccagtacttaaaaccatgtggggatgccagagtagataaatggatcagaataaagagtcagaatatgtgacaaaagtgttaggccaaattattgaaattagtggggaaaagacaaacattggcatgtgtttagaaaaaaatgtcagatgccttctctctcaccatttgtaaacattacttccaaatgtatccaagagctatctataaaaaaccttgccaatactagggaagaacagaatctggaaccctagggtgggaagcaagacatgaagcagagaagctccaaaaacctagctgcctcttgagagcagaagcttccaagaggaacaggcagtctcaatgcctctgtgcataagggtccctacagtgcaggggctgccttccctctttgctccactccctgacttgatggaagcttggaagcaggcatggggccagcatgagctgttccaggagggcacatgtgtctgaggcacatgttcttacatgttaatgcacatgtgcaaatgtatctacatgctttacatgatgctgtagaaatattttctcttgaccataaacatttcaaatcatgtacttacatttggcaataaagccttttcatccttctgcaaacaattttcccataccattgcttcacatgcaccgtaactggaagaggagcacagagtgtgctcaagaggggaggattcccagcacagaggatctgatgcgaggagcttctgctgaggagctcttggcgcagtgtttgtcgagcagtctgctctcaaagcgcggcgcacgaggccgggccctcgtgccgacgcaa

SEQ ID NO: 406011 - DNA, 3123 bp, Homo sapiens
  misc_feature (535)..(535): n is a, c, g, or t
ggtctggctttgcagtcggctgagctgagctgggggaagagcgatgggggtgtgccctgggaccagcacatctgacgtaggccccacatgttcatttctgaaaatagtttctcctcaccagtgagaaaatgaggaaggaatcctcctcatgagacaggtgagtgaaccaggagagggagttccaggtgccctgcaaggttgttagcagttccctgttcccagatagttttgtcaaagatctcagaataagagaggaaaaaattatgtaaaacaaaaatgcgaagaatggggtagtgagaatgaatgaatgtaaaaccctggtctgatccataattagtcacttacatgcgaagtctggcgagctctctggccctctgcttgtggtggaccctctgcttgtggttaagctggacttatggtggacagtgtcccctttagttctaagaatcccctatcaatggtgaacctcttttttttttctttgtattttcctcaagaactgtgtgacagaatatctagatgtgtggttgatttnaattttttatttcattttatttttgagaccgagtcctgctctgttgcccaggccggagtacagtagtgctatcttggctcactgcaacctccacctcctgggttcaagcgattctcttgcctcagtctcctgagtagctgggattacaggcacataccaccatgcccgcctcatttttttgtatttttagtagagacagggtttcaccatgttggccaggcttgtccggaactcctgacctcaggtgatccacctgcctcggcctcccaaagcgctgggattacagttagagtctccatgcccggctgattttaaattttaaaattaagccttgtatagcctgggcaacatggtgagacccttccacaaaaatgaataaataaataaaattaaccaggtgtggtgatgtgtgcctgtagttccagcgactggggaggctgaggtgggaggatcccttgagcccaggaggtcaaggctgcagtaagctgtgatcatgccactgtcctccagtctgggtgacaaagcaagaccctatctcttaaaaaaaaaaaaaaaaaacccaggtgtggtggcccatggcctgttatcacagcactttgggaggccgagatgagagggttgcttgaggccaggaggttgaagctgcaatgaactgtgattgtgccagtgcactccagcctgggtgatagagcaagtactctgtctcaaaaaaaaaaaaaattaaactggttatgaaagattgctgtattgtctttttctacgtgacaagcatttgttctccatcacgaataattcagtcaaaatcaattcatttctaaacaaaaagagttaagttttctgttttttagactttaccatccagcacagctgacagtccattggcattactttaaagtaactttttgataactgattcctaaattgctttttgaatttgtttattctattcattattgttttgaaggaaacctttgtcaaaccaatccaagcgtggtagttagtaaactatgaatttaacggcacatttcaccagtaagaccctccttctcagtatggttgaaatccagtatcattattacttgagacagggtcttgctctgtcacccaggctggagtacagtgatgcgatcacagctcactgcagcctcaacctcctgggctcaaacgatcctcccaccttggcctccccacgttttgggattacaggtgtgagccactgcatctggccagtgaaatctattatttatcagatctatcttcatgaaaattttgtcttatttaaaataacattccaaccccttttctctcctttaattaacagagaagtacaacagttccatcctgctgttagaaactcatctgaggtgaaatttgctgttcaggcttttgctgcattgaacagtaataattttgtgagatttttcaaactggtccagtcagcttcttacctgaacgcttgtcttttacactgttacttcagtcaggtgagtaaatgagctgtgcttgcagagttggaagaaagcaggtggttcttgtgctgtttgggtgctttcttattccaagcttttcaaaggaggtctcaggctgatgctgtgtcacccttgcagcagccccacgaaggggttaccggtgttgccctgttttataggggttatcactgttggtcaccatccggaaaggctgtgcaatggaaaatactgttccatggttcaaataagaaaaatctctttaggaaaacataggttgaattcagcactatcatcatccatgaaagctaactaaaaagcaaaaatctcatatcatatgcacaaaatctctgactttgaaatgcttcatgttttaaatcgaagtttctggagtgaggctgatggcgctaagttcctttcagtgggtgcctcagtgtctgtgctttgccgtgtgctagggttgcagaggcaatgggaaggccagtccctcccctggggtttgcgcagagtaaactgtgtcttggggtttccagtcggttattttgttccacttccacggaacttggggatgaggacagagcagcccctgtagcacctgctgttctaggccctgcatgattccgttcagtgcaatgtgaccaggaccgcggcccaccgcacagagcgccacctcacctcgcacacactctgctgcccattctggcagcggctccaaggaggctgccaggattccttgccacaagcccgtagtggccacagcgtggggaggatgctgcctgggagatcctgggacctgccttggttgatctgtggctccaggtcatttctttggtcacacatcagggcctcctgtaaacagtgactaaacccacagtcatgtcacagtcagaaggtcttttgcaggtttgctccttgtcagatctgcaggttgccaaacagaactgatattctggagtaaatgaaaaggttttccacaacttgccacttgtagttaatattggctgggtgctttggctcacacctgttatcctggcaccttggcaaacttgggaggtgggaaaattgcttgagctcaggagttcaaggccagcctgggcaacatagggaggccctgtctctact

SEQ ID NO: 406012 - DNA, 413 bp, Homo sapiens
aaaaataaatgactactcagatgaggtttctaacatgatccagatctagtaccttcccagagataggtcgtggtttattgacatcccaaaactgttcagtttcttttttattcaaatagagtgacatgatgagggagcaactgcagctgtcagaggcgacaggaacgtgtctaggcgaacgactaaagcacctggaaaggctgatccggagttcaagggaagaggaagttgcctctgagctccatctctctgcgctgctagacatggtggacatttgagcagcctgacctgtggggagggggtctctcccgaagagtttctgtttttactcaaaataatgttattctcagatgcttgatgcactgttggaaatgtgattaatttaatcatgcagataaaccatttaaatgtca

SEQ ID NO: 406013 - DNA, 362 bp, Homo sapiens
gtgggctagtagttacagatgttttcatcacaggttcaatagtgtgagaaagagacactagcccacagagtgacatgatgagggagcaactgcagctgtcagaggcgacaggaacgtgtctaggcgaacgactaaagcacctggaaaggctgatccggagttcaagggaagaggaagttgcctctgagctccatctctctgcgctgctagacatggtggacatttgagcagcctgacctgtggggagggggtctctcccgaagagtttctgtttttactcaaaataatgttattctcagatgcttgatgcactgttggaaatgtgattaatttaatcatgcagataaaccatttaaatgtca

SEQ ID NO: 406014 - DNA, 907 bp, Homo sapiens
ggcagcgcgggcctcggggtcctggggcgagacggtgagcgtgggggctgggccggcgccaggggcgccgtttccttcccccacgcagctccgcgcgcccgggcctccacatcgtcgctaacggagcgttgcggcgccggcgacccctggcgagcccggggcgggacagtggccaggccggcctgggcccagcgcgtggcctccgccgtttcgggctgtgctgggtggaagattaggctccccgggcacgccgtccccgccgagaggcctcagcttcgtggcagcgccctcgtccttccagcccgctcgagggtggccgccagggcgcgatgaaggaatgtgagaaagtgcttagcgctccagccgctccgagggaagccaggtgggaggagatcccgaaacgctaaggttttgacagcgttacagtgaattctccggctgtagagattggaggaagtcgggagaaattcgtctctaagttgtaagcttgttctaaagacgaaggggaactccctagtgctacaggctgtttcaggaagccaattaattttgtacacgtaatacttaattaccttctaataattggagcagaagatgaacccaactaatcctttcagtgggcagcagcctagtgctttttcggcgtcttctagtaatgtaggaacacttccatctaagccgccatttcgatttggtcaaccttctctttttggacaaaacagtaccttatctgggaagagctcgggattttcacaggtatccagctttccagcgtcttctggagtaagtcattcctcttcagtgcaaacattagggttcacccaaacctcaagtgttggacccttttctggacttgagcacacttccacctttgtgcatcgataacacggtaccgactcgatctaca

SEQ ID NO: 406015 - DNA, 693 bp, Homo sapiens
tgagacggagtctcgctctgtcgtccaggctggagtgcagtggcgcgatctctgctcactgcaagctctgcctcccggcttcacgtcattctcctgcttcagcctcccgagtagctgggaccacaggcgcccgccaccacaccaggctaatttttttgtatttttagtagagacagggtttcaccatgttagccaggatcgtctggatctcttgacctcatgatccacccgcttcggccttccaaagtgctgggattacaggcgtgagccaccgcgcctgactgactcttgcacttttcaagcaagccctcagtgtctgtgggccccaagtgcagtgtcttccatgctgattgccctgtttctaggaatgcagtagagacagaccagagggtccgtgtggcccgttgctgtgaggatgtctgtgcccacttagtggacttgtttctcgtggaggaaatcttccagactgcaaaggagaccctccaggagcttcagtgcttctgcaagtatctacagcggtgagtcctgtgttcctacaggcaaaatccacacacacggggaagagtcttttaacaaattcaaaatatatgagctattagtttctgtattcagtggtaaaaggatgagggaaaatgttatagcaatgaatacctaaaatagactaattggattatactgcatttcagaaatact

SEQ ID NO: 406016 - DNA, 556 bp, Homo sapiens
atgtggtatttgtggacctaggtctgtgtgatatttttctttcttcttttcctgaaagtctttataattcaaatatagaattagattcttcaagtgttttttttgttttttgttttttttaaatctgtagaattctagcaaattggttaaaagtcaagttcatgggagatgaaggctcagtggatgacacatccagcgatgctggtgggattcagacgctttcgcttttcaactcacttagcagcaaaggggatcagatgattttttggcaataaagccttttcatccttctgcaaacaattttcccataccattgcttcacatgcaccgtaactggaagaggagcacagagtgtgctcaagaggggaggattcccagcacagaggatctgatgcgaggagcttctgctgaggagctcttggcgcagtgtttgtcgagcagtctgctcattcttccttcagtggttaaagatgcaaaaacagagtttcaatcacagatatgtgccactgaacaggtaaaaactgtgctcctggactggctttaggaagtccttcaa

SEQ ID NO: 406017 - DNA, 6538 bp, Homo sapiens
ggcagcgcgggcctcggggtcctggggcgagacggtgagcgtgggggctgggccggcgccaggggcgccgtttccttcccccacgcagctccgcgcgcccgggcctccacatcgtcgctaacggagcgttgcggcgccggcgacccctggcgagcccggggcgggacagtggccaggccggcctgggcccagcgcgtggcctccgccgtttcgggctgtgctgggtggaagattaggctccccgggcacgccgtccccgccgagaggcctcagcttcgtggcagcgccctcgtccttccagcccgctcgagggtggccgccagggcgcgatgaaggaatgtgagaaagtgcttagcgctccagccgctccgagggaagccaggtgggaggagatcccgaaacgctaaggttttgacagcgttacagtgaattctccggcttctaataattggagcagaagatgaacccaactaatcctttcagtgggcagcagcctagtgctttttcggcgtcttctagtaatgtaggaacacttccatctaagccgccatttcgatttggtcaaccttctctttttggacaaaacagtaccttatctgggaagagctcgggattttcacaggtatccagctttccagcgtcttctggagtaagtcattcctcttcagtgcaaacattagggttcacccaaacctcaagtgttggacccttttctggacttgagcacacttccacctttgtggctacctctgggccttcaagttcatctgtgctgggaaacacaggatttagttttaaatcacccaccagtgttggggctttcccaagcacttctgcttttggacaagaagctggagaaatagtgaactctggttttgggaaaacagaattcagctttaaacctctggaaaatgcagtgttcaaaccaatactgggggctgaatctgagccagagaaaacccagagccaaattgcttctgggttttttacattttcccacccaattagtagtgcacctggaggcctggcccctttctcttttcctcaagtaacaagtagttcagctaccacttcaaattttaccttttcaaaacctgttagtagtaataattcattatctgcctttacccctgctttgtcaaaccaaaatgtagaggaagagaagagaggacctaagtcaatatttggaagttctaataatagcttcagtagcttccctgtatcatctgcggttttgggcgaacctttccaggctagcaaagcaggtgtcaggcaggggtgtgaagaagctgtttcccaggtggaaccacttcccagcctaatgaaaggactgaaaaggaaggaggaccaggatcgctccccaaggagacatggccacgagccagcagaagattcggatcctctgtcccggggcgatcatcctccagacaaacgacctgtccgcctgaatcgaccccggggaggtactttatttggtcggacgatacaggatgttttcaaaagcaataaggaagtaggtcgtctgggcaacaaggaggccaaaaaggaaactggctttgttgagtctgcagaaagtgaccacatggctatcccaggagggaatcagtctgtcctggcaccttcccggattccaggtgtgaataaagaggaagaaactgaaagtagagagaagaaagaagattctctaagaggaactccggcgcgtcagagtaacagaagcgagagcacagacagtcttgggggcttgtctccctctgaagtcacagccatccagtgcaagaatatccctgactacctcaacgacaggaccattctggagaaccattttggcaaaattgctaaagtgcagcgcatctttaccaggcgcagcaaaaagcttgcagtggtacatttctttgatcatgcatctgcagccctggctagaaagaaggggaaaagtttgcataaagacatggctatcttttggcacaggaagaaaataagccccaataagaaacccttttccctgaaggagaagaaaccaggtgacggtgaagtcagcccgagcacagaggatgcaccctttcagcactctcctcttggcaaggccgcagggaggactggtgctagcagcctcctgaataaaagctctccagtgaagaagccaagtcttctaaaggcccaccaattcgagggagactcttttgactcagcctccgagggctccgagggcctcgggccatgtgtgctctccctcagtaccctgataggcactgtggctgagacatccaaggagaagtaccgcctgcttgaccagagagacaggatcatgcggcaagctcgggtgaagagaaccgatctggacaaagcgaggacttttgttggcacctgcctggatatgtgtcctgagaaggagaggtacatgcgggagacccgtagccagctgagcgtgttcgaagtggtcccagggactgaccaggtggaccacgcagcagctgtgaaagagtacagtcggtcctcggcggatcaggaggagcccctgccccacgagctgcggcccttgccagtgctcagcaggaccatggactacctggtgacccagatcatggaccagaaggagggcagcctgcgggattggtatgacttcgtgtggaaccgcacgcgtggcatacggaaggatatcacgcagcagcacctctgtgaccccctgacggtgtccctgattgagaagtgcacccggtttcacatccactgtgcccacttcatgtgtgaggagcccatgtcctcctttgatgccaagatcaataatgagaacatgaccaagtgcctgcagagcctgaaggagatgtaccaggacctgagaaacaagggtgtcttctgtgccagcgaagcggagttccagggctacaatgttctgctcagtctcaacaagggagacatcctaagagaagtacaacagttccatcctgctgttagaaactcatctgaggtgaaatttgctgttcaggcttttgctgcattgaacagtaataattttgtgagatttttcaaactggtccagtcagcttcttacctgaacgcttgtcttttacactgttacttcagtcagatccgcaaggatgctctccgggcgctcaactttgcgtacacggtgagcacacagcgatctaccatctttcccctggatggtgtggtgcgcatgctgctgttcagagactgtgaagaggccaccgacttcctcacctgccacggcctcaccgtttccgacggctgtgtggagctgaaccggtctgcattcctggaaccagagggattatccaagaccaggaagtcggtgtttattactaggaagctgacggtgtcagtcggggaaattgtgaacggagggccattgccccccgtccctcgtcatacccctgtgtgcagcttcaactcccagaacaagtacatcggggagagcctggccgcggagctgcccgtcagcacccagagacccggctccgacacagtgggcggagggagaggagaggagtgtggtgtagagccggatgcacccctgtccagtctcccacagtctctaccagcccctgcgccctcaccagtgcctctgcctcctgtcctggcactgaccccgtctgtggcgcccagcctcttccagctgtctgtgcagcctgaaccaccgcctccagagcccgtgcccatgtactctgacgaggacctggcgcaggtggtggacgagctcatccaggaggccctgcagagggactgtgaggaagttggctctgcgggtgctgcctacgcagctgccgccctgggtgtttctaatgctgctatggaggatttgttaacagctgcaaccacgggcattttgaggcacattgcagctgaagaagtgtctaaggaaagagagcgaagggagcaggagaggcagcgggctgaagaggaaaggttgaaacaagagagagagctggtgttaagtgagctgagccagggcctggccgtggagctgatggaacgcgtgatgatggagtttgtgagggaaacctgctcccaggagttgaagaatgcagtagagacagaccagagggtccgtgtggcccgttgctgtgaggatgtctgtgcccacttagtggacttgtttctcgtggaggaaatcttccagactgcaaaggagaccctccaggagcttcagtgcttctgcaagtatctacagcggtggagggaagctgtcacagcccgcaagaaactgaggcgccaaatgcgggctttccctgctgcgccctgctgcgtggacgtgagcgaccggctgagggcgctggcgcccagcgcagagtgccccattgctgaagagaacctggccaggggcctcctggacctgggccatgcagggagattgggcatctcctgcaccaggttaaggcggctcagaaacaagacagctcaccagatgaaggttcagcacttctaccagcagctgctgagtgatgtggcatgggcgtctctggacctgccatccctcgtggctgagcacctccctgggaggcaggagcatgtgttttggaagctggtgctggtgttgccggatgtagaggagcagtccccagagagttgtggcagaattctagcaaattggttaaaagtcaagttcatgggagatgaaggctcagtggatgacacatccagcgatgctggtgggattcagacgctttcgcttttcaactcacttagcagcaaaggggatcagatgatttctgttaacgtgtgtataaaggtggcccatggcgccctcagtgatggtgccattgatgctgtggagacacagaaggacctcctgggagccagtgggctcatgctgctgcttccccccaaaatgaagagtgaggacatggcagaggaggacgtgtactggctgtcggccttgctgcagctcaagcagctcctgcaggctaagcccttccagcctgcgcttcctctggtggttcttgtgcctagcccaggaggggacgccgttgagaaggaagtagaagatggtctgatgctacaggacttggtttcagctaagctgatttcagattacactgttaccgagatccctgataccattaatgatctacaaggttcaactaaggttttgcaagcagtgcagtggctggtttcccactgcccccattcccttgacctctgctgccagactctcattcagtacgtcgaagacgggattggccatgagtttagtggccgctttttccatgacagaagagagaggcgtctgggcggtcttgcttctcaggagcctggcgccatcattgagctgtttaacagtgtgctgcagttcctggcttctgtggtgtcctctgaacagctgtgtgacctgtcctggcctgtcactgagtttgctgaggcagggggcagccggctgcttcctcacctgcactggaatgccccagagcacctggcctggctgaagcaggctgtgctcgggttccagcttccgcagatggaccttccacccctgggggccccctggctccccgtgtgctccatggttgtccagtacgcctcccagatccccagctcacgccagacacagcctgtcctccagtcccaggtggagaacctgctccacagaacctactgtaggtggaagagcaagagtccctccccagtccatggggcaggcccctcggtcatggagatcccatgggatgatcttatcgccttgtgtatcaaccacaagctgagagactggacgcccccccggcttcctgttacatcagaggcgctgagtgaagatggtcagatatgtgtgtatttttttaaaaacgatttgaaaaaatatgatgttcctttgtcgtgggaacaagccaggttgcagacgcagaaggagctacagctgagagagggacgtttggcaataaagccttttcatccttctgcaaacaattttcccataccattgcttcacatgcaccgtaactggaagaggagcacagagtgtgctcaagaggggaggattcccagcacagaggatctgatgcgaggagcttctgctgaggagctcttggcgcagtgtttgtcgagcagtctgctgctggagaaagaagagaacaagaggtttgaagatcagcttcagcaatggttgtctgaagactcaggagcatttacggatttaacttcccttcccctctatcttcctcagactctagtgtctctttctcacactattgaacctgtgatgaaaacatctgtaactactagcccacagagtgacatgatgagggagcaactgcagctgtcagaggcgacaggaacgtgtctaggcgaacgactaaagcacctggaaaggctgatccggagttcaagggaagaggaagttgcctctgagctccatctctctgcgctgctagacatggtggacatttgagcagcctgacctgtggggagggggtctctcccgaagagtttctgtttttactcaaaataatgttattctcagatgcttgatgcactgttggaaatgtgattaatttaatcatgcagataaaccatttaaatgtca

SEQ ID NO: 406018 - DNA, 2862 bp, Homo sapiens
tgagacggagtctcgctctgtcgtccaggctggagtgcagtggcgcgatctctgctcactgcaagctctgcctcccggcttcacgtcattctcctgcttcagcctcccgagtagctgggaccacaggcgcccgccaccacaccaggctaatttttttgtatttttagtagagacagggtttcaccatgttagccaggatcgtctggatctcttgacctcatgatccacccgcttcggccttccaaagtgctgggattacaggcgtgagccaccgcgcctgactgactcttgcacttttcaagcaagccctcagtgtctgtgggccccaagtgcagtgtcttccatgctgattgccctgtttctaggaatgcagtagagacagaccagagggtccgtgtggcccgttgctgtgaggatgtctgtgcccacttagtggacttgtttctcgtggaggaaatcttccagactgcaaaggagaccctccaggagcttcagtgcttctgcaagtatctacagcggtggagggaagctgtcacagcccgcaagaaactgaggcgccaaatgcgggctttccctgctgcgccctgctgcgtggacgtgagcgaccggctgagggcgctggcgcccagcgcagagtgccccattgctgaagagaacctggccaggggcctcctggacctgggccatgcagggagattgggcatctcctgcaccaggttaaggcggctcagaaacaagacagctcaccagatgaaggttcagcacttctaccagcagctgctgagtgatgtggcatgggcgtctctggacctgccatccctcgtggctgagcacctccctgggaggcaggagcatgtgttttggaagctggtgctggtgttgccggatgtagaggagcagtccccagagagttgtggcagaattctagcaaattggttaaaagtcaagttcatgggagatgaaggctcagtggatgacacatccagcgatgctggtgggattcagacgctttcgcttttcaactcacttagcagcaaaggggatcagatgatttctgttaacgtgtgtataaaggtggcccatggcgccctcagtgatggtgccattgatgctgtggagacacagaaggacctcctgggagccagtgggctcatgctgctgcttccccccaaaatgaagagtgaggacatggcagaggaggacgtgtactggctgtcggccttgctgcagctcaagcagctcctgcaggctaagcccttccagcctgcgcttcctctggtggttcttgtgcctagcccaggaggggacgccgttgagaaggaagtagaagatggtctgatgctacaggacttggtttcagctaagctgatttcagattacactgttaccgagatccctgataccattaatgatctacaaggttcaactaaggttttgcaagcagtgcagtggctggtttcccactgcccccattcccttgacctctgctgccagactctcattcagtacgtcgaagacgggattggccatgagtttagtggccgctttttccatgacagaagagagaggcgtctgggcggtcttgcttctcaggagcctggcgccatcattgagctgtttaacagtgtgctgcagttcctggcttctgtggtgtcctctgaacagctgtgtgacctgtcctggcctgtcactgagtttgctgaggcagggggcagccggctgcttcctcacctgcactggaatgccccagagcacctggcctggctgaagcaggctgtgctcgggttccagcttccgcagatggaccttccacccctgggggccccctggctccccgtgtgctccatggttgtccagtacgcctcccagatccccagctcacgccagacacagcctgtcctccagtcccaggtggagaacctgctccacagaacctactgtaggtggaagagcaagagtccctccccagtccatggggcaggcccctcggtcatggagatcccatgggatgatcttatcgccttgtgtatcaaccacaagctgagagactggacgcccccccggcttcctgttacatcagaggcgctgagtgaagatggtcagatatgtgtgtatttttttaaaaacgatttgaaaaaatatgatgttcctttgtcgtgggaacaagccaggttgcagacgcagaaggagctacagctgagagagggacgtttggcaataaagccttttcatccttctgcaaacaattttcccataccattgcttcacatgcaccgtaactggaagaggagcacagagtgtgctcaagaggggaggattcccagcacagaggatctgatgcgaggagcttctgctgaggagctcttggcgcagtgtttgtcgagcagtctgctgctggagaaagaagagaacaagaggtttgaagatcagcttcagcaatggttgtctgaagactcaggagcatttacggatttaacttcccttcccctctatcttcctcagactctagtgtctctttctcacactattgaacctgtgatgaaaacatctgtaactactagcccacagagtgacatgatgagggagcaactgcagctgtcagaggcgacaggaacgtgtctaggcgaacgactaaagcacctggaaaggctgatccggagttcaagggaagaggaagttgcctctgagctccatctctctgcgctgctagacatggtggacatttgagcagcctgacctgtggggagggggtctctcccgaagagtttctgtttttactcaaaataatgttattctcagatgcttgatgcactgttggaaatgtgattaatttaatcatgcagataaaccatttaaatgtca

SEQ ID NO: 406019 - DNA, 7487 bp, Homo sapiens
ggcagcgcgggcctcggggtcctggggcgagacggtgagcgtgggggctgggccggcgccaggggcgccgtttccttcccccacgcagctccgcgcgcccgggcctccacatcgtcgctaacggagcgttgcggcgccggcgacccctggcgagcccggggcgggacagtggccaggccggcctgggcccagcgcgtggcctccgccgtttcgggctgtgctgggtggaagattaggctccccgggcacgccgtccccgccgagaggcctcagcttcgtggcagcgccctcgtccttccagcccgctcgagggtggccgccagggcgcgatgaaggaatgtgagaaagtgcttagcgctccagccgctccgagggaagccaggtgggaggagatcccgaaacgctaaggttttgacagcgttacagtgaattctccggctgtagagattggaggaagtcgggagaaattcgtctctaagttgtaagcttgttctaaagacgaaggggaactccctagtgctacaggctgtttcaggaagccaattaattttgtacacgtaatacttaattaccttctaataattggagcagaagatgaacccaactaatcctttcagtgggcagcagcctagtgctttttcggcgtcttctagtaatgtaggaacacttccatctaagccgccatttcgatttggtcaaccttctctttttggacaaaacagtaccttatctgggaagagctcgggattttcacaggtatccagctttccagcgtcttctggagtaagtcattcctcttcagtgcaaacattagggttcacccaaacctcaagtgttggacccttttctggacttgagcacacttccacctttgtggctacctctgggccttcaagttcatctgtgctgggaaacacaggatttagttttaaatcacccaccagtgttggggctttcccaagcacttctgcttttggacaagaagctggagaaatagtgaactctggttttgggaaaacagaattcagctttaaacctctggaaaatgcagtgttcaaaccaatactgggggctgaatctgagccagagaaaacccagagccaaattgcttctgggttttttacattttcccacccaattagtagtgcacctggaggcctggcccctttctcttttcctcaagtaacaagtagttcagctaccacttcaaattttaccttttcaaaacctgttagtagtaataattcattatctgcctttacccctgctttgtcaaaccaaaatgtagaggaagagaagagaggacctaagtcaatatttggaagttctaataatagcttcagtagcttccctgtatcatctgcggttttgggcgaacctttccaggctagcaaagcaggtgtcaggcaggggtgtgaagaagctgtttcccaggtggaaccacttcccagcctaatgaaaggactgaaaaggaaggaggaccaggatcgctccccaaggagacatggccacgagccagcagaagattcggatcctctgtcccggggcgatcatcctccagacaaacgacctgtccgcctgaatcgaccccggggaggtactttatttggtcggacgatacaggatgttttcaaaagcaataaggaagtaggtcgtctgggcaacaaggaggccaaaaaggaaactggctttgttgagtctgcagaaagtgaccacatggctatcccaggagggaatcagtctgtcctggcaccttcccggattccaggtgtgaataaagaggaagaaactgaaagtagagagaagaaagaagattctctaagaggaactccggcgcgtcagagtaacagaagcgagagcacagacagtcttgggggcttgtctccctctgaagtcacagccatccagtgcaagaatatccctgactacctcaacgacaggaccattctggagaaccattttggcaaaattgctaaagtgcagcgcatctttaccaggcgcagcaaaaagcttgcagtggtacatttctttgatcatgcatctgcagccctggctagaaagaaggggaaaagtttgcataaagacatggctatcttttggcacaggaagaaaataagccccaataagaaacccttttccctgaaggagaagaaaccaggtgacggtgaagtcagcccgagcacagaggatgcaccctttcagcactctcctcttggcaaggccgcagggaggactggtgctagcagcctcctgaataaaagctctccagtgaagaagccaagtcttctaaaggcccaccaattcgagggagactcttttgactcagcctccgagggctccgagggcctcgggccatgtgtgctctccctcagtaccctgataggcactgtggctgagacatccaaggagaagtaccgcctgcttgaccagagagacaggatcatgcggcaagctcgggtgaagagaaccgatctggacaaagcgaggacttttgttggcacctgcctggatatgtgtcctgagaaggagaggtacatgcgggagacccgtagccagctgagcgtgttcgaagtggtcccagggactgaccaggtggaccacgcagcagctgtgaaagagtacagtcggtcctcggcggatcaggaggagcccctgccccacgagctgcggcccttgccagtgctcagcaggaccatggactacctggtgacccagatcatggaccagaaggagggcagcctgcgggattggtatgacttcgtgtggaaccgcacgcgtggcatacggaaggatatcacgcagcagcacctctgtgaccccctgacggtgtccctgattgagaagtgcacccggtttcacatccactgtgcccacttcatgtgtgaggagcccatgtcctcctttgatgccaagatcaataatgagaacatgaccaagtgcctgcagagcctgaaggagatgtaccaggacctgagaaacaagggtgtcttctgtgccagcgaagcggagttccagggctacaatgttctgctcagtctcaacaagggagacatcctaagagaagtacaacagttccatcctgctgttagaaactcatctgaggtgaaatttgctgttcaggcttttgctgcattgaacagtaataattttgtgagatttttcaaactggtccagtcagcttcttacctgaacgcttgtcttttacactgttacttcagtcagatccgcaaggatgctctccgggcgctcaactttgcgtacacggtgagcacacagcgatctaccatctttcccctggatggtgtggtgcgcatgctgctgttcagagactgtgaagaggccaccgacttcctcacctgccacggcctcaccgtttccgacgggtaagagctgagaatggaactgtggggcccctgtctccttttttcttgttaattctgatgaagggctgtgaagggctggctgcttgcctgacttgaagaaggtgcattccctctgccatgcaggtgaacacacgagactcagaatggctgggggtgttcccaaggtcacatcctggctgtcagcacattgagggctcagaccaagttctttgtgactccaaaatcagtccttttcatgacttgctgacaaacctaaagataaaagttagggccttctttattctttcccttgactgcctttgccagccaatgacggacaacctctgacggctgggatggaggcacccgcaggccagccggagtcttctccggtacttaccagtcagagtggtgagactcacagacgctctctcagaaactggcagcttacactcaacacccggtgcctagttccccaccctgtctcctctaactcctcacctgcctcctgcctgtctcctccttccagttctgtctccttctagttctgtctcctccttccagttctgtcctcagaaaattagacggttttgggtgagccagcaaggaggcaggagtgagtcagcgtgcgtctgttaacacgctgggcttagtggttctagggacctacagaggctccagggtgggcggcagtgggacctggcgcctgtgctttctgtcatttacacatggctgtggtgacacccaaggggcttgcagtactcggcagggcactgagggcgaagctgtcttctcccctggtgacacccctcgggggtcttttgtggtctgggtagctgtgtggagctgaaccggtctgcattcctggaaccagagggattatccaagaccaggaagtcggtgtttattactaggaagctgacggtgtcagtcggggaaattgtgaacggagggccattgccccccgtccctcgtcatacccctgtgtgcagcttcaactcccagaacaagtacatcggggagagcctggccgcggagctgcccgtcagcacccagagacccggctccgacacagtgggcggagggagaggagaggagtgtggtgtagagccggatgcacccctgtccagtctcccacagtctctaccagcccctgcgccctcaccagtgcctctgcctcctgtcctggcactgaccccgtctgtggcgcccagcctcttccagctgtctgtgcagcctgaaccaccgcctccagagcccgtgcccatgtactctgacgaggacctggcgcaggtggtggacgagctcatccaggaggccctgcagagggactgtgaggaagttggctctgcgggtgctgcctacgcagctgccgccctgggtgtttctaatgctgctatggaggatttgttaacagctgcaaccacgggcattttgaggcacattgcagctgaagaagtgtctaaggaaagagagcgaagggagcaggagaggcagcgggctgaagaggaaaggttgaaacaagagagagagctggtgttaagtgagctgagccagggcctggccgtggagctgatggaacgcgtgatgatggagtttgtgagggaaacctgctcccaggagttgaagaatgcagtagagacagaccagagggtccgtgtggcccgttgctgtgaggatgtctgtgcccacttagtggacttgtttctcgtggaggaaatcttccagactgcaaaggagaccctccaggagcttcagtgcttctgcaagtatctacagcggtggagggaagctgtcacagcccgcaagaaactgaggcgccaaatgcgggctttccctgctgcgccctgctgcgtggacgtgagcgaccggctgagggcgctggcgcccagcgcagagtgccccattgctgaagagaacctggccaggggcctcctggacctgggccatgcagggagattgggcatctcctgcaccaggttaaggcggctcagaaacaagacagctcaccagatgaaggttcagcacttctaccagcagctgctgagtgatgtggcatgggcgtctctggacctgccatccctcgtggctgagcacctccctgggaggcaggagcatgtgttttggaagctggtgctggtgttgccggatgtagaggagcagtccccagagagttgtggcagaattctagcaaattggttaaaagtcaagttcatgggagatgaaggctcagtggatgacacatccagcgatgctggtgggattcagacgctttcgcttttcaactcacttagcagcaaaggggatcagatgatttctgttaacgtgtgtataaaggtggcccatggcgccctcagtgatggtgccattgatgctgtggagacacagaaggacctcctgggagccagtgggctcatgctgctgcttccccccaaaatgaagagtgaggacatggcagaggaggacgtgtactggctgtcggccttgctgcagctcaagcagctcctgcaggctaagcccttccagcctgcgcttcctctggtggttcttgtgcctagcccaggaggggacgccgttgagaaggaagtagaagatggtctgatgctacaggacttggtttcagctaagctgatttcagattacactgttaccgagatccctgataccattaatgatctacaaggttcaactaaggttttgcaagcagtgcagtggctggtttcccactgcccccattcccttgacctctgctgccagactctcattcagtacgtcgaagacgggattggccatgagtttagtggccgctttttccatgacagaagagagaggcgtctgggcggtcttgcttctcaggagcctggcgccatcattgagctgtttaacagtgtgctgcagttcctggcttctgtggtgtcctctgaacagctgtgtgacctgtcctggcctgtcactgagtttgctgaggcagggggcagccggctgcttcctcacctgcactggaatgccccagagcacctggcctggctgaagcaggctgtgctcgggttccagcttccgcagatggaccttccacccctgggggccccctggctccccgtgtgctccatggttgtccagtacgcctcccagatccccagctcacgccagacacagcctgtcctccagtcccaggtggagaacctgctccacagaacctactgtaggtggaagagcaagagtccctccccagtccatggggcaggcccctcggtcatggagatcccatgggatgatcttatcgccttgtgtatcaaccacaagctgagagactggacgcccccccggcttcctgttacatcagaggcgctgagtgaagatggtcagatatgtgtgtatttttttaaaaacgatttgaaaaaatatgatgttcctttgtcgtgggaacaagccaggttgcagacgcagaaggagctacagctgagagagggacgtttggcaataaagccttttcatccttctgcaaacaattttcccataccattgcttcacatgcaccgtaactggaagaggagcacagagtgtgctcaagaggggaggattcccagcacagaggatctgatgcgaggagcttctgctgaggagctcttggcgcagtgtttgtcgagcagtctgctgctggagaaagaagagaacaagaggtttgaagatcagcttcagcaatggttgtctgaagactcaggagcatttacggatttaacttcccttcccctctatcttcctcagactctagtgtctctttctcacactattgaacctgtgatgaaaacatctgtaactactagcccacagagtgacatgatgagggagcaactgcagctgtcagaggcgacaggaacgtgtctaggcgaacgactaaagcacctggaaaggctgatccggagttcaagggaagaggaagttgcctctgagctccatctctctgcgctgctagacatggtggacatttgagcagcctgacctgtggggagggggtctctcccgaagagtttctgtttttactcaaaataatgttattctcagatgcttgatgcactgttggaaatgtgattaatttaatcatgcagataaaccatttaaatgtca

SEQ ID NO: 406020 - DNA, 3894 bp, Homo sapiens
aaggctcttgttagaatgccgtgaacagttgtctccaactattatatgtcattccacgggattggtttcctgctggcattccatggtctccggggtcctctgcagcaccttcctggccttttgtcatgtggatgctgcacagctgacttcacctggtcttgttgatggacagtttgtttcatgatttctcttatgaataaaaccttcacaagccatccttctctatgagagtgtttgcttggcacgcattcctgagcactgcccctgagcagaccgcctatgatctctaagcttgggttccgtgttgccaaagcgccttctggtggactcagcccaggaggagcccatgtgccccacgctggccatggctgtggtcatgggctgactgcatgtgtctgactgggccttcgtctgagactgcagtgatttcgctcctcctctcagatccgcaaggatgctctccgggcgctcaactttgcgtacacggtgagcacacagcgatctaccatctttcccctggatggtgtggtgcgcatgctgctgttcagagactgtgaagaggccaccgacttcctcacctgccacggcctcaccgtttccgacggctgtgtggagctgaaccggtctgcattcctggaaccagagggattatccaagaccaggaagtcggtgtttattactaggaagctgacggtgtcagtcggggaaattgtgaacggagggccattgccccccgtccctcgtcatacccctgtgtgcagcttcaactcccagaacaagtacatcggggagagcctggccgcggagctgcccgtcagcacccagagacccggctccgacacagtgggcggagggagaggagaggagtgtggtgtagagccggatgcacccctgtccagtctcccacagtctctaccagcccctgcgccctcaccagtgcctctgcctcctgtcctggcactgaccccgtctgtggcgcccagcctcttccagctgtctgtgcagcctgaaccaccgcctccagagcccgtgcccatgtactctgacgaggacctggcgcaggtggtggacgagctcatccaggaggccctgcagagggactgtgaggaagttggctctgcgggtgctgcctacgcagctgccgccctgggtgtttctaatgctgctatggaggatttgttaacagctgcaaccacgggcattttgaggcacattgcagctgaagaagtgtctaaggaaagagagcgaagggagcaggagaggcagcgggctgaagaggaaaggttgaaacaagagagagagctggtgttaagtgagctgagccagggcctggccgtggagctgatggaacgcgtgatgatggagtttgtgagggaaacctgctcccaggagttgaagaatgcagtagagacagaccagagggtccgtgtggcccgttgctgtgaggatgtctgtgcccacttagtggacttgtttctcgtggaggaaatcttccagactgcaaaggagaccctccaggagcttcagtgcttctgcaagtatctacagcggtggagggaagctgtcacagcccgcaagaaactgaggcgccaaatgcgggctttccctgctgcgccctgctgcgtggacgtgagcgaccggctgagggcgctggcgcccagcgcagagtgccccattgctgaagagaacctggccaggggcctcctggacctgggccatgcagggagattgggcatctcctgcaccaggttaaggcggctcagaaacaagacagctcaccagatgaaggttcagcacttctaccagcagctgctgagtgatgtggcatgggcgtctctggacctgccatccctcgtggctgagcacctccctgggaggcaggagcatgtgttttggaagctggtgctggtgttgccggatgtagaggagcagtccccagagagttgtggcagaattctagcaaattggttaaaagtcaagttcatgggagatgaaggctcagtggatgacacatccagcgatgctggtgggattcagacgctttcgcttttcaactcacttagcagcaaaggggatcagatgatttctgttaacgtgtgtataaaggtggcccatggcgccctcagtgatggtgccattgatgctgtggagacacagaaggacctcctgggagccagtgggctcatgctgctgcttccccccaaaatgaagagtgaggacatggcagaggaggacgtgtactggctgtcggccttgctgcagctcaagcagctcctgcaggctaagcccttccagcctgcgcttcctctggtggttcttgtgcctagcccaggaggggacgccgttgagaaggaagtagaagatggtctgatgctacaggacttggtttcagctaagctgatttcagattacactgttaccgagatccctgataccattaatgatctacaaggttcaactaaggttttgcaagcagtgcagtggctggtttcccactgcccccattcccttgacctctgctgccagactctcattcagtacgtcgaagacgggattggccatgagtttagtggccgctttttccatgacagaagagagaggcgtctgggcggtcttgcttctcaggagcctggcgccatcattgagctgtttaacagtgtgctgcagttcctggcttctgtggtgtcctctgaacagctgtgtgacctgtcctggcctgtcactgagtttgctgaggcagggggcagccggctgcttcctcacctgcactggaatgccccagagcacctggcctggctgaagcaggctgtgctcgggttccagcttccgcagatggaccttccacccctgggggccccctggctccccgtgtgctccatggttgtccagtacgcctcccagatccccagctcacgccagacacagcctgtcctccagtcccaggtggagaacctgctccacagaacctactgtaggtggaagagcaagagtccctccccagtccatggggcaggcccctcggtcatggagatcccatgggatgatcttatcgccttgtgtatcaaccacaagctgagagactggacgcccccccggcttcctgttacatcagaggcgctgagtgaagatggtcagatatgtgtgtatttttttaaaaacgatttgaaaaaatatgatgttcctttgtcgtgggaacaagccaggttgcagacgcagaaggagctacagctgagagagggacgtttggcaataaagccttttcatccttctgcaaacaattttcccataccattgcttcacatgcaccgtaactggaagaggagcacagagtgtgctcaagaggggaggattcccagcacagaggatctgatgcgaggagcttctgctgaggagctcttggcgcagtgtttgtcgagcagtctgctgctggagaaagaagagaacaagaggtttgaagatcagcttcagcaatggttgtctgaagactcaggagcatttacggatttaacttcccttcccctctatcttcctcagactctagtgtctctttctcacactattgaacctgtgatgaaaacatctgtaactactagcccacagagtgacatgatgagggagcaactgcagctgtcagaggcgacaggaacgtgtctaggcgaacgactaaagcacctggaaaggctgatccggagttcaagggaagaggaagttgcctctgagctccatctctctgcgctgctagacatggtggacatttgagcagcctgacctgtggggagggggtctctcccgaagagtttctgtttttactcaaaataatgttattctcagatgcttgatgcactgttggaaatgtgattaatttaatcatgcagataaaccatttaaatgtca

SEQ ID NO: 406021 - DNA, 3318 bp, Homo sapiens
acgaatattataggtccggtccctggtttaatttcgtacggggctggtcttggtatccagataggagttactcctaaggactcacagaagtcggtgtttattactaggaagctgacggtgtcagtcggggaaattgtgaacggagggccattgccccccgtccctcgtcatacccctgtgtgcagcttcaactcccagaacaagtacatcggggagagcctggccgcggagctgcccgtcagcacccagagacccggctccgacacagtgggcggagggagaggagaggagtgtggtgtagagccggatgcacccctgtccagtctcccacagtctctaccagcccctgcgccctcaccagtgcctctgcctcctgtcctggcactgaccccgtctgtggcgcccagcctcttccagctgtctgtgcagcctgaaccaccgcctccagagcccgtgcccatgtactctgacgaggacctggcgcaggtggtggacgagctcatccaggaggccctgcagagggactgtgaggaagttggctctgcgggtgctgcctacgcagctgccgccctgggtgtttctaatgctgctatggaggatttgttaacagctgcaaccacgggcattttgaggcacattgcagctgaagaagtgtctaaggaaagagagcgaagggagcaggagaggcagcgggctgaagaggaaaggttgaaacaagagagagagctggtgttaagtgagctgagccagggcctggccgtggagctgatggaacgcgtgatgatggagtttgtgagggaaacctgctcccaggagttgaagaatgcagtagagacagaccagagggtccgtgtggcccgttgctgtgaggatgtctgtgcccacttagtggacttgtttctcgtggaggaaatcttccagactgcaaaggagaccctccaggagcttcagtgcttctgcaagtatctacagcggtggagggaagctgtcacagcccgcaagaaactgaggcgccaaatgcgggctttccctgctgcgccctgctgcgtggacgtgagcgaccggctgagggcgctggcgcccagcgcagagtgccccattgctgaagagaacctggccaggggcctcctggacctgggccatgcagggagattgggcatctcctgcaccaggttaaggcggctcagaaacaagacagctcaccagatgaaggttcagcacttctaccagcagctgctgagtgatgtggcatgggcgtctctggacctgccatccctcgtggctgagcacctccctgggaggcaggagcatgtgttttggaagctggtgctggtgttgccggatgtagaggagcagtccccagagagttgtggcagaattctagcaaattggttaaaagtcaagttcatgggagatgaaggctcagtggatgacacatccagcgatgctggtgggattcagacgctttcgcttttcaactcacttagcagcaaaggggatcagatgatttctgttaacgtgtgtataaaggtggcccatggcgccctcagtgatggtgccattgatgctgtggagacacagaaggacctcctgggagccagtgggctcatgctgctgcttccccccaaaatgaagagtgaggacatggcagaggaggacgtgtactggctgtcggccttgctgcagctcaagcagctcctgcaggctaagcccttccagcctgcgcttcctctggtggttcttgtgcctagcccaggaggggacgccgttgagaaggaagtagaagatggtctgatgctacaggacttggtttcagctaagctgatttcagattacactgttaccgagatccctgataccattaatgatctacaaggttcaactaaggttttgcaagcagtgcagtggctggtttcccactgcccccattcccttgacctctgctgccagactctcattcagtacgtcgaagacgggattggccatgagtttagtggccgctttttccatgacagaagagagaggcgtctgggcggtcttgcttctcaggagcctggcgccatcattgagctgtttaacagtgtgctgcagttcctggcttctgtggtgtcctctgaacagctgtgtgacctgtcctggcctgtcactgagtttgctgaggcagggggcagccggctgcttcctcacctgcactggaatgccccagagcacctggcctggctgaagcaggctgtgctcgggttccagcttccgcagatggaccttccacccctgggggccccctggctccccgtgtgctccatggttgtccagtacgcctcccagatccccagctcacgccagacacagcctgtcctccagtcccaggtggagaacctgctccacagaacctactgtaggtggaagagcaagagtccctccccagtccatggggcaggcccctcggtcatggagatcccatgggatgatcttatcgccttgtgtatcaaccacaagctgagagactggacgcccccccggcttcctgttacatcagaggcgctgagtgaagatggtcagatatgtgtgtatttttttaaaaacgatttgaaaaaatatgatgttcctttgtcgtgggaacaagccaggttgcagacgcagaaggagctacagctgagagagggacgtttggcaataaagccttttcatccttctgcaaacaattttcccataccattgcttcacatgcaccgtaactggaagaggagcacagagtgtgctcaagaggggaggattcccagcacagaggatctgatgcgaggagcttctgctgaggagctcttggcgcagtgtttgtcgagcagtctgctgctggagaaagaagagaacaagaggtttgaagatcagcttcagcaatggttgtctgaagactcaggagcatttacggatttaacttcccttcccctctatcttcctcagactctagtgtctctttctcacactattgaacctgtgatgaaaacatctgtaactactagcccacagagtgacatgatgagggagcaactgcagctgtcagaggcgacaggaacgtgtctaggcgaacgactaaagcacctggaaaggctgatccggagttcaagggaagaggaagttgcctctgagctccatctctctgcgctgctagacatggtggacatttgagcagcctgacctgtggggagggggtctctcccgaagagtttctgtttttactcaaaataatgttattctcagatgcttgatgcactgttggaaatgtgattaatttaatcatgcagataaaccatttaaatgtca

SEQ ID NO: 406022 - DNA, 3313 bp, Homo sapiens
aagagatgtagcaggcgttccccgttttatttcagttcatcgggctggtgcttgttgtaaataacatagtgcccgctagcctgacaataacatgtatactaggaagctgacggtgtcagtcggggaaattgtgaacggagggccattgccccccgtccctcgtcatacccctgtgtgcagcttcaactcccagaacaagtacatcggggagagcctggccgcggagctgcccgtcagcacccagagacccggctccgacacagtgggcggagggagaggagaggagtgtggtgtagagccggatgcacccctgtccagtctcccacagtctctaccagcccctgcgccctcaccagtgcctctgcctcctgtcctggcactgaccccgtctgtggcgcccagcctcttccagctgtctgtgcagcctgaaccaccgcctccagagcccgtgcccatgtactctgacgaggacctggcgcaggtggtggacgagctcatccaggaggccctgcagagggactgtgaggaagttggctctgcgggtgctgcctacgcagctgccgccctgggtgtttctaatgctgctatggaggatttgttaacagctgcaaccacgggcattttgaggcacattgcagctgaagaagtgtctaaggaaagagagcgaagggagcaggagaggcagcgggctgaagaggaaaggttgaaacaagagagagagctggtgttaagtgagctgagccagggcctggccgtggagctgatggaacgcgtgatgatggagtttgtgagggaaacctgctcccaggagttgaagaatgcagtagagacagaccagagggtccgtgtggcccgttgctgtgaggatgtctgtgcccacttagtggacttgtttctcgtggaggaaatcttccagactgcaaaggagaccctccaggagcttcagtgcttctgcaagtatctacagcggtggagggaagctgtcacagcccgcaagaaactgaggcgccaaatgcgggctttccctgctgcgccctgctgcgtggacgtgagcgaccggctgagggcgctggcgcccagcgcagagtgccccattgctgaagagaacctggccaggggcctcctggacctgggccatgcagggagattgggcatctcctgcaccaggttaaggcggctcagaaacaagacagctcaccagatgaaggttcagcacttctaccagcagctgctgagtgatgtggcatgggcgtctctggacctgccatccctcgtggctgagcacctccctgggaggcaggagcatgtgttttggaagctggtgctggtgttgccggatgtagaggagcagtccccagagagttgtggcagaattctagcaaattggttaaaagtcaagttcatgggagatgaaggctcagtggatgacacatccagcgatgctggtgggattcagacgctttcgcttttcaactcacttagcagcaaaggggatcagatgatttctgttaacgtgtgtataaaggtggcccatggcgccctcagtgatggtgccattgatgctgtggagacacagaaggacctcctgggagccagtgggctcatgctgctgcttccccccaaaatgaagagtgaggacatggcagaggaggacgtgtactggctgtcggccttgctgcagctcaagcagctcctgcaggctaagcccttccagcctgcgcttcctctggtggttcttgtgcctagcccaggaggggacgccgttgagaaggaagtagaagatggtctgatgctacaggacttggtttcagctaagctgatttcagattacactgttaccgagatccctgataccattaatgatctacaaggttcaactaaggttttgcaagcagtgcagtggctggtttcccactgcccccattcccttgacctctgctgccagactctcattcagtacgtcgaagacgggattggccatgagtttagtggccgctttttccatgacagaagagagaggcgtctgggcggtcttgcttctcaggagcctggcgccatcattgagctgtttaacagtgtgctgcagttcctggcttctgtggtgtcctctgaacagctgtgtgacctgtcctggcctgtcactgagtttgctgaggcagggggcagccggctgcttcctcacctgcactggaatgccccagagcacctggcctggctgaagcaggctgtgctcgggttccagcttccgcagatggaccttccacccctgggggccccctggctccccgtgtgctccatggttgtccagtacgcctcccagatccccagctcacgccagacacagcctgtcctccagtcccaggtggagaacctgctccacagaacctactgtaggtggaagagcaagagtccctccccagtccatggggcaggcccctcggtcatggagatcccatgggatgatcttatcgccttgtgtatcaaccacaagctgagagactggacgcccccccggcttcctgttacatcagaggcgctgagtgaagatggtcagatatgtgtgtatttttttaaaaacgatttgaaaaaatatgatgttcctttgtcgtgggaacaagccaggttgcagacgcagaaggagctacagctgagagagggacgtttggcaataaagccttttcatccttctgcaaacaattttcccataccattgcttcacatgcaccgtaactggaagaggagcacagagtgtgctcaagaggggaggattcccagcacagaggatctgatgcgaggagcttctgctgaggagctcttggcgcagtgtttgtcgagcagtctgctgctggagaaagaagagaacaagaggtttgaagatcagcttcagcaatggttgtctgaagactcaggagcatttacggatttaacttcccttcccctctatcttcctcagactctagtgtctctttctcacactattgaacctgtgatgaaaacatctgtaactactagcccacagagtgacatgatgagggagcaactgcagctgtcagaggcgacaggaacgtgtctaggcgaacgactaaagcacctggaaaggctgatccggagttcaagggaagaggaagttgcctctgagctccatctctctgcgctgctagacatggtggacatttgagcagcctgacctgtggggagggggtctctcccgaagagtttctgtttttactcaaaataatgttattctcagatgcttgatgcactgttggaaatgtgattaatttaatcatgcagataaaccatttaaatgtca

SEQ ID NO: 406023 - DNA, 7781 bp, Homo sapiens
ggcagcgcgggcctcggggtcctggggcgagacggtgagcgtgggggctgggccggcgccaggggcgccgtttccttcccccacgcagctccgcgcgcccgggcctccacatcgtcgctaacggagcgttgcggcgccggcgacccctggcgagcccggggcgggacagtggccaggccggcctgggcccagcgcgtggcctccgccgtttcgggctgtgctgggtggaagattaggctccccgggcacgccgtccccgccgagaggcctcagcttcgtggcagcgccctcgtccttccagcccgctcgagggtggccgccagggcgcgatgaaggaatgtgagaaagtgcttagcgctccagccgctccgagggaagccaggtgggaggagatcccgaaacgctaaggttttgacagcgttacagtgaattctccggctgtagagattggaggaagtcgggagaaattcgtctctaagttgtaagcttgttctaaagacgaaggggaactccctagtgctacaggctgtttcaggaagccaattaattttgtacacgtaatacttaattaccttctaataattggagcagaagatgaacccaactaatcctttcagtgggcagcagcctagtgctttttcggcgtcttctagtaatgtaggaacacttccatctaagccgccatttcgatttggtcaaccttctctttttggacaaaacagtaccttatctgggaagagctcgggattttcacaggtatccagctttccagcgtcttctggagtaagtcattcctcttcagtgcaaacattagggttcacccaaacctcaagtgttggacccttttctggacttgagcacacttccacctttgtggctacctctgggccttcaagttcatctgtgctgggaaacacaggatttagttttaaatcacccaccagtgttggggctttcccaagcacttctgcttttggacaagaagctggagaaatagtgaactctggttttgggaaaacagaattcagctttaaacctctggaaaatgcagtgttcaaaccaatactgggggctgaatctgagccagagaaaacccagagccaaattgcttctgggttttttacattttcccacccaattagtagtgcacctggaggcctggcccctttctcttttcctcaagtaacaagtagttcagctaccacttcaaattttaccttttcaaaacctgttagtagtaataattcattatctgcctttacccctgctttgtcaaaccaaaatgtagaggaagagaagagaggacctaagtcaatatttggaagttctaataatagcttcagtagcttccctgtatcatctgcggttttgggcgaacctttccaggctagcaaagcaggtgtcaggcaggggtgtgaagaagctgtttcccaggtggaaccacttcccagcctaatgaaaggactgaaaaggaaggaggaccaggatcgctccccaaggagacatggccacgagccagcagaagattcggatcctctgtcccggggcgatcatcctccagacaaacgacctgtccgcctgaatcgaccccggggaggtactttatttggtcggacgatacaggatgttttcaaaagcaataaggaagtaggtcgtctgggcaacaaggaggccaaaaaggaaactggctttgttgagtctgcagaaagtgaccacatggctatcccaggagggaatcagtctgtcctggcaccttcccggattccaggtgtgaataaagaggaagaaactgaaagtagagagaagaaagaagattctctaagaggaactccggcgcgtcagagtaacagaagcgagagcacagacagtcttgggggcttgtctccctctgaagtcacagccatccagtgcaagaatatccctgactacctcaacgacaggaccattctggagaaccattttggcaaaattgctaaagtgcagcgcatctttaccaggcgcagcaaaaagcttgcagtggtacatttctttgatcatgcatctgcagccctggctagaaagaaggggaaaagtttgcataaagacatggctatcttttggcacaggaagaaaataagccccaataagaaacccttttccctgaaggagaagaaaccaggtgacggtgaagtcagcccgagcacagaggatgcaccctttcagcactctcctcttggcaaggccgcagggaggactggtgctagcagcctcctgaataaaagctctccagtgaagaagccaagtcttctaaaggcccaccaattcgagggagactcttttgactcagcctccgagggctccgagggcctcgggccatgtgtgctctccctcagtaccctgataggcactgtggctgagacatccaaggagaagtaccgcctgcttgaccagagagacaggatcatgcggcaagctcgggtgaagagaaccgatctggacaaagcgaggacttttgttggcacctgcctggatatgtgtcctgagaaggagaggtacatgcgggagacccgtagccagctgagcgtgttcgaagtggtcccagggactgaccaggtggaccacgcagcagctgtgaaagagtacagtcggtcctcggcggatcaggaggagcccctgccccacgagctgcggcccttgccagtgctcagcaggaccatggactacctggtgacccagatcatggaccagaaggagggcagcctgcgggattggtatgacttcgtgtggaaccgcacgcgtggcatacggaaggatatcacgcagcagcacctctgtgaccccctgacggtgtccctgattgagaagtgcacccggtttcacatccactgtgcccacttcatgtgtgaggagcccatgtcctcctttgatgccaagatcaataatgagaacatgaccaagtgcctgcagagcctgaaggagatgtaccaggacctgagaaacaagggtgtcttctgtgccagcgaagcggagttccagggctacaatgttctgctcagtctcaacaagggagacatcctaagagaagtacaacagttccatcctgctgttagaaactcatctgaggtgaaatttgctgttcaggcttttgctgcattgaacagtaataattttgtgagatttttcaaactggtccagtcagcttcttacctgaacgcttgtcttttacactgttacttcagtcagatccgcaaggatgctctccgggcgctcaactttgcgtacacggtgagcacacagcgatctaccatctttcccctggatggtgtggtgcgcatgctgctgttcagagactgtgaagaggccaccgacttcctcacctgccacggcctcaccgtttccgacggctgtgtggagctgaaccggtctgcattcctggaaccagagggattatccaagaccaggaagtcggtgtttattactaggaagctgacggtgtcagtcggggaaattgtgaacggagggccattgccccccgtccctcgtcatacccctgtgtgcagcttcaactcccagaacaagtacatcggggagagcctggccgcggagctgcccgtcagcacccagagacccggctccgacacagtgggcggagggagaggagaggagtgtggtgtagagccggatgcacccctgtccagtctcccacagtctctaccagcccctgcgccctcaccagtgcctctgcctcctgtcctggcactgaccccgtctgtggcgcccagcctcttccagctgtctgtgcagcctgaaccaccgcctccagagcccgtgcccatgtactctgacgaggacctggcgcaggtggtggacgagctcatccaggaggccctgcagagggactgtgaggaagttggctctgcgggtgctgcctacgcagctgccgccctgggtgtttctaatgctgctatggaggatttgttaacagctgcaaccacgggcattttgaggcacattgcagctgaagaagtgtctaaggaaagagagcgaagggagcaggagaggcagcgggctgaagaggaaaggttgaaacaagagagagagctggtgttaagtgagctgagccagggcctggccgtggagctgatggaacgcgtgatgatggagtttgtgagggaaacctgctcccaggagttgaagaatgcagtagagacagaccagagggtccgtgtggcccgttgctgtgaggatgtctgtgcccacttagtggacttgtttctcgtggaggaaatcttccagactgcaaaggagaccctccaggagcttcagtgcttctgcaagtatctacagcggtggagggaagctgtcacagcccgcaagaaactgaggcgccaaatgcgggctttccctgctgcgccctgctgcgtggacgtgagcgaccggctgagggcgctggcgcccagcgcagagtgccccattgctgaagagaacctggccaggggcctcctggacctgggccatgcagggagattgggcatctcctgcaccaggttaaggcggctcagaaacaagacagctcaccagatgaaggttcagcacttctaccagcagctgctgagtgatgtggcatgggcgtctctggacctgccatccctcgtggctgagcacctccctgggaggcaggagcatgtgttttggaagctggtgctggtgttgccggatgtagaggagcagtccccagagagttgtggcagaattctagcaaattggttaaaagtcaagttcatgggagatgaaggctcagtggatgacacatccagcgatgctggtgggattcagacgctttcgcttttcaactcacttagcagcaaaggggatcagatgatttctgttaacgtgtgtataaaggtggcccatggcgccctcagtgatggtgccattgatgctgtggagacacagaaggacctcctgggagccagtgggctcatgctgctgcttccccccaaaatgaagagtgaggacatggcagaggaggacgtgtactggctgtcggccttgctgcagctcaagcagctcctgcaggctaagcccttccagcctgcgcttcctctggtggttcttgtgcctagcccaggaggggacgccgttgagaaggaagtagaagatggtctgatgctacaggacttggtttcagctaagctgatttcagattacactgttaccgagatccctgataccattaatgatctacaaggttcaactaaggtaaggtttcatcatttttaatggtctgtcaagatattttgttttttccccttttgctgtatcttgaattgagtgtatattagcgtttgcattgtctttttcttaagagacagggttttattgtcacccagtatagtggcatgatgatagctccctgcaacctcaaactacagggctcatgcaatcttcccacttcagtctcccaagtatatgggactactgtggtgtgccactgcgcctggcagcagttgtatgttttatacagataactttctaaaaacataagcagaaatcaaaataaaagataaaatttgcccacagtcctgctatctgcaaattaaattgttcatgtaaaattttttagtgtttttgtttctatgaatttaaaatatgaacatgtcttatatctgaaggtcagatacagaagttatttttctagggtaattgtcctctgaatatatgaagaaataatgttatttgatgtttcctttaaaaaggaagtctgaagctgggcgtggtggctcctcgcacctgtagtctctgctactcggaggctgaagcaggaggactgcttgagctcaggagtttgagaccagcctggccaacatagcaagacccccttctcaaaaacaaaaaaaatagggcagggggagtctttgctaacaatttagagaaagaggtgccaggaattaaaataactataggaagtaagataaccatagggtgtgaaggcaccttggcacatagtgaagctgttagtccttccaaaaaggagaagactccatttctgtgcatggtgaaggggatgttcagggctggtttcctgagggcctgggcctttccatggggcaaccatgcaggtcacactcctcctcaggccaggtgggatctgggggctctctttagtgcccctactggacatgtctccagagccctagaaggctaaactcaactgcataggacacttctgttccccttcctaccacagttgagagcccagtactctggtattacctgctgtgggcaaccttgggggatcaagccctttcagaaagctgtttttgaaaaacagtgtgaattgttcaaccaagtctcttctttcttctcaggttttgcaagcagtgcagtggctggtttcccactgcccccattcccttgacctctgctgccagactctcattcagtacgtcgaagacgggattggccatgagtttagtggccgctttttccatgacagaagagagaggcgtctgggcggtcttgcttctcaggagcctggcgccatcattgagctgtttaacagtgtgctgcagttcctggcttctgtggtgtcctctgaacagctgtgtgacctgtcctggcctgtcactgagtttgctgaggcagggggcagccggctgcttcctcacctgcactggaatgccccagagcacctggcctggctgaagcaggctgtgctcgggttccagcttccgcagatggaccttccacccctgggggccccctggctccccgtgtgctccatggttgtccagtacgcctcccagatccccagctcacgccagacacagcctgtcctccagtcccaggtggagaacctgctccacagaacctactgtaggtggaagagcaagagtccctccccagtccatggggcaggcccctcggtcatggagatcccatgggatgatcttatcgccttgtgtatcaaccacaagctgagagactggacgcccccccggcttcctgttacatcagaggcgctgagtgaagatggtcagatatgtgtgtatttttttaaaaacgatttgaaaaaatatgatgttcctttgtcgtgggaacaagccaggttgcagacgcagaaggagctacagctgagagagggacgtttggcaataaagccttttcatccttctgcaaacaattttcccataccattgcttcacatgcaccgtaactggaagaggagcacagagtgtgctcaagaggggaggattcccagcacagaggatctgatgcgaggagcttctgctgaggagctcttggcgcagtgtttgtcgagcagtctgctgctggagaaagaagagaacaagaggtttgaagatcagcttcagcaatggttgtctgaagactcaggagcatttacggatttaacttcccttcccctctatcttcctcagactctagtgtctctttctcacactattgaacctgtgatgaaaacatctgtaactactagcccacagagtgacatgatgagggagcaactgcagctgtcagaggcgacaggaacgtgtctaggcgaacgactaaagcacctggaaaggctgatccggagttcaagggaagaggaagttgcctctgagctccatctctctgcgctgctagacatggtggacatttgagcagcctgacctgtggggagggggtctctcccgaagagtttctgtttttactcaaaataatgttattctcagatgcttgatgcactgttggaaatgtgattaatttaatcatgcagataaaccatttaaatgtca

SEQ ID NO: 406024 - DNA, 3029 bp, Homo sapiens
  misc_feature (2870)..(2870): n is a, c, g, or t
tgagacggagtctcgctctgtcgtccaggctggagtgcagtggcgcgatctctgctcactgcaagctctgcctcccggcttcacgtcattctcctgcttcagcctcccgagtagctgggaccacaggcgcccgccaccacaccaggctaatttttttgtatttttagtagagacagggtttcaccatgttagccaggatcgtctggatctcttgacctcatgatccacccgcttcggccttccaaagtgctgggattacaggcgtgagccaccgcgcctgactgactcttgcacttttcaagcaagccctcagtgtctgtgggccccaagtgcagtgtcttccatgctgattgccctgtttctaggaatgcagtagagacagaccagagggtccgtgtggcccgttgctgtgaggatgtctgtgcccacttagtggacttgtttctcgtggaggaaatcttccagactgcaaaggagaccctccaggagcttcagtgcttctgcaagtatctacagcggtggagggaagctgtcacagcccgcaagaaactgaggcgccaaatgcgggctttccctgctgcgccctgctgcgtggacgtgagcgaccggctgagggcgctggcgcccagcgcagagtgccccattgctgaagagaacctggccaggggcctcctggacctgggccatgcagggagattgggcatctcctgcaccaggttaaggcggctcagaaacaagacagctcaccagatgaaggttcagcacttctaccagcagctgctgagtgatgtggcatgggcgtctctggacctgccatccctcgtggctgagcacctccctgggaggcaggagcatgtgttttggaagctggtgctggtgttgccggatgtagaggagcagtccccagagagttgtggcagaattctagcaaattggttaaaagtcaagttcatgggagatgaaggctcagtggatgacacatccagcgatgctggtgggattcagacgctttcgcttttcaactcacttagcagcaaaggggatcagatgatttctgttaacgtgtgtataaaggtggcccatggcgccctcagtgatggtgccattgatgctgtggagacacagaaggacctcctgggagccagtgggctcatgctgctgcttccccccaaaatgaagagtgaggacatggcagaggaggacgtgtactggctgtcggccttgctgcagctcaagcagctcctgcaggctaagcccttccagcctgcgcttcctctggtggttcttgtgcctagcccaggaggggacgccgttgagaaggaagtagaagatggtctgatgctacaggacttggtttcagctaagctgatttcagattacactgttaccgagatccctgataccattaatgatctacaaggttcaactaaggttttgcaagcagtgcagtggctggtttcccactgcccccattcccttgacctctgctgccagactctcattcagtacgtcgaagacgggattggccatgagtttagtggccgctttttccatgacagaagagagaggcgtctgggcggtcttgcttctcaggagcctggcgccatcattgagctgtttaacagtgtgctgcagttcctggcttctgtggtgtcctctgaacagctgtgtgacctgtcctggcctgtcactgagtttgctgaggcagggggcagccggctgcttcctcacctgcactggaatgccccagagcacctggcctggctgaagcaggctgtgctcgggttccagcttccgcagatggaccttccacccctgggggccccctggctccccgtgtgctccatggttgtccagtacgcctcccagatccccagctcacgccagacacagcctgtcctccagtcccaggtggagaacctgctccacagaacctactgtaggtggaagagcaagagtccctccccagtccatggggcaggcccctcggtcatggagatcccatgggatgatcttatcgccttgtgtatcaaccacaagctgagagactggacgcccccccggcttcctgttacatcagaggcgctgagtgaagatggtcagatatgtgtgtatttttttaaaaacgatttgaaaaaatatgatgttcctttgtcgtgggaacaagccaggttgcagacgcagaaggagctacagctgagagagggacgtttggcaataaagccttttcatccttctgcaaacaattttcccataccattgcttcacatgcaccgtaactggaagaggagcacagagtgtgctcaagaggggaggattcccagcacagaggatctgatgcgaggagcttctgctgaggagctcttggcgcagtgtttgtcgagcagtctgctgctggagaaagaagagaacaagaggtttgaagatcagcttcagcaatggttgtctgaagactcaggagcatttacggatttaacttcccttcccctctatcttcctcagactctagtgtctctttctcacactattgaacctgtgatgaaaacatctgtaactactagcccacagagtgacatgatgagggagcaactgcagctgtcagaggcgacaggaacgtgtctaggcgaacgactaaagcacctggaaaggctgatccggagttcaagggaagaggaagttgcctctgagctccatctctctgcgctgctagacatggtggacatttgagcagcctgacctgtggggagggggtctctcccgaagagtttctgtttttactcaaaataatgttattctcagatgcttgatgcactgttggaaatgtgattaatttaatcatgcagataaaccatttaaatgtcaaacaaaanaaaaaaaaacattgcggggcgcgccccaagatttcaaaaatcgtgggcggccagataaaatgcaagtcaaactcggcaacgggttccaaaaacgcggcggtgaaccagtctggtagtcaacgcacacaccagcgcgcggagacgaccaaaagatatacc

SEQ ID NO: 406025 - DNA, 1652 bp, Homo sapiens
gccggaccgacaacggcaccacgtggcagctcctgcaggctaagcccttccagcctgcgcttcctctggtggttcttgtgcctagcccaggaggggacgccgttgagaaggaagtagaagatggtctgatgctacaggacttggtttcagctaagctgatttcagattacactgttaccgagatccctgataccattaatgatctacaaggttcaactaaggttttgcaagcagtgcagtggctggtttcccactgcccccattcccttgacctctgctgccagactctcattcagtacgtcgaagacgggattggccatgagtttagtggccgctttttccatgacagaagagagaggcgtctgggcggtcttgcttctcaggagcctggcgccatcattgagctgtttaacagtgtgctgcagttcctggcttctgtggtgtcctctgaacagctgtgtgacctgtcctggcctgtcactgagtttgctgaggcagggggcagccggctgcttcctcacctgcactggaatgccccagagcacctggcctggctgaagcaggctgtgctcgggttccagcttccgcagatggaccttccacccctgggggccccctggctccccgtgtgctccatggttgtccagtacgcctcccagatccccagctcacgccagacacagcctgtcctccagtcccaggtggagaacctgctccacagaacctactgtaggtggaagagcaagagtccctccccagtccatggggcaggcccctcggtcatggagatcccatgggatgatcttatcgccttgtgtatcaaccacaagctgagagactggacgcccccccggcttcctgttacatcagaggcgctgagtgaagatggtcagatatgtgtgtatttttttaaaaacgatttgaaaaaatatgatgttcctttgtcgtgggaacaagccaggttgcagacgcagaaggagctacagctgagagagggacgtttggcaataaagccttttcatccttctgcaaacaattttcccataccattgcttcacatgcaccgtaactggaagaggagcacagagtgtgctcaagaggggaggattcccagcacagaggatctgatgcgaggagcttctgctgaggagctcttggcgcagtgtttgtcgagcagtctgctgctggagaaagaagagaacaagaggtttgaagatcagcttcagcaatggttgtctgaagactcaggagcatttacggatttaacttcccttcccctctatcttcctcagactctagtgtctctttctcacactattgaacctgtgatgaaaacatctgtaactactagcccacagagtgacatgatgagggagcaactgcagctgtcagaggcgacaggaacgtgtctaggcgaacgactaaagcacctggaaaggctgatccggagttcaagggaagaggaagttgcctctgagctccatctctctgcgctgctagacatggtggacatttgagcagcctgacctgtggggagggggtctctcccgaagagtttctgtttttactcaaaataatgttattctcagatgcttgatgcactgttggaaatgtgattaatttaatcatgcagataaaccatttaaatgtca

SEQ ID NO: 406026 - DNA, 8133 bp, Homo sapiens
ggcagcgcgggcctcggggtcctggggcgagacggtgagcgtgggggctgggccggcgccaggggcgccgtttccttcccccacgcagctccgcgcgcccgggcctccacatcgtcgctaacggagcgttgcggcgccggcgacccctggcgagcccggggcgggacagtggccaggccggcctgggcccagcgcgtggcctccgccgtttcgggctgtgctgggtggaagattaggctccccgggcacgccgtccccgccgagaggcctcagcttcgtggcagcgccctcgtccttccagcccgctcgagggtggccgccagggcgcgatgaaggaatgtgagaaagtgcttagcgctccagccgctccgagggaagccaggtgggaggagatcccgaaacgctaaggttttgacagcgttacagtgaattctccggctgtagagattggaggaagtcgggagaaattcgtctctaagttgtaagcttgttctaaagacgaaggggaactccctagtgctacaggctgtttcaggaagccaattaattttgtacacgtaatacttaattaccttctaataattggagcagaagatgaacccaactaatcctttcagtgggcagcagcctagtgctttttcggcgtcttctagtaatgtaggaacacttccatctaagccgccatttcgatttggtcaaccttctctttttggacaaaacagtaccttatctgggaagagctcgggattttcacaggtatccagctttccagcgtcttctggagtaagtcattcctcttcagtgcaaacattagggttcacccaaacctcaagtgttggacccttttctggacttgagcacacttccacctttgtggctacctctgggccttcaagttcatctgtgctgggaaacacaggatttagttttaaatcacccaccagtgttggggctttcccaagcacttctgcttttggacaagaagctggagaaatagtgaactctggttttgggaaaacagaattcagctttaaacctctggaaaatgcagtgttcaaaccaatactgggggctgaatctgagccagagaaaacccagagccaaattgcttctgggttttttacattttcccacccaattagtagtgcacctggaggcctggcccctttctcttttcctcaagtaacaagtagttcagctaccacttcaaattttaccttttcaaaacctgttagtagtaataattcattatctgcctttacccctgctttgtcaaaccaaaatgtagaggaagagaagagaggacctaagtcaatatttggaagttctaataatagcttcagtagcttccctgtatcatctgcggttttgggcgaacctttccaggctagcaaagcaggtgtcaggcaggggtgtgaagaagctgtttcccaggtggaaccacttcccagcctaatgaaaggactgaaaaggaaggaggaccaggatcgctccccaaggagacatggccacgagccagcagaagattcggatcctctgtcccggggcgatcatcctccagacaaacgacctgtccgcctgaatcgaccccggggaggtactttatttggtcggacgatacaggatgttttcaaaagcaataaggaagtaggtcgtctgggcaacaaggaggccaaaaaggaaactggctttgttgagtctgcagaaagtgaccacatggctatcccaggagggaatcagtctgtcctggcaccttcccggattccaggtgtgaataaagaggaagaaactgaaagtagagagaagaaagaagattctctaagaggaactccggcgcgtcagagtaacagaagcgagagcacagacagtcttgggggcttgtctccctctgaagtcacagccatccagtgcaagaatatccctgactacctcaacgacaggaccattctggagaaccattttggcaaaattgctaaagtgcagcgcatctttaccaggcgcagcaaaaagcttgcagtggtacatttctttgatcatgcatctgcagccctggctagaaagaaggggaaaagtttgcataaagacatggctatcttttggcacaggaagaaaataagccccaataagaaacccttttccctgaaggagaagaaaccaggtgacggtgaagtcagcccgagcacagaggatgcaccctttcagcactctcctcttggcaaggccgcagggaggactggtgctagcagcctcctgaataaaagctctccagtgaagaagccaagtcttctaaaggcccaccaattcgagggagactcttttgactcagcctccgagggctccgagggcctcgggccatgtgtgctctccctcagtaccctgataggcactgtggctgagacatccaaggagaagtaccgcctgcttgaccagagagacaggatcatgcggcaagctcgggtgaagagaaccgatctggacaaagcgaggacttttgttggcacctgcctggatatgtgtcctgagaaggagaggtacatgcgggagacccgtagccagctgagcgtgttcgaagtggtcccagggactgaccaggtggaccacgcagcagctgtgaaagagtacagtcggtcctcggcggatcaggaggagcccctgccccacgagctgcggcccttgccagtgctcagcaggaccatggactacctggtgacccagatcatggaccagaaggagggcagcctgcgggattggtatgacttcgtgtggaaccgcacgcgtggcatacggaaggatatcacgcagcagcacctctgtgaccccctgacggtgtccctgattgagaagtgcacccggtttcacatccactgtgcccacttcatgtgtgaggagcccatgtcctcctttgatgccaagatcaataatgagaacatgaccaagtgcctgcagagcctgaaggagatgtaccaggacctgagaaacaagggtgtcttctgtgccagcgaagcggagttccagggctacaatgttctgctcagtctcaacaagggagacatcctaagagaagtacaacagttccatcctgctgttagaaactcatctgaggtgaaatttgctgttcaggcttttgctgcattgaacagtaataattttgtgagatttttcaaactggtccagtcagcttcttacctgaacgcttgtcttttacactgttacttcagtcagatccgcaaggatgctctccgggcgctcaactttgcgtacacggtgagcacacagcgatctaccatctttcccctggatggtgtggtgcgcatgctgctgttcagagactgtgaagaggccaccgacttcctcacctgccacggcctcaccgtttccgacggctgtgtggagctgaaccggtctgcattcctggaaccagagggattatccaagaccaggaagtcggtgtttattactaggaagctgacggtgtcagtcggggaaattgtgaacggagggccattgccccccgtccctcgtcatacccctgtgtgcagcttcaactcccagaacaagtacatcggggagagcctggccgcggagctgcccgtcagcacccagagacccggctccgacacagtgggcggagggagaggagaggagtgtggtgtagagccggatgcacccctgtccagtctcccacagtctctaccagcccctgcgccctcaccagtgcctctgcctcctgtcctggcactgaccccgtctgtggcgcccagcctcttccagctgtctgtgcagcctgaaccaccgcctccagagcccgtgcccatgtactctgacgaggacctggcgcaggtggtggacgagctcatccaggaggccctgcagagggactgtgaggaagttggctctgcgggtgctgcctacgcagctgccgccctgggtgtttctaatgctgctatggaggatttgttaacagctgcaaccacgggcattttgaggcacattgcagctgaagaagtgtctaaggaaagagagcgaagggagcaggagaggcagcgggctgaagaggaaaggttgaaacaagagagagagctggtgttaagtgagctgagccagggcctggccgtggagctgatggaacgcgtgatgatggagtttgtgagggaaacctgctcccaggagttgaagaatgcagtagagacagaccagagggtccgtgtggcccgttgctgtgaggatgtctgtgcccacttagtggacttgtttctcgtggaggaaatcttccagactgcaaaggagaccctccaggagcttcagtgcttctgcaagtatctacagcggtggagggaagctgtcacagcccgcaagaaactgaggcgccaaatgcgggctttccctgctgcgccctgctgcgtggacgtgagcgaccggctgagggcgctggcgcccagcgcagagtgccccattgctgaagagaacctggccaggggcctcctggacctgggccatgcagggagattgggcatctcctgcaccaggttaaggcggctcagaaacaagacagctcaccagatgaaggttcagcacttctaccagcagctgctgagtgatgtggcatgggcgtctctggacctgccatccctcgtggctgagcacctccctgggaggcaggagcatgtgttttggaagctggtgctggtgttgccggatgtagaggagcagtccccagagagttgtggcagaattctagcaaattggttaaaagtcaagttcatgggagatgaaggctcagtggatgacacatccagcgatgctggtgggattcagacgctttcgcttttcaactcacttagcagcaaaggggatcagatgatttctgttaacgtgtgtataaaggtggcccatggcgccctcagtgatggtgccattgatgctgtggagacacagaaggacctcctgggagccagtgggctcatgctgctgcttccccccaaaatgaagagtgaggacatggcagaggaggacgtgtactggctgtcggccttgctgcagctcaagcagctcctgcaggctaagcccttccagcctgcgcttcctctggtggttcttgtgcctagcccaggaggggacgccgttgagaaggaagtagaagatggtctgatgctacaggacttggtttcagctaagctgatttcagattacactgttaccgagatccctgataccattaatgatctacaaggttcaactaaggttttgcaagcagtgcagtggctggtttcccactgcccccattcccttgacctctgctgccagactctcattcagtacgtcgaagacgggattggccatgagtttagtggccgctttttccatgacagaagagagaggcgtctgggcggtcttgcttctcaggagcctggcgccatcattgagctgtttaacagtgtgctgcagttcctggcttctgtggtgtcctctgaacagctgtgtgacctgtcctggcctgtcactgagtttgctgaggcagggggcagccggctgcttcctcacctgcactggaatgccccagagcacctggcctggctgaagcaggctgtgctcgggttccagcttccgcagatggaccttccacccctgggggccccctggctccccgtgtgctccatggttgtccagtacgcctcccagatccccagctcacgccagacacagcctgtcctccagtcccaggtggagaacctgctccacagaacctactgtaggtggaagagcaagagtccctccccagtccatggggcaggcccctcggtcatggagatcccatgggatgatcttatcgccttgtgtatcaaccacaagctgagagactggacgcccccccggcttcctgttacatcagaggcgctgagtgaagatggtcagatatgtgtgtatttttttaaaaacgatttgaaaaaatatgatgttcctttgtcgtgggaacaagccaggttgcagacgcagaaggagctacagctgagagagggacgacggtgaggttcatgttcagtatgtttctgttgcttgctaaactgtatttttcttgcaaagtaaatagaaattaacatcctacatgccaaatccagtccactgtgggcagactgtgacaaatcctcaaggaacagatcattcccatgcagtagaaactattctagaacaaagttaaagcatctcacttcatttatcaggcatacctgaccctgaaatcatacctaaccaggagagtacagctgacatttcatctcacttccaaatttggttccaaagcacagtacctaaaaaagttcacaagtatgctttctcccaggataaacaataacagtgaaaatctattaatgtaatttgttgccataatagaaaaataagtggtaattttagcaggcgttgaaatacgtttcttaaaatttatacctgttcctgataaaatttctttattttgggtactttctttagcttgggttaaaaaaaaaaaaaaaaagtcctaacttgataaggctacctaacataaaactaccaaaatagaaaaaaaacatgcttcttggtagaatgttaggaacagtggaatcagaaccagcctgttgtcccgactattattcactattgtcctggaaatcctgaccagtacagggatgtgggatagacaggcacaaatactgaaaggaaggagaaactgtcatttccagacagtacagttgtcagtccaagaaaagtcaagtccatagaaccattctcagttcaataaggtgatcagatagatagatccacaacatgttaaaaaaaaaaaaattctcattcacaacaataaacctgaacagaaagggcacaggatggtggaactttgctgttccttcttgttccccatagagatccttgaagtaccttctccaactccatgatactctaaaaactgttcatcttcataataggagtggagcctaatccttggtctcctcacctcctggtttcccggaatgtctttctcattaacatatgagttctcagggcctgtatgtgcaaaggaaacctgaaccattgaggttcagactaggttgttgacaggatacaatgctgtgaagatgtcagtactggtaagttctaaaattcatcaggataaacaaatatgcatcaattgctgagaaagttttaaataagactaacatggtttgcttggcctgataccaagacatacagtaaagctccagtacttaaaaccatgtggggatgccagagtagataaatggatcagaataaagagtcagaatatgtgacaaaagtgttaggccaaattattgaaattagtggggaaaagacaaacattggcatgtgtttagaaaaaaatgtcagatgccttctctctcaccatttgtaaacattacttccaaatgtatccaagagctatctataaaaaaccttgccaatactagggaagaacagaatctggaaccctagggtgggaagcaagacatgaagcagagaagctccaaaaacctagctgcctcttgagagcagaagcttccaagaggaacaggcagtctcaatgcctctgtgcataagggtccctacagtgcaggggctgccttccctctttgctccactccctgacttgatggaagcttggaagcaggcatggggccagcatgagctgttccaggagggcacatgtgtctgaggcacatgttcttacatgttaatgcacatgtgcaaatgtatctacatgctttacatgatgctgtagaaatattttctcttgaccataaacatttcaaatcatgtacttacatttggcaataaagccttttcatccttctgcaaacaattttcccataccattgcttcacatgcaccgtaactggaagaggagcacagagtgtgctcaagaggggaggattcccagcacagaggatctgatgcgaggagcttctgctgaggagctcttggcgcagtgtttgtcgagcagtctgctcttcgcactcgctgtcgctcgctcgagcctcgctccccacgtccttccttccgacccgcggctggaccctcctcacaaatttctcagagaggctcacctcaaagcgcggcgcacgaggccgggccctcgtgccgacgcaa

SEQ ID NO: 406027 - DNA, 1042 bp, Homo sapiens
attctagaggatacccagtccgttcgactgagcccagtacgcctcccagatccccagctcacgccagacacagcctgtcctccagtcccaggtggagaacctgctccacagaacctactgtaggtggaagagcaagagtccctccccagtccatggggcaggcccctcggtcatggagatcccatgggatgatcttatcgccttgtgtatcaaccacaagctgagagactggacgcccccccggcttcctgttacatcagaggcgctgagtgaagatggtcagatatgtgtgtatttttttaaaaacgatttgaaaaaatatgatgttcctttgtcgtgggaacaagccaggttgcagacgcagaaggagctacagctgagagagggacgtttggcaataaagccttttcatccttctgcaaacaattttcccataccattgcttcacatgcaccgtaactggaagaggagcacagagtgtgctcaagaggggaggattcccagcacagaggatctgatgcgaggagcttctgctgaggagctcttggcgcagtgtttgtcgagcagtctgctgctggagaaagaagagaacaagaggtttgaagatcagcttcagcaatggttgtctgaagactcaggagcatttacggatttaacttcccttcccctctatcttcctcagactctagtgtctctttctcacactattgaacctgtgatgaaaacatctgtaactactagcccacagagtgacatgatgagggagcaactgcagctgtcagaggcgacaggaacgtgtctaggcgaacgactaaagcacctggaaaggctgatccggagttcaagggaagaggaagttgcctctgagctccatctctctgcgctgctagacatggtggacatttgagcagcctgacctgtggggagggggtctctcccgaagagtttctgtttttactcaaaataatgttattctcagatgcttgatgcactgttggaaatgtgattaatttaatcatgcagataaaccatttaaatgtca

SEQ ID NO: 406028 - DNA, 2633 bp, Homo sapiens
tttttttgagacagggttggccaggctggcctctttatctgtttttgtattgttttctcagaggcgctgagtgaagatggtcagatatgtgtgtatttttttaaaaacgatttgaaaaaatatgatgttcctttgtcgtgggaacaagccaggttgcagacgcagaaggagctacagctgagagagggacgacggtgaggttcatgttcagtatgtttctgttgcttgctaaactgtatttttcttgcaaagtaaatagaaattaacatcctacatgccaaatccagtccactgtgggcagactgtgacaaatcctcaaggaacagatcattcccatgcagtagaaactattctagaacaaagttaaagcatctcacttcatttatcaggcatacctgaccctgaaatcatacctaaccaggagagtacagctgacatttcatctcacttccaaatttggttccaaagcacagtacctaaaaaagttcacaagtatgctttctcccaggataaacaataacagtgaaaatctattaatgtaatttgttgccataatagaaaaataagtggtaattttagcaggcgttgaaatacgtttcttaaaatttatacctgttcctgataaaatttctttattttgggtactttctttagcttgggttaaaaaaaaaaaaaaaaagtcctaacttgataaggctacctaacataaaactaccaaaatagaaaaaaaacatgcttcttggtagaatgttaggaacagtggaatcagaaccagcctgttgtcccgactattattcactattgtcctggaaatcctgaccagtacagggatgtgggatagacaggcacaaatactgaaaggaaggagaaactgtcatttccagacagtacagttgtcagtccaagaaaagtcaagtccatagaaccattctcagttcaataaggtgatcagatagatagatccacaacatgttaaaaaaaaaaaaattctcattcacaacaataaacctgaacagaaagggcacaggatggtggaactttgctgttccttcttgttccccatagagatccttgaagtaccttctccaactccatgatactctaaaaactgttcatcttcataataggagtggagcctaatccttggtctcctcacctcctggtttcccggaatgtctttctcattaacatatgagttctcagggcctgtatgtgcaaaggaaacctgaaccattgaggttcagactaggttgttgacaggatacaatgctgtgaagatgtcagtactggtaagttctaaaattcatcaggataaacaaatatgcatcaattgctgagaaagttttaaataagactaacatggtttgcttggcctgataccaagacatacagtaaagctccagtacttaaaaccatgtggggatgccagagtagataaatggatcagaataaagagtcagaatatgtgacaaaagtgttaggccaaattattgaaattagtggggaaaagacaaacattggcatgtgtttagaaaaaaatgtcagatgccttctctctcaccatttgtaaacattacttccaaatgtatccaagagctatctataaaaaaccttgccaatactagggaagaacagaatctggaaccctagggtgggaagcaagacatgaagcagagaagctccaaaaacctagctgcctcttgagagcagaagcttccaagaggaacaggcagtctcaatgcctctgtgcataagggtccctacagtgcaggggctgccttccctctttgctccactccctgacttgatggaagcttggaagcaggcatggggccagcatgagctgttccaggagggcacatgtgtctgaggcacatgttcttacatgttaatgcacatgtgcaaatgtatctacatgctttacatgatgctgtagaaatattttctcttgaccataaacatttcaaatcatgtacttacatttggcaataaagccttttcatccttctgcaaacaattttcccataccattgcttcacatgcaccgtaactggaagaggagcacagagtgtgctcaagaggggaggattcccagcacagaggatctgatgcgaggagcttctgctgaggagctcttggcgcagtgtttgtcgagcagtctgctgctggagaaagaagagaacaagaggtttgaagatcagcttcagcaatggttgtctgaagactcaggagcatttacggatttaacttcccttcccctctatcttcctcagactctagtgtctctttctcacactattgaacctgtgatgaaaacatctgtaactactagcccacagagtgacatgatgagggagcaactgcagctgtcagaggcgacaggaacgtgtctaggcgaacgactaaagcacctggaaaggctgatccggagttcaagggaagaggaagttgcctctgagctccatctctctgcgctgctagacatggtggacatttgagcagcctgacctgtggggagggggtctctcccgaagagtttctgtttttactcaaaataatgttattctcagatgcttgatgcactgttggaaatgtgattaatttaatcatgcagataaaccatttaaatgtca

SEQ ID NO: 406029 - DNA, 2592 bp, Homo sapiens
aaaggtttttttcaaaaaacagctcaataaaaaaaaggtcacaaaaagagggattttttttaaaaacgatttgaaaaaatatgatgttcctttgtcgtgggaacaagccaggttgcagacgcagaaggagctacagctgagagagggacgacggtgaggttcatgttcagtatgtttctgttgcttgctaaactgtatttttcttgcaaagtaaatagaaattaacatcctacatgccaaatccagtccactgtgggcagactgtgacaaatcctcaaggaacagatcattcccatgcagtagaaactattctagaacaaagttaaagcatctcacttcatttatcaggcatacctgaccctgaaatcatacctaaccaggagagtacagctgacatttcatctcacttccaaatttggttccaaagcacagtacctaaaaaagttcacaagtatgctttctcccaggataaacaataacagtgaaaatctattaatgtaatttgttgccataatagaaaaataagtggtaattttagcaggcgttgaaatacgtttcttaaaatttatacctgttcctgataaaatttctttattttgggtactttctttagcttgggttaaaaaaaaaaaaaaaaagtcctaacttgataaggctacctaacataaaactaccaaaatagaaaaaaaacatgcttcttggtagaatgttaggaacagtggaatcagaaccagcctgttgtcccgactattattcactattgtcctggaaatcctgaccagtacagggatgtgggatagacaggcacaaatactgaaaggaaggagaaactgtcatttccagacagtacagttgtcagtccaagaaaagtcaagtccatagaaccattctcagttcaataaggtgatcagatagatagatccacaacatgttaaaaaaaaaaaaattctcattcacaacaataaacctgaacagaaagggcacaggatggtggaactttgctgttccttcttgttccccatagagatccttgaagtaccttctccaactccatgatactctaaaaactgttcatcttcataataggagtggagcctaatccttggtctcctcacctcctggtttcccggaatgtctttctcattaacatatgagttctcagggcctgtatgtgcaaaggaaacctgaaccattgaggttcagactaggttgttgacaggatacaatgctgtgaagatgtcagtactggtaagttctaaaattcatcaggataaacaaatatgcatcaattgctgagaaagttttaaataagactaacatggtttgcttggcctgataccaagacatacagtaaagctccagtacttaaaaccatgtggggatgccagagtagataaatggatcagaataaagagtcagaatatgtgacaaaagtgttaggccaaattattgaaattagtggggaaaagacaaacattggcatgtgtttagaaaaaaatgtcagatgccttctctctcaccatttgtaaacattacttccaaatgtatccaagagctatctataaaaaaccttgccaatactagggaagaacagaatctggaaccctagggtgggaagcaagacatgaagcagagaagctccaaaaacctagctgcctcttgagagcagaagcttccaagaggaacaggcagtctcaatgcctctgtgcataagggtccctacagtgcaggggctgccttccctctttgctccactccctgacttgatggaagcttggaagcaggcatggggccagcatgagctgttccaggagggcacatgtgtctgaggcacatgttcttacatgttaatgcacatgtgcaaatgtatctacatgctttacatgatgctgtagaaatattttctcttgaccataaacatttcaaatcatgtacttacatttggcaataaagccttttcatccttctgcaaacaattttcccataccattgcttcacatgcaccgtaactggaagaggagcacagagtgtgctcaagaggggaggattcccagcacagaggatctgatgcgaggagcttctgctgaggagctcttggcgcagtgtttgtcgagcagtctgctgctggagaaagaagagaacaagaggtttgaagatcagcttcagcaatggttgtctgaagactcaggagcatttacggatttaacttcccttcccctctatcttcctcagactctagtgtctctttctcacactattgaacctgtgatgaaaacatctgtaactactagcccacagagtgacatgatgagggagcaactgcagctgtcagaggcgacaggaacgtgtctaggcgaacgactaaagcacctggaaaggctgatccggagttcaagggaagaggaagttgcctctgagctccatctctctgcgctgctagacatggtggacatttgagcagcctgacctgtggggagggggtctctcccgaagagtttctgtttttactcaaaataatgttattctcagatgcttgatgcactgttggaaatgtgattaatttaatcatgcagataaaccatttaaatgtca

SEQ ID NO: 406030 - DNA, 5545 bp, Homo sapiens
ggcagcgcgggcctcggggtcctggggcgagacggtgagcgtgggggctgggccggcgccaggggcgccgtttccttcccccacgcagctccgcgcgcccgggcctccacatcgtcgctaacggagcgttgcggcgccggcgacccctggcgagcccggggcgggacagtggccaggccggcctgggcccagcgcgtggcctccgccgtttcgggctgtgctgggtggaagattaggctccccgggcacgccgtccccgccgagaggcctcagcttcgtggcagcgccctcgtccttccagcccgctcgagggtggccgccagggcgcgatgaaggaatgtgagaaagtgcttagcgctccagccgctccgagggaagccaggtgggaggagatcccgaaacgctaaggttttgacagcgttacagtgaattctccggctgtagagattggaggaagtcgggagaaattcgtctctaagttgtaagcttgttctaaagacgaaggggaactccctagtgctacaggctgtttcaggaagccaattaattttgtacacgtaatacttaattaccttctaataattggagcagaagatgaacccaactaatcctttcagtgggcagcagcctagtgctttttcggcgtcttctagtaatgtaggaacacttccatctaagccgccatttcgatttggtcaaccttctctttttggacaaaacagtaccttatctgggaagagctcgggattttcacaggtatccagctttccagcgtcttctggagtaagtcattcctcttcagtgcaaacattagggttcacccaaacctcaagtgttggacccttttctggacttgagcacacttccacctttgtggctacctctgggccttcaagttcatctgtgctgggaaacacaggatttagttttaaatcacccaccagtgttggggctttcccaagcacttctgcttttggacaagaagctggagaaatagtgaactctggttttgggaaaacagaattcagctttaaacctctggaaaatgcagtgttcaaaccaatactgggggctgaatctgagccagagaaaacccagagccaaattgcttctgggttttttacattttcccacccaattagtagtgcacctggaggcctggcccctttctcttttcctcaagtaacaagtagttcagctaccacttcaaattttaccttttcaaaacctgttagtagtaataattcattatctgcctttacccctgctttgtcaaaccaaaatgtagaggaagagaagagaggacctaagtcaatatttggaagttctaataatagcttcagtagcttccctgtatcatctgcggttttgggcgaacctttccaggctagcaaagcaggtgtcaggcaggggtgtgaagaagctgtttcccaggtggaaccacttcccagcctaatgaaaggactgaaaaggaaggaggaccaggatcgctccccaaggagacatggccacgagccagcagaagattcggatcctctgtcccggggcgatcatcctccagacaaacgacctgtccgcctgaatcgaccccggggaggtactttatttggtcggacgatacaggatgttttcaaaagcaataaggaagtaggtcgtctgggcaacaaggaggccaaaaaggaaactggctttgttgagtctgcagaaagtgaccacatggctatcccaggagggaatcagtctgtcctggcaccttcccggattccaggtgtgaataaagaggaagaaactgaaagtagagagaagaaagaagattctctaagaggaactccggcgcgtcagagtaacagaagcgagagcacagacagtcttgggggcttgtctccctctgaagtcacagccatccagtgcaagaatatccctgactacctcaacgacaggaccattctggagaaccattttggcaaaattgctaaagtgcagcgcatctttaccaggcgcagcaaaaagcttgcagtggtacatttctttgatcatgcatctgcagccctggctagaaagaaggggaaaagtttgcataaagacatggctatcttttggcacaggaagaaaataagccccaataagaaacccttttccctgaaggagaagaaaccaggtgacggtgaagtcagcccgagcacagaggatgcaccctttcagcactctcctcttggcaaggccgcagggaggactggtgctagcagcctcctgaataaaagctctccagtgaagaagccaagtcttctaaaggcccaccaattcgagggagactcttttgactcagcctccgagggctccgagggcctcgggccatgtgtgctctccctcagtaccctgataggcactgtggctgagacatccaaggagaagtaccgcctgcttgaccagagagacaggatcatgcggcaagctcgggtgaagagaaccgatctggacaaagcgaggacttttgttggcacctgcctggatatgtgtcctgagaaggagaggtacatgcgggagacccgtagccagctgagcgtgttcgaagtggtcccagggactgaccaggtggaccacgcagcagctgtgaaagagtacagtcggtcctcggcggatcaggaggagcccctgccccacgagctgcggcccttgccagtgctcagcaggaccatggactacctggtgacccagatcatggaccagaaggagggcagcctgcgggattggtatgacttcgtgtggaaccgcacgcgtggcatacggaaggatatcacgcagcagcacctctgtgaccccctgacggtgtccctgattgagaagtgcacccggtttcacatccactgtgcccacttcatgtgtgaggagcccatgtcctcctttgatgccaagatcaataatgagaacatgaccaagtgcctgcagagcctgaaggagatgtaccaggacctgagaaacaagggtgtcttctgtgccagcgaagcggagttccagggctacaatgttctgctcagtctcaacaagggagacatcctaagagaagtacaacagttccatcctgctgttagaaactcatctgaggtgaaatttgctgttcaggcttttgctgcattgaacagtaataattttgtgagatttttcaaactggtccagtcagcttcttacctgaacgcttgtcttttacactgttacttcagtcagatccgcaaggatgctctccgggcgctcaactttgcgtacacggtgagcacacagcgatctaccatctttcccctggatggtgtggtgcgcatgctgctgttcagagactgtgaagaggccaccgacttcctcacctgccacggcctcaccgtttccgacggctgtgtggagctgaaccggtctgcattcctggaaccagagggattatccaagaccaggaagtcggtgtttattactaggaagctgacggtgtcagtcggggaaattgtgaacggagggccattgccccccgtccctcgtcatacccctgtgtgcagcttcaactcccagaacaagtacatcggggagagcctggccgcggagctgcccgtcagcacccagagacccggctccgacacagtgggcggagggagaggagaggagtgtggtgtagagccggatgcacccctgtccagtctcccacagtctctaccagcccctgcgccctcaccagtgcctctgcctcctgtcctggcactgaccccgtctgtggcgcccagcctcttccagctgtctgtgcagcctgaaccaccgcctccagagcccgtgcccatgtactctgacgaggacctggcgcaggtggtggacgagctcatccaggaggccctgcagagggactgtgaggaagttggctctgcgggtgctgcctacgcagctgccgccctgggtgtttctaatgctgctatggaggatttgttaacagctgcaaccacgggcattttgaggcacattgcagctgaagaagtgtctaaggaaagagagcgaagggagcaggagaggcagcgggctgaagaggaaaggttgaaacaagagagagagctggtgttaagtgagctgagccagggcctggccgtggagctgatggaacgcgtgatgatggagtttgtgagggaaacctgctcccaggagttgaagaatgcagtagagacagaccagagggtccgtgtggcccgttgctgtgaggatgtctgtgcccacttagtggacttgtttctcgtggaggaaatcttccagactgcaaaggagaccctccaggagcttcagtgcttctgcaagtatctacagcggtggagggaagctgtcacagcccgcaagaaactgaggcgccaaatgcgggctttccctgctgcgccctgctgcgtggacgtgagcgaccggctgagggcgctggcgcccagcgcagagtgccccattgctgaagagaacctggccaggggcctcctggacctgggccatgcagggagattgggcatctcctgcaccaggttaaggcggctcagaaacaagacagctcaccagatgaaggttcagcacttctaccagcagctgctgagtgatgtggcatgggcgtctctggacctgccatccctcgtggctgagcacctccctgggaggcaggagcatgtgttttggaagctggtgctggtgttgccggatgtagaggagcagtccccagagagttgtggcagaattctagcaaattggttaaaagtcaagttcatgggagatgaaggctcagtggatgacacatccagcgatgctggtgggattcagacgctttcgcttttcaactcacttagcagcaaaggggatcagatgatttctgttaacgtgtgtataaaggtggcccatggcgccctcagtgatggtgccattgatgctgtggagacacagaaggacctcctgggagccagtgggctcatgctgctgcttccccccaaaatgaagagtgaggacatggcagaggaggacgtgtactggctgtcggccttgctgcagctcaagcagctcctgcaggctaagcccttccagcctgcgcttcctctggtggttcttgtgcctagcccaggaggggacgccgttgagaaggaagtagaagatggtctgatgctacaggacttggtttcagctaagctgatttcagattacactgttaccgagatccctgataccattaatgatctacaaggttcaactaaggttttgcaagcagtgcagtggctggtttcccactgcccccattcccttgacctctgctgccagactctcattcagtacgtcgaagacgggattggccatgagtttagtggccgctttttccatgacagaagagagaggcgtctgggcggtcttgcttctcaggagcctggcgccatcattgagctgtttaacagtgtgctgcagttcctggcttctgtggtgtcctctgaacagctgtgtgacctgtcctgtgcagtctccctcagtctctaccagcccctgctgccctcctcagtgcctctgg

SEQ ID NO: 406031 - DNA, 5343 bp, Homo sapiens
ggcagcgcgggcctcggggtcctggggcgagacggtgagcgtgggggctgggccggcgccaggggcgccgtttccttcccccacgcagctccgcgcgcccgggcctccacatcgtcgctaacggagcgttgcggcgccggcgacccctggcgagcccggggcgggacagtggccaggccggcctgggcccagcgcgtggcctccgccgtttcgggctgtgctgggtggaagattaggctccccgggcacgccgtccccgccgagaggcctcagcttcgtggcagcgccctcgtccttccagcccgctcgagggtggccgccagggcgcgatgaaggaatgtgagaaagtgcttagcgctccagccgctccgagggaagccaggtgggaggagatcccgaaacgctaaggttttgacagcgttacagtgaattctccggctgtagagattggaggaagtcgggagaaattcgtctctaagttgtaagcttgttctaaagacgaaggggaactccctagtgctacaggctgtttcaggaagccaattaattttgtacacgtaatacttaattaccttctaataattggagcagaagatgaacccaactaatcctttcagtgggcagcagcctagtgctttttcggcgtcttctagtaatgtaggaacacttccatctaagccgccatttcgatttggtcaaccttctctttttggacaaaacagtaccttatctgggaagagctcgggattttcacaggtatccagctttccagcgtcttctggagtaagtcattcctcttcagtgcaaacattagggttcacccaaacctcaagtgttggacccttttctggacttgagcacacttccacctttgtggctacctctgggccttcaagttcatctgtgctgggaaacacaggatttagttttaaatcacccaccagtgttggggctttcccaagcacttctgcttttggacaagaagctggagaaatagtgaactctggttttgggaaaacagaattcagctttaaacctctggaaaatgcagtgttcaaaccaatactgggggctgaatctgagccagagaaaacccagagccaaattgcttctgggttttttacattttcccacccaattagtagtgcacctggaggcctggcccctttctcttttcctcaagtaacaagtagttcagctaccacttcaaattttaccttttcaaaacctgttagtagtaataattcattatctgcctttacccctgctttgtcaaaccaaaatgtagaggaagagaagagaggacctaagtcaatatttggaagttctaataatagcttcagtagcttccctgtatcatctgcggttttgggcgaacctttccaggctagcaaagcaggtgtcaggcaggggtgtgaagaagctgtttcccaggtggaaccacttcccagcctaatgaaaggactgaaaaggaaggaggaccaggatcgctccccaaggagacatggccacgagccagcagaagattcggatcctctgtcccggggcgatcatcctccagacaaacgacctgtccgcctgaatcgaccccggggaggtactttatttggtcggacgatacaggatgttttcaaaagcaataaggaagtaggtcgtctgggcaacaaggaggccaaaaaggaaactggctttgttgagtctgcagaaagtgaccacatggctatcccaggagggaatcagtctgtcctggcaccttcccggattccaggtgtgaataaagaggaagaaactgaaagtagagagaagaaagaagattctctaagaggaactccggcgcgtcagagtaacagaagcgagagcacagacagtcttgggggcttgtctccctctgaagtcacagccatccagtgcaagaatatccctgactacctcaacgacaggaccattctggagaaccattttggcaaaattgctaaagtgcagcgcatctttaccaggcgcagcaaaaagcttgcagtggtacatttctttgatcatgcatctgcagccctggctagaaagaaggggaaaagtttgcataaagacatggctatcttttggcacaggaagaaaataagccccaataagaaacccttttccctgaaggagaagaaaccaggtgacggtgaagtcagcccgagcacagaggatgcaccctttcagcactctcctcttggcaaggccgcagggaggactggtgctagcagcctcctgaataaaagctctccagtgaagaagccaagtcttctaaaggcccaccaattcgagggagactcttttgactcagcctccgagggctccgagggcctcgggccatgtgtgctctccctcagtaccctgataggcactgtggctgagacatccaaggagaagtaccgcctgcttgaccagagagacaggatcatgcggcaagctcgggtgaagagaaccgatctggacaaagcgaggacttttgttggcacctgcctggatatgtgtcctgagaaggagaggtacatgcgggagacccgtagccagctgagcgtgttcgaagtggtcccagggactgaccaggtggaccacgcagcagctgtgaaagagtacagtcggtcctcggcggatcaggaggagcccctgccccacgagctgcggcccttgccagtgctcagcaggaccatggactacctggtgacccagatcatggaccagaaggagggcagcctgcgggattggtatgacttcgtgtggaaccgcacgcgtggcatacggaaggatatcacgcagcagcacctctgtgaccccctgacggtgtccctgattgagaagtgcacccggtttcacatccactgtgcccacttcatgtgtgaggagcccatgtcctcctttgatgccaagatcaataatgagaacatgaccaagtgcctgcagagcctgaaggagatgtaccaggacctgagaaacaagggtgtcttctgtgccagcgaagcggagttccagggctacaatgttctgctcagtctcaacaagggagacatcctaagagaagtacaacagttccatcctgctgttagaaactcatctgaggtgaaatttgctgttcaggcttttgctgcattgaacagtaataattttgtgagatttttcaaactggtccagtcagcttcttacctgaacgcttgtcttttacactgttacttcagtcagatccgcaaggatgctctccgggcgctcaactttgcgtacacggtgagcacacagcgatctaccatctttcccctggatggtgtggtgcgcatgctgctgttcagagactgtgaagaggccaccgacttcctcacctgccacggcctcaccgtttccgacggctgtgtggagctgaaccggtctgcattcctggaaccagagggattatccaagaccaggaagtcggtgtttattactaggaagctgacggtgtcagtcggggaaattgtgaacggagggccattgccccccgtccctcgtcatacccctgtgtgcagcttcaactcccagaacaagtacatcggggagagcctggccgcggagctgcccgtcagcacccagagacccggctccgacacagtgggcggagggagaggagaggagtgtggtgtagagccggatgcacccctgtccagtctcccacagtctctaccagcccctgcgccctcaccagtgcctctgcctcctgtcctggcactgaccccgtctgtggcgcccagcctcttccagctgtctgtgcagcctgaaccaccgcctccagagcccgtgcccatgtactctgacgaggacctggcgcaggtggtggacgagctcatccaggaggccctgcagagggactgtgaggaagttggctctgcgggtgctgcctacgcagctgccgccctgggtgtttctaatgctgctatggaggatttgttaacagctgcaaccacgggcattttgaggcacattgcagctgaagaagtgtctaaggaaagagagcgaagggagcaggagaggcagcgggctgaagaggaaaggttgaaacaagagagagagctggtgttaagtgagctgagccagggcctggccgtggagctgatggaacgcgtgatgatggagtttgtgagggaaacctgctcccaggagttgaagaatgcagtagagacagaccagagggtccgtgtggcccgttgctgtgaggatgtctgtgcccacttagtggacttgtttctcgtggaggaaatcttccagactgcaaaggagaccctccaggagcttcagtgcttctgcaagtatctacagcggtggagggaagctgtcacagcccgcaagaaactgaggcgccaaatgcgggctttccctgctgcgccctgctgcgtggacgtgagcgaccggctgagggcgctggcgcccagcgcagagtgccccattgctgaagagaacctggccaggggcctcctggacctgggccatgcagggagattgggcatctcctgcaccaggttaaggcggctcagaaacaagacagctcaccagatgaaggttcagcacttctaccagcagctgctgagtgatgtggcatgggcgtctctggacctgccatccctcgtggctgagcacctccctgggaggcaggagcatgtgttttggaagctggtgctggtgttgccggatgtagaggagcagtccccagagagttgtggcagaattctagcaaattggttaaaagtcaagttcatgggagatgaaggctcagtggatgacacatccagcgatgctggtgggattcagacgctttcgcttttcaactcacttagcagcaaaggggatcagatgatttctgttaacgtgtgtataaaggtgaactataattactttgtgtttacttctgtgttttcattactttcacttactcccagatatcactggaaccatgcaaatactgcttattccctaatgtggttttgaaagactgggaggctcagaagcaagtattatgtctgtccgtacatgtcgtttaaaaaattatttttttaagccagtcaaattgagtagtgggcaccaagcccagcctgcttctttactttttctgttttaatactatatattggatttcctaaatgtaatatgtacacaaaacttttaaaaaatgaggaaatgtaaaagaagtataaagatgatgataagagccatccatgctcttgccattctgaggtaacagtaacttcttggtgcaaattcttcccttttcctgggattacaaagtcacatttcatctactggaaattagtttactgctgctgttaccttcattttcat

SEQ ID NO: 406032 - DNA, 5251 bp, Homo sapiens
ggcagcgcgggcctcggggtcctggggcgagacggtgagcgtgggggctgggccggcgccaggggcgccgtttccttcccccacgcagctccgcgcgcccgggcctccacatcgtcgctaacggagcgttgcggcgccggcgacccctggcgagcccggggcgggacagtggccaggccggcctgggcccagcgcgtggcctccgccgtttcgggctgtgctgggtggaagattaggctccccgggcacgccgtccccgccgagaggcctcagcttcgtggcagcgccctcgtccttccagcccgctcgagggtggccgccagggcgcgatgaaggaatgtgagaaagtgcttagcgctccagccgctccgagggaagccaggtgggaggagatcccgaaacgctaaggttttgacagcgttacagtgaattctccggctgtagagattggaggaagtcgggagaaattcgtctctaagttgtaagcttgttctaaagacgaaggggaactccctagtgctacaggctgtttcaggaagccaattaattttgtacacgtaatacttaattaccttctaataattggagcagaagatgaacccaactaatcctttcagtgggcagcagcctagtgctttttcggcgtcttctagtaatgtaggaacacttccatctaagccgccatttcgatttggtcaaccttctctttttggacaaaacagtaccttatctgggaagagctcgggattttcacaggtatccagctttccagcgtcttctggagtaagtcattcctcttcagtgcaaacattagggttcacccaaacctcaagtgttggacccttttctggacttgagcacacttccacctttgtggctacctctgggccttcaagttcatctgtgctgggaaacacaggatttagttttaaatcacccaccagtgttggggctttcccaagcacttctgcttttggacaagaagctggagaaatagtgaactctggttttgggaaaacagaattcagctttaaacctctggaaaatgcagtgttcaaaccaatactgggggctgaatctgagccagagaaaacccagagccaaattgcttctgggttttttacattttcccacccaattagtagtgcacctggaggcctggcccctttctcttttcctcaagtaacaagtagttcagctaccacttcaaattttaccttttcaaaacctgttagtagtaataattcattatctgcctttacccctgctttgtcaaaccaaaatgtagaggaagagaagagaggacctaagtcaatatttggaagttctaataatagcttcagtagcttccctgtatcatctgcggttttgggcgaacctttccaggctagcaaagcaggtgtcaggcaggggtgtgaagaagctgtttcccaggtggaaccacttcccagcctaatgaaaggactgaaaaggaaggaggaccaggatcgctccccaaggagacatggccacgagccagcagaagattcggatcctctgtcccggggcgatcatcctccagacaaacgacctgtccgcctgaatcgaccccggggaggtactttatttggtcggacgatacaggatgttttcaaaagcaataaggaagtaggtcgtctgggcaacaaggaggccaaaaaggaaactggctttgttgagtctgcagaaagtgaccacatggctatcccaggagggaatcagtctgtcctggcaccttcccggattccaggtgtgaataaagaggaagaaactgaaagtagagagaagaaagaagattctctaagaggaactccggcgcgtcagagtaacagaagcgagagcacagacagtcttgggggcttgtctccctctgaagtcacagccatccagtgcaagaatatccctgactacctcaacgacaggaccattctggagaaccattttggcaaaattgctaaagtgcagcgcatctttaccaggcgcagcaaaaagcttgcagtggtacatttctttgatcatgcatctgcagccctggctagaaagaaggggaaaagtttgcataaagacatggctatcttttggcacaggaagaaaataagccccaataagaaacccttttccctgaaggagaagaaaccaggtgacggtgaagtcagcccgagcacagaggatgcaccctttcagcactctcctcttggcaaggccgcagggaggactggtgctagcagcctcctgaataaaagctctccagtgaagaagccaagtcttctaaaggcccaccaattcgagggagactcttttgactcagcctccgagggctccgagggcctcgggccatgtgtgctctccctcagtaccctgataggcactgtggctgagacatccaaggagaagtaccgcctgcttgaccagagagacaggatcatgcggcaagctcgggtgaagagaaccgatctggacaaagcgaggacttttgttggcacctgcctggatatgtgtcctgagaaggagaggtacatgcgggagacccgtagccagctgagcgtgttcgaagtggtcccagggactgaccaggtggaccacgcagcagctgtgaaagagtacagtcggtcctcggcggatcaggaggagcccctgccccacgagctgcggcccttgccagtgctcagcaggaccatggactacctggtgacccagatcatggaccagaaggagggcagcctgcgggattggtatgacttcgtgtggaaccgcacgcgtggcatacggaaggatatcacgcagcagcacctctgtgaccccctgacggtgtccctgattgagaagtgcacccggtttcacatccactgtgcccacttcatgtgtgaggagcccatgtcctcctttgatgccaagatcaataatgagaacatgaccaagtgcctgcagagcctgaaggagatgtaccaggacctgagaaacaagggtgtcttctgtgccagcgaagcggagttccagggctacaatgttctgctcagtctcaacaagggagacatcctaagagaagtacaacagttccatcctgctgttagaaactcatctgaggtgaaatttgctgttcaggcttttgctgcattgaacagtaataattttgtgagatttttcaaactggtccagtcagcttcttacctgaacgcttgtcttttacactgttacttcagtcagatccgcaaggatgctctccgggcgctcaactttgcgtacacggtgagcacacagcgatctaccatctttcccctggatggtgtggtgcgcatgctgctgttcagagactgtgaagaggccaccgacttcctcacctgccacggcctcaccgtttccgacggctgtgtggagctgaaccggtctgcattcctggaaccagagggattatccaagaccaggaagtcggtgtttattactaggaagctgacggtgtcagtcggggaaattgtgaacggagggccattgccccccgtccctcgtcatacccctgtgtgcagcttcaactcccagaacaagtacatcggggagagcctggccgcggagctgcccgtcagcacccagagacccggctccgacacagtgggcggagggagaggagaggagtgtggtgtagagccggatgcacccctgtccagtctcccacagtctctaccagcccctgcgccctcaccagtgcctctgcctcctgtcctggcactgaccccgtctgtggcgcccagcctcttccagctgtctgtgcagcctgaaccaccgcctccagagcccgtgcccatgtactctgacgaggacctggcgcaggtggtggacgagctcatccaggaggccctgcagagggactgtgaggaagttggctctgcgggtgctgcctacgcagctgccgccctgggtgtttctaatgctgctatggaggatttgttaacagctgcaaccacgggcattttgaggcacattgcagctgaagaagtgtctaaggaaagagagcgaagggagcaggagaggcagcgggctgaagaggaaaggttgaaacaagagagagagctggtgttaagtgagctgagccagggcctggccgtggagctgatggaacgcgtgatgatggagtttgtgagggaaacctgctcccaggagttgaagaatgcagtagagacagaccagagggtccgtgtggcccgttgctgtgaggatgtctgtgcccacttagtggacttgtttctcgtggaggaaatcttccagactgcaaaggagaccctccaggagcttcagtgcttctgcaagtatctacagcggtggagggaagctgtcacagcccgcaagaaactgaggcgccaaatgcgggctttccctgctgcgccctgctgcgtggacgtgagcgaccggctgagggcgctggcgcccagcgcagagtgccccattgctgaagagaacctggccaggggcctcctggacctgggccatgcagggagattgggcatctcctgcaccaggttaaggcggctcagaaacaagacagctcaccagatgaaggttcagcacttctaccagcagctgctgagtgatgtggcatgggcgtctctggacctgccatccctcgtggctgagcacctccctgggaggcaggagcatgtgttttggaagctggtgctggtgttgccggatgtagaggagcagtccccagagagttgtggcagaattctagcaaattggttaaaagtcaagttcatgggagatgaaggctcagtggatgacacatccagcgatgctggtgggattcagacgctttcgcttttcaactcacttagcagcaaaggggatcagatgatttctgttaacgtgtgtataaaggtggcccatggcgccctcagtgatggtgccattgatgctgtggagacacagaaggacctcctgggagccagtgggctcatgctgctgcttccccccaaaatgaagagtgaggacatggcagaggaggacgtgtactggctgtcggccttgctgcagctcaagcagctcctgcaggctaagcccttccagcctgcgcttcctctggtggttcttgtgcctagcccaggaggggacgccgttgagaaggaagtagaagatggtttgtgaaggaagtctcgtttatgaagcagcattgtttaataaatgggtggaggccctgggtctgaggatggtccagtagtcttcgggtcgtttggaatcactgaga

SEQ ID NO: 406033 - DNA, 4913 bp, Homo sapiens
ggcagcgcgggcctcggggtcctggggcgagacggtgagcgtgggggctgggccggcgccaggggcgccgtttccttcccccacgcagctccgcgcgcccgggcctccacatcgtcgctaacggagcgttgcggcgccggcgacccctggcgagcccggggcgggacagtggccaggccggcctgggcccagcgcgtggcctccgccgtttcgggctgtgctgggtggaagattaggctccccgggcacgccgtccccgccgagaggcctcagcttcgtggcagcgccctcgtccttccagcccgctcgagggtggccgccagggcgcgatgaaggaatgtgagaaagtgcttagcgctccagccgctccgagggaagccaggtgggaggagatcccgaaacgctaaggttttgacagcgttacagtgaattctccggctgtagagattggaggaagtcgggagaaattcgtctctaagttgtaagcttgttctaaagacgaaggggaactccctagtgctacaggctgtttcaggaagccaattaattttgtacacgtaatacttaattaccttctaataattggagcagaagatgaacccaactaatcctttcagtgggcagcagcctagtgctttttcggcgtcttctagtaatgtaggaacacttccatctaagccgccatttcgatttggtcaaccttctctttttggacaaaacagtaccttatctgggaagagctcgggattttcacaggtatccagctttccagcgtcttctggagtaagtcattcctcttcagtgcaaacattagggttcacccaaacctcaagtgttggacccttttctggacttgagcacacttccacctttgtggctacctctgggccttcaagttcatctgtgctgggaaacacaggatttagttttaaatcacccaccagtgttggggctttcccaagcacttctgcttttggacaagaagctggagaaatagtgaactctggttttgggaaaacagaattcagctttaaacctctggaaaatgcagtgttcaaaccaatactgggggctgaatctgagccagagaaaacccagagccaaattgcttctgggttttttacattttcccacccaattagtagtgcacctggaggcctggcccctttctcttttcctcaagtaacaagtagttcagctaccacttcaaattttaccttttcaaaacctgttagtagtaataattcattatctgcctttacccctgctttgtcaaaccaaaatgtagaggaagagaagagaggacctaagtcaatatttggaagttctaataatagcttcagtagcttccctgtatcatctgcggttttgggcgaacctttccaggctagcaaagcaggtgtcaggcaggggtgtgaagaagctgtttcccaggtggaaccacttcccagcctaatgaaaggactgaaaaggaaggaggaccaggatcgctccccaaggagacatggccacgagccagcagaagattcggatcctctgtcccggggcgatcatcctccagacaaacgacctgtccgcctgaatcgaccccggggaggtactttatttggtcggacgatacaggatgttttcaaaagcaataaggaagtaggtcgtctgggcaacaaggaggccaaaaaggaaactggctttgttgagtctgcagaaagtgaccacatggctatcccaggagggaatcagtctgtcctggcaccttcccggattccaggtgtgaataaagaggaagaaactgaaagtagagagaagaaagaagattctctaagaggaactccggcgcgtcagagtaacagaagcgagagcacagacagtcttgggggcttgtctccctctgaagtcacagccatccagtgcaagaatatccctgactacctcaacgacaggaccattctggagaaccattttggcaaaattgctaaagtgcagcgcatctttaccaggcgcagcaaaaagcttgcagtggtacatttctttgatcatgcatctgcagccctggctagaaagaaggggaaaagtttgcataaagacatggctatcttttggcacaggaagaaaataagccccaataagaaacccttttccctgaaggagaagaaaccaggtgacggtgaagtcagcccgagcacagaggatgcaccctttcagcactctcctcttggcaaggccgcagggaggactggtgctagcagcctcctgaataaaagctctccagtgaagaagccaagtcttctaaaggcccaccaattcgagggagactcttttgactcagcctccgagggctccgagggcctcgggccatgtgtgctctccctcagtaccctgataggcactgtggctgagacatccaaggagaagtaccgcctgcttgaccagagagacaggatcatgcggcaagctcgggtgaagagaaccgatctggacaaagcgaggacttttgttggcacctgcctggatatgtgtcctgagaaggagaggtacatgcgggagacccgtagccagctgagcgtgttcgaagtggtcccagggactgaccaggtggaccacgcagcagctgtgaaagagtacagtcggtcctcggcggatcaggaggagcccctgccccacgagctgcggcccttgccagtgctcagcaggaccatggactacctggtgacccagatcatggaccagaaggagggcagcctgcgggattggtatgacttcgtgtggaaccgcacgcgtggcatacggaaggatatcacgcagcagcacctctgtgaccccctgacggtgtccctgattgagaagtgcacccggtttcacatccactgtgcccacttcatgtgtgaggagcccatgtcctcctttgatgccaagatcaataatgagaacatgaccaagtgcctgcagagcctgaaggagatgtaccaggacctgagaaacaagggtgtcttctgtgccagcgaagcggagttccagggctacaatgttctgctcagtctcaacaagggagacatcctaagagaagtacaacagttccatcctgctgttagaaactcatctgaggtgaaatttgctgttcaggcttttgctgcattgaacagtaataattttgtgagatttttcaaactggtccagtcagcttcttacctgaacgcttgtcttttacactgttacttcagtcagatccgcaaggatgctctccgggcgctcaactttgcgtacacggtgagcacacagcgatctaccatctttcccctggatggtgtggtgcgcatgctgctgttcagagactgtgaagaggccaccgacttcctcacctgccacggcctcaccgtttccgacggctgtgtggagctgaaccggtctgcattcctggaaccagagggattatccaagaccaggaagtcggtgtttattactaggaagctgacggtgtcagtcggggaaattgtgaacggagggccattgccccccgtccctcgtcatacccctgtgtgcagcttcaactcccagaacaagtacatcggggagagcctggccgcggagctgcccgtcagcacccagagacccggctccgacacagtgggcggagggagaggagaggagtgtggtgtagagccggatgcacccctgtccagtctcccacagtctctaccagcccctgcgccctcaccagtgcctctgcctcctgtcctggcactgaccccgtctgtggcgcccagcctcttccagctgtctgtgcagcctgaaccaccgcctccagagcccgtgcccatgtactctgacgaggacctggcgcaggtggtggacgagctcatccaggaggccctgcagagggactgtgaggaagttggctctgcgggtgctgcctacgcagctgccgccctgggtgtttctaatgctgctatggaggatttgttaacagctgcaaccacgggcattttgaggcacattgcagctgaagaagtgtctaaggaaagagagcgaagggagcaggagaggcagcgggctgaagaggaaaggttgaaacaagagagagagctggtgttaagtgagctgagccagggcctggccgtggagctgatggaacgcgtgatgatggagtttgtgagggaaacctgctcccaggagttgaagaatgcagtagagacagaccagagggtccgtgtggcccgttgctgtgaggatgtctgtgcccacttagtggacttgtttctcgtggaggaaatcttccagactgcaaaggagaccctccaggagcttcagtgcttctgcaagtatctacagcggtggagggaagctgtcacagcccgcaagaaactgaggcgccaaatgcgggctttccctgctgcgccctgctgcgtggacgtgagcgaccggctgagggcgctggcgcccagcgcagagtgccccattgctgaagagaacctggccaggggcctcctggacctgggccatgcagggagattgggcatctcctgcaccaggtcagcatcagctgtcgcctgcctcgtcagggctcccctgcccccacttggttttaccaggagcggaattaatgtgtgtgtttggagggtgaagataggtgaagcctggaggcgaagataggtgaagcctggaggcgaggacaggcacagggttgcattttgaaggttgtctcccacagttgtggacatgtgacttgttccactggcaaagcagagctctgagttcaccttgaaagactcagcgtcctggtgcctgagtctgactctgcatcacgtgttcttttcctgctcgtcccagtttaagtacctgccacttccatccttgttggaggagccggaggtccacgctggcctgtgtcttccgatcccatccccgccccatccctc

SEQ ID NO: 406034 - DNA, 4303 bp, Homo sapiens
ggcagcgcgggcctcggggtcctggggcgagacggtgagcgtgggggctgggccggcgccaggggcgccgtttccttcccccacgcagctccgcgcgcccgggcctccacatcgtcgctaacggagcgttgcggcgccggcgacccctggcgagcccggggcgggacagtggccaggccggcctgggcccagcgcgtggcctccgccgtttcgggctgtgctgggtggaagattaggctccccgggcacgccgtccccgccgagaggcctcagcttcgtggcagcgccctcgtccttccagcccgctcgagggtggccgccagggcgcgatgaaggaatgtgagaaagtgcttagcgctccagccgctccgagggaagccaggtgggaggagatcccgaaacgctaaggttttgacagcgttacagtgaattctccggctgtagagattggaggaagtcgggagaaattcgtctctaagttgtaagcttgttctaaagacgaaggggaactccctagtgctacaggctgtttcaggaagccaattaattttgtacacgtaatacttaattaccttctaataattggagcagaagatgaacccaactaatcctttcagtgggcagcagcctagtgctttttcggcgtcttctagtaatgtaggaacacttccatctaagccgccatttcgatttggtcaaccttctctttttggacaaaacagtaccttatctgggaagagctcgggattttcacaggtatccagctttccagcgtcttctggagtaagtcattcctcttcagtgcaaacattagggttcacccaaacctcaagtgttggacccttttctggacttgagcacacttccacctttgtggctacctctgggccttcaagttcatctgtgctgggaaacacaggatttagttttaaatcacccaccagtgttggggctttcccaagcacttctgcttttggacaagaagctggagaaatagtgaactctggttttgggaaaacagaattcagctttaaacctctggaaaatgcagtgttcaaaccaatactgggggctgaatctgagccagagaaaacccagagccaaattgcttctgggttttttacattttcccacccaattagtagtgcacctggaggcctggcccctttctcttttcctcaagtaacaagtagttcagctaccacttcaaattttaccttttcaaaacctgttagtagtaataattcattatctgcctttacccctgctttgtcaaaccaaaatgtagaggaagagaagagaggacctaagtcaatatttggaagttctaataatagcttcagtagcttccctgtatcatctgcggttttgggcgaacctttccaggctagcaaagcaggtgtcaggcaggggtgtgaagaagctgtttcccaggtggaaccacttcccagcctaatgaaaggactgaaaaggaaggaggaccaggatcgctccccaaggagacatggccacgagccagcagaagattcggatcctctgtcccggggcgatcatcctccagacaaacgacctgtccgcctgaatcgaccccggggaggtactttatttggtcggacgatacaggatgttttcaaaagcaataaggaagtaggtcgtctgggcaacaaggaggccaaaaaggaaactggctttgttgagtctgcagaaagtgaccacatggctatcccaggagggaatcagtctgtcctggcaccttcccggattccaggtgtgaataaagaggaagaaactgaaagtagagagaagaaagaagattctctaagaggaactccggcgcgtcagagtaacagaagcgagagcacagacagtcttgggggcttgtctccctctgaagtcacagccatccagtgcaagaatatccctgactacctcaacgacaggaccattctggagaaccattttggcaaaattgctaaagtgcagcgcatctttaccaggcgcagcaaaaagcttgcagtggtacatttctttgatcatgcatctgcagccctggctagaaagaaggggaaaagtttgcataaagacatggctatcttttggcacaggaagaaaataagccccaataagaaacccttttccctgaaggagaagaaaccaggtgacggtgaagtcagcccgagcacagaggatgcaccctttcagcactctcctcttggcaaggccgcagggaggactggtgctagcagcctcctgaataaaagctctccagtgaagaagccaagtcttctaaaggcccaccaattcgagggagactcttttgactcagcctccgagggctccgagggcctcgggccatgtgtgctctccctcagtaccctgataggcactgtggctgagacatccaaggagaagtaccgcctgcttgaccagagagacaggatcatgcggcaagctcgggtgaagagaaccgatctggacaaagcgaggacttttgttggcacctgcctggatatgtgtcctgagaaggagaggtacatgcgggagacccgtagccagctgagcgtgttcgaagtggtcccagggactgaccaggtggaccacgcagcagctgtgaaagagtacagtcggtcctcggcggatcaggaggagcccctgccccacgagctgcggcccttgccagtgctcagcaggaccatggactacctggtgacccagatcatggaccagaaggagggcagcctgcgggattggtatgacttcgtgtggaaccgcacgcgtggcatacggaaggatatcacgcagcagcacctctgtgaccccctgacggtgtccctgattgagaagtgcacccggtttcacatccactgtgcccacttcatgtgtgaggagcccatgtcctcctttgatgccaagatcaataatgagaacatgaccaagtgcctgcagagcctgaaggagatgtaccaggacctgagaaacaagggtgtcttctgtgccagcgaagcggagttccagggctacaatgttctgctcagtctcaacaagggagacatcctaagagaagtacaacagttccatcctgctgttagaaactcatctgaggtgaaatttgctgttcaggcttttgctgcattgaacagtaataattttgtgagatttttcaaactggtccagtcagcttcttacctgaacgcttgtcttttacactgttacttcagtcagatccgcaaggatgctctccgggcgctcaactttgcgtacacggtgagcacacagcgatctaccatctttcccctggatggtgtggtgcgcatgctgctgttcagagactgtgaagaggccaccgacttcctcacctgccacggcctcaccgtttccgacggctgtgtggagctgaaccggtctgcattcctggaaccagagggattatccaagaccaggaagtcggtgtttattactaggaagctgacggtgtcagtcggggaaattgtgaacggagggccattgccccccgtccctcgtcatacccctgtgtgcagcttcaactcccagaacaagtacatcggggagagcctggccgcggagctgcccgtcagcacccagagacccggctccgacacagtgggcggagggagaggagaggagtgtggtgtagagccggatgcacccctgtccagtctcccacagtctctaccagcccctgcgccctcaccagtgcctctgcctcctgtcctggcactgaccccgtctgtggcgcccagcctcttccagctgtctgtgcagcctgaaccaccgcctccagagcccgtgcccatgtactctgacgaggacctggcgcaggtggtggacgagctcatccaggaggccctgcagagggactgtgaggaagttggctctgcgggtgctgcctacgcagctgccgccctgggtgtttctaatgctgctatggaggatttgttaacagctgcaaccacgggcattttgaggcacattgcagctgaagaagtgtctaaggaaagagagcgaagggagcaggagaggcagcgggctgaagaggaaaggttgaaacaagagagagagctggtgttaagtgagctgagccagggcctggccgtggagctgatggaacgcgtgatgatggagtttgtgagggaaacctgctcccaggagttgaagtaagtgaaacgctggtgtcttgctgtgccaggagagtgagctttggctctgccctaggctgtgtcttgcaccactgaggatgggctattggaaatggatcttgcctgtctaagctactttgattttg

SEQ ID NO: 406035 - DNA, 2223 bp, Homo sapiens
ggcagcgcgggcctcggggtcctggggcgagacggtgagcgtgggggctgggccggcgccaggggcgccgtttccttcccccacgcagctccgcgcgcccgggcctccacatcgtcgctaacggagcgttgcggcgccggcgacccctggcgagcccggggcgggacagtggccaggccggcctgggcccagcgcgtggcctccgccgtttcgggctgtgctgggtggaagattaggctccccgggcacgccgtccccgccgagaggcctcagcttcgtggcagcgccctcgtccttccagcccgctcgagggtggccgccagggcgcgatgaaggaatgtgagaaagtgcttagcgctccagccgctccgagggaagccaggtgggaggagatcccgaaacgctaaggttttgacagcgttacagtgaattctccggctgtagagattggaggaagtcgggagaaattcgtctctaagttgtaagcttgttctaaagacgaaggggaactccctagtgctacaggctgtttcaggaagccaattaattttgtacacgtaatacttaattaccttctaataattggagcagaagatgaacccaactaatcctttcagtgggcagcagcctagtgctttttcggcgtcttctagtaatgtaggaacacttccatctaagccgccatttcgatttggtcaaccttctctttttggacaaaacagtaccttatctgggaagagctcgggattttcacaggtatccagctttccagcgtcttctggagtaagtcattcctcttcagtgcaaacattagggttcacccaaacctcaagtgttggacccttttctggacttgagcacacttccacctttgtggctacctctgggccttcaagttcatctgtgctgggaaacacaggatttagttttaaatcacccaccagtgttggggctttcccaagcacttctgcttttggacaagaagctggagaaatagtgaactctggttttgggaaaacagaattcagctttaaacctctggaaaatgcagtgttcaaaccaatactgggggctgaatctgagccagagaaaacccagagccaaattgcttctgggttttttacattttcccacccaattagtagtgcacctggaggcctggcccctttctcttttcctcaagtaacaagtagttcagctaccacttcaaattttaccttttcaaaacctgttagtagtaataattcattatctgcctttacccctgctttgtcaaaccaaaatgtagaggaagagaagagaggacctaagtcaatatttggaagttctaataatagcttcagtagcttccctgtatcatctgcggttttgggcgaacctttccaggctagcaaagcaggtgtcaggcaggggtgtgaagaagctgtttcccaggtggaaccacttcccagcctaatgaaaggactgaaaaggaaggaggaccaggatcgctccccaaggagacatggccacgagccagcagaagattcggatcctctgtcccggggcgatcatcctccagacaaacgacctgtccgcctgaatcgaccccggggaggtactttatttggtcggacgatacaggatgttttcaaaagcaataaggaagtaggtcgtctgggcaacaaggaggccaaaaaggaaactggctttgttgagtctgcagaaagtgaccacatggctatcccaggagggaatcagtctgtcctggcaccttcccggattccaggtgtgaataaagaggaagaaactgaaagtagagagaagaaagaagattctctaagaggaactccggcgcgtcagagtaacagaagcgagagcacagacagtcttgggggcttgtctccctctgaagtcacagccatccagtgcaagaatatccctgactacctcaacgacaggaccattctggagaaccattttggcaaaattgctaaagtgcagcgcatctttaccaggcgcagcaaaaagcttgcagtggtacatttctttgatcatgtgagtactcccatcttgccatttgttaccctagatttgaaccttgtcactttaaaacctgttttttttttttggtccctcagttgtttgcttactataatatagagaaagtactcaaatatcttattagcataggtgggattacaggcgtgagccactgcgcccagcctaaatgtatgcataata

SEQ ID NO: 406036 - DNA, 420 bp, Homo sapiens
gaaacgctaaggttttgacagcgttacagtgaattctccggctgtagagattggaggaagtcgggagaaattcgtctctaagttgtaaggtggaacagcattcattttcttactgccaatggaggtttttcatgaatttactaactcagtaaaaagattcggcttttttttttttaatcttaaaggatcacgctttaaacctctgtaacaaagtaattatttgtaccactctctaccccaccctccaacaaaataacctatcggctctcagaaaataataaccctttgcctgcctttgaaatagttatccttttagtatgacagtgttcaaaaattcttttcttagacttgtagcagaacatagctatgatgatctgaatttttctctttcagcttgttctaaagacgaaggggaactcc

SEQ ID NO: 406037 - DNA, 362 bp, Homo sapiens
atgacagcagcttctgttggagcacatattgtctgagctttggcattacccagacctctcttctgggattaatttttcctgaggaaaactaatgaatgaggaaggtaagctcccagaagtcaagagcctcacccaagagtgttcaagtagtgagtggtcaggttgcttttcaaagccagatccaactggctccaaagcctaaggtctttttaccttaccattcttccttcagtggttaaagatgcaaaaacagagtttcaatcacagatatgtgccactgaacaggtaaaaactgtgctcctggactggctttaggaagtccttcaatagaggagaaaagcaaattaaaatgatgtactgtt

SEQ ID NO: 406038 - DNA, 399 bp, Homo sapiens
tcgactattactactaatttcgcgggcggcgtcgaccagactctagtgtctctttctcacactattgaacctgtgatgaaaacatctgtaactactagcccacagagtgacatgatgagggagcaactgcagctgtcagaggcgacaggaacgtgtctaggcgaacgactaaagcacctggaaaggctgatccggagttcaagggaagaggaagttgcctctgagctccatctctctgcgctgctagacatggtggacatttgagcagcctgacctgtggggagggggtctctcccgaagagtttctgtttttactcaaaataatgttattctcagatgcttgatgcactgttggaaatgtgattaatttaatcatgcagataaaccatttaaatgtca

SEQ ID NO: 406039 - DNA, 6672 bp, Homo sapiens
ggcagcgcgggcctcggggtcctggggcgagacggtgagcgtgggggctgggccggcgccaggggcgccgtttccttcccccacgcagctccgcgcgcccgggcctccacatcgtcgctaacggagcgttgcggcgccggcgacccctggcgagcccggggcgggacagtggccaggccggcctgggcccagcgcgtggcctccgccgtttcgggctgtgctgggtggaagattaggctccccgggcacgccgtccccgccgagaggcctcagcttcgtggcagcgccctcgtccttccagcccgctcgagggtggccgccagggcgcgatgaaggaatgtgagaaagtgcttagcgctccagccgctccgagggaagccaggtgggaggagatcccgaaacgctaaggttttgacagcgttacagtgaattctccggctgtagagattggaggaagtcgggagaaattcgtctctaagttgtaagcttgttctaaagacgaaggggaactccctagtgctacaggctgtttcaggaagccaattaattttgtacacgtaatacttaattaccttctaataattggagcagaagatgaacccaactaatcctttcagtgggcagcagcctagtgctttttcggcgtcttctagtaatgtaggaacacttccatctaagccgccatttcgatttggtcaaccttctctttttggacaaaacagtaccttatctgggaagagctcgggattttcacaggtatccagctttccagcgtcttctggagtaagtcattcctcttcagtgcaaacattagggttcacccaaacctcaagtgttggacccttttctggacttgagcacacttccacctttgtggctacctctgggccttcaagttcatctgtgctgggaaacacaggatttagttttaaatcacccaccagtgttggggctttcccaagcacttctgcttttggacaagaagctggagaaatagtgaactctggttttgggaaaacagaattcagctttaaacctctggaaaatgcagtgttcaaaccaatactgggggctgaatctgagccagagaaaacccagagccaaattgcttctgggttttttacattttcccacccaattagtagtgcacctggaggcctggcccctttctcttttcctcaagtaacaagtagttcagctaccacttcaaattttaccttttcaaaacctgttagtagtaataattcattatctgcctttacccctgctttgtcaaaccaaaatgtagaggaagagaagagaggacctaagtcaatatttggaagttctaataatagcttcagtagcttccctgtatcatctgcggttttgggcgaacctttccaggctagcaaagcaggtgtcaggcaggggtgtgaagaagctgtttcccaggtggaaccacttcccagcctaatgaaaggactgaaaaggaaggaggaccaggatcgctccccaaggagacatggccacgagccagcagaagattcggatcctctgtcccggggcgatcatcctccagacaaacgacctgtccgcctgaatcgaccccggggaggtactttatttggtcggacgatacaggatgttttcaaaagcaataaggaagtaggtcgtctgggcaacaaggaggccaaaaaggaaactggctttgttgagtctgcagaaagtgaccacatggctatcccaggagggaatcagtctgtcctggcaccttcccggattccaggtgtgaataaagaggaagaaactgaaagtagagagaagaaagaagattctctaagaggaactccggcgcgtcagagtaacagaagcgagagcacagacagtcttgggggcttgtctccctctgaagtcacagccatccagtgcaagaatatccctgactacctcaacgacaggaccattctggagaaccattttggcaaaattgctaaagtgcagcgcatctttaccaggcgcagcaaaaagcttgcagtggtacatttctttgatcatgcatctgcagccctggctagaaagaaggggaaaagtttgcataaagacatggctatcttttggcacaggaagaaaataagccccaataagaaacccttttccctgaaggagaagaaaccaggtgacggtgaagtcagcccgagcacagaggatgcaccctttcagcactctcctcttggcaaggccgcagggaggactggtgctagcagcctcctgaataaaagctctccagtgaagaagccaagtcttctaaaggcccaccaattcgagggagactcttttgactcagcctccgagggctccgagggcctcgggccatgtgtgctctccctcagtaccctgataggcactgtggctgagacatccaaggagaagtaccgcctgcttgaccagagagacaggatcatgcggcaagctcgggtgaagagaaccgatctggacaaagcgaggacttttgttggcacctgcctggatatgtgtcctgagaaggagaggtacatgcgggagacccgtagccagctgagcgtgttcgaagtggtcccagggactgaccaggtggaccacgcagcagctgtgaaagagtacagtcggtcctcggcggatcaggaggagcccctgccccacgagctgcggcccttgccagtgctcagcaggaccatggactacctggtgacccagatcatggaccagaaggagggcagcctgcgggattggtatgacttcgtgtggaaccgcacgcgtggcatacggaaggatatcacgcagcagcacctctgtgaccccctgacggtgtccctgattgagaagtgcacccggtttcacatccactgtgcccacttcatgtgtgaggagcccatgtcctcctttgatgccaagatcaataatgagaacatgaccaagtgcctgcagagcctgaaggagatgtaccaggacctgagaaacaagggtgtcttctgtgccagcgaagcggagttccagggctacaatgttctgctcagtctcaacaagggagacatcctaagagaagtacaacagttccatcctgctgttagaaactcatctgaggtgaaatttgctgttcaggcttttgctgcattgaacagtaataattttgtgagatttttcaaactggtccagtcagcttcttacctgaacgcttgtcttttacactgttacttcagtcagatccgcaaggatgctctccgggcgctcaactttgcgtacacggtgagcacacagcgatctaccatctttcccctggatggtgtggtgcgcatgctgctgttcagagactgtgaagaggccaccgacttcctcacctgccacggcctcaccgtttccgacggctgtgtggagctgaaccggtctgcattcctggaaccagagggattatccaagaccaggaagtcggtgtttattactaggaagctgacggtgtcagtcggggaaattgtgaacggagggccattgccccccgtccctcgtcatacccctgtgtgcagcttcaactcccagaacaagtacatcggggagagcctggccgcggagctgcccgtcagcacccagagacccggctccgacacagtgggcggagggagaggagaggagtgtggtgtagagccggatgcacccctgtccagtctcccacagtctctaccagcccctgcgccctcaccagtgcctctgcctcctgtcctggcactgaccccgtctgtggcgcccagcctcttccagctgtctgtgcagcctgaaccaccgcctccagagcccgtgcccatgtactctgacgaggacctggcgcaggtggtggacgagctcatccaggaggccctgcagagggactgtgaggaagttggctctgcgggtgctgcctacgcagctgccgccctgggtgtttctaatgctgctatggaggatttgttaacagctgcaaccacgggcattttgaggcacattgcagctgaagaagtgtctaaggaaagagagcgaagggagcaggagaggcagcgggctgaagaggaaaggttgaaacaagagagagagctggtgttaagtgagctgagccagggcctggccgtggagctgatggaacgcgtgatgatggagtttgtgagggaaacctgctcccaggagttgaagaatgcagtagagacagaccagagggtccgtgtggcccgttgctgtgaggatgtctgtgcccacttagtggacttgtttctcgtggaggaaatcttccagactgcaaaggagaccctccaggagcttcagtgcttctgcaagtatctacagcggtggagggaagctgtcacagcccgcaagaaactgaggcgccaaatgcgggctttccctgctgcgccctgctgcgtggacgtgagcgaccggctgagggcgctggcgcccagcgcagagtgccccattgctgaagagaacctggccaggggcctcctggacctgggccatgcagggagattgggcatctcctgcaccaggttaaggcggctcagaaacaagacagctcaccagatgaaggttcagcacttctaccagcagctgctgagtgatgtggcatgggcgtctctggacctgccatccctcgtggctgagcacctccctgggaggcaggagcatgtgttttggaagctggtgctggtgttgccggatgtagaggagcagtccccagagagttgtggcagaattctagcaaattggttaaaagtcaagttcatgggagatgaaggctcagtggatgacacatccagcgatgctggtgggattcagacgctttcgcttttcaactcacttagcagcaaaggggatcagatgatttctgttaacgtgtgtataaaggtggcccatggcgccctcagtgatggtgccattgatgctgtggagacacagaaggacctcctgggagccagtgggctcatgctgctgcttccccccaaaatgaagagtgaggacatggcagaggaggacgtgtactggctgtcggccttgctgcagctcaagcagctcctgcaggctaagcccttccagcctgcgcttcctctggtggttcttgtgcctagcccaggaggggacgccgttgagaaggaagtagaagatggtctgatgctacaggacttggtttcagctaagctgatttcagattacactgttaccgagatccctgataccattaatgatctacaaggttcaactaaggttttgcaagcagtgcagtggctggtttcccactgcccccattcccttgacctctgctgccagactctcattcagtacgtcgaagacgggattggccatgagtttagtggccgctttttccatgacagaagagagaggcgtctgggcggtcttgcttctcaggagcctggcgccatcattgagctgtttaacagtgtgctgcagttcctggcttctgtggtgtcctctgaacagctgtgtgacctgtcctggcctgtcactgagtttgctgaggcagggggcagccggctgcttcctcacctgcactggaatgccccagagcacctggcctggctgaagcaggctgtgctcgggttccagcttccgcagatggaccttccacccctgggggccccctggctccccgtgtgctccatggttgtccagtacgcctcccagatccccagctcacgccagacacagcctgtcctccagtcccaggtggagaacctgctccacagaacctactgtaggtggaagagcaagagtccctccccagtccatggggcaggcccctcggtcatggagatcccatgggatgatcttatcgccttgtgtatcaaccacaagctgagagactggacgcccccccggcttcctgttacatcagaggcgctgagtgaagatggtcagatatgtgtgtatttttttaaaaacgatttgaaaaaatatgatgttcctttgtcgtgggaacaagccaggttgcagacgcagaaggagctacagctgagagagggacgtttggcaataaagccttttcatccttctgcaaacaattttcccataccattgcttcacatgcaccgtaactggaagaggagcacagagtgtgctcaagaggggaggattcccagcacagaggatctgatgcgaggagcttctgctgaggagctcttggcgcagtgtttgtcgagcagtctgctgctggagaaagaagagaacaagaggtttgaagatcagcttcagcaatggttgtctgaagactcaggagcatttacggatttaacttcccttcccctctatcttcctcagactctagtgtctctttctcacactattgaacctgtgatgaaaacatctgtaactactagcccacagagtgacatgatgagggagcaactgcagctgtcagaggcgacaggaacgtgtctaggcgaacgactaaagcacctggaaaggctgatccggagttcaagggaagaggaagttgcctctgagctccatctctctgcgctgctagacatggtggacatttgagcagcctgacctgtggggagggggtctctcccgaagagtttctgtttttactcaaaataatgttattctcagatgcttgatgcactgttggaaatgtgattaatttaatcatgcagataaaccatttaaatgtca

SEQ ID NO: 406040 - DNA, 7230 bp, Homo sapiens
ggcagcgcgggcctcggggtcctggggcgagacggtgagcgtgggggctgggccggcgccaggggcgccgtttccttcccccacgcagctccgcgcgcccgggcctccacatcgtcgctaacggagcgttgcggcgccggcgacccctggcgagcccggggcgggacagtggccaggccggcctgggcccagcgcgtggcctccgccgtttcgggctgtgctgggtggaagattaggctccccgggcacgccgtccccgccgagaggcctcagcttcgtggcagcgccctcgtccttccagcccgctcgagggtggccgccagggcgcgatgaaggaatgtgagaaagtgcttagcgctccagccgctccgagggaagccaggtgggaggagatcccgaaacgctaaggttttgacagcgttacagtgaattctccggctgtagagattggaggaagtcgggagaaattcgtctctaagttgtaagcttgttctaaagacgaaggggaactccctagtgctacaggctgtttcaggaagccaattaattttgtacacgtaatacttaattaccttctaataattggagcagaagatgaacccaactaatcctttcagtgggcagcagcctagtgctttttcggcgtcttctagtaatgtaggaacacttccatctaagccgccatttcgatttggtcaaccttctctttttggacaaaacagtaccttatctgggaagagctcgggattttcacaggtatccagctttccagcgtcttctggagtaagtcattcctcttcagtgcaaacattagggttcacccaaacctcaagtgttggacccttttctggacttgagcacacttccacctttgtggctacctctgggccttcaagttcatctgtgctgggaaacacaggatttagttttaaatcacccaccagtgttggggctttcccaagcacttctgcttttggacaagaagctggagaaatagtgaactctggttttgggaaaacagaattcagctttaaacctctggaaaatgcagtgttcaaaccaatactgggggctgaatctgagccagagaaaacccagagccaaattgcttctgggttttttacattttcccacccaattagtagtgcacctggaggcctggcccctttctcttttcctcaagtaacaagtagttcagctaccacttcaaattttaccttttcaaaacctgttagtagtaataattcattatctgcctttacccctgctttgtcaaaccaaaatgtagaggaagagaagagaggacctaagtcaatatttggaagttctaataatagcttcagtagcttccctgtatcatctgcggttttgggcgaacctttccaggctagcaaagcaggtgtcaggcaggggtgtgaagaagctgtttcccaggtggaaccacttcccagcctaatgaaaggactgaaaaggaaggaggaccaggatcgctccccaaggagacatggccacgagccagcagaagattcggatcctctgtcccggggcgatcatcctccagacaaacgacctgtccgcctgaatcgaccccggggaggtactttatttggtcggacgatacaggatgttttcaaaagcaataaggaagtaggtcgtctgggcaacaaggaggccaaaaaggaaactggctttgttgagtctgcagaaagtgaccacatggctatcccaggagggaatcagtctgtcctggcaccttcccggattccaggtgtgaataaagaggaagaaactgaaagtagagagaagaaagaagattctctaagaggaactccggcgcgtcagagtaacagaagcgagagcacagacagtcttgggggcttgtctccctctgaagtcacagccatccagtgcaagaatatccctgactacctcaacgacaggaccattctggagaaccattttggcaaaattgctaaagtgcagcgcatctttaccaggcgcagcaaaaagcttgcagtggtacatttctttgatcatgcatctgcagccctggctagaaagaaggggaaaagtttgcataaagacatggctatcttttggcacaggaagaaaataagccccaataagaaacccttttccctgaaggagaagaaaccaggtgacggtgaagtcagcccgagcacagaggatgcaccctttcagcactctcctcttggcaaggccgcagggaggactggtgctagcagcctcctgaataaaagctctccagtgaagaagccaagtcttctaaaggcccaccaattcgagggagactcttttgactcagcctccgagggctccgagggcctcgggccatgtgtgctctccctcagtaccctgataggcactgtggctgagacatccaaggagaagtaccgcctgcttgaccagagagacaggatcatgcggcaagctcgggtgaagagaaccgatctggacaaagcgaggacttttgttggcacctgcctggatatgtgtcctgagaaggagaggtacatgcgggagacccgtagccagctgagcgtgttcgaagtggtcccagggactgaccaggtggaccacgcagcagctgtgaaagagtacagtcggtcctcggcggatcaggaggagcccctgccccacgagctgcggcccttgccagtgctcagcaggaccatggactacctggtgacccagatcatggaccagaaggagggcagcctgcgggattggtatgacttcgtgtggaaccgcacgcgtggcatacggaaggtattggctgcctccaacctggatgctaaaaaatccacgcaaattccaaagtcaaactgatatttttattactctgttatatattttatctgtaacaaaaatgtacttttgtgggccaggtgcagtggctcaggcctgtaatcccagcactctgggaggccgaggtgggtggatcacctgaggtcaggagtttgagaccagcctggccaacatggttaaaccccatctctactgaaaatacaaaaattagcttggcgtggtggcacacgcctgtagtcccagctactcgagcggctgaagcagaattgcttgaacctgggaggcggaggttgtggtgagccaagatgacaccactgcactccagcctggcttctgtctcaaaaaaaaaaacaaaccccaggacttttatttaagtcactacaaagtcctattaaaatgtgcatcatgggctttgtttcaaattgaaaagtgagaaattgaggtcgtagcatgatccttctcacggttgcctctttgcatgggaatgtgtgtgtgatcctccccctcgcctgtggccaggatatcacgcagcagcacctctgtgaccccctgacggtgtccctgattgagaagtgcacccggtttcacatccactgtgcccacttcatgtgtgaggagcccatgtcctcctttgatgccaagatcaataatgagaacatgaccaagtgcctgcagagcctgaaggagatgtaccaggacctgagaaacaagggtgtcttctgtgccagcgaagcggagttccagggctacaatgttctgctcagtctcaacaagggagacatcctaagagaagtacaacagttccatcctgctgttagaaactcatctgaggtgaaatttgctgttcaggcttttgctgcattgaacagtaataattttgtgagatttttcaaactggtccagtcagcttcttacctgaacgcttgtcttttacactgttacttcagtcagatccgcaaggatgctctccgggcgctcaactttgcgtacacggtgagcacacagcgatctaccatctttcccctggatggtgtggtgcgcatgctgctgttcagagactgtgaagaggccaccgacttcctcacctgccacggcctcaccgtttccgacggctgtgtggagctgaaccggtctgcattcctggaaccagagggattatccaagaccaggaagtcggtgtttattactaggaagctgacggtgtcagtcggggaaattgtgaacggagggccattgccccccgtccctcgtcatacccctgtgtgcagcttcaactcccagaacaagtacatcggggagagcctggccgcggagctgcccgtcagcacccagagacccggctccgacacagtgggcggagggagaggagaggagtgtggtgtagagccggatgcacccctgtccagtctcccacagtctctaccagcccctgcgccctcaccagtgcctctgcctcctgtcctggcactgaccccgtctgtggcgcccagcctcttccagctgtctgtgcagcctgaaccaccgcctccagagcccgtgcccatgtactctgacgaggacctggcgcaggtggtggacgagctcatccaggaggccctgcagagggactgtgaggaagttggctctgcgggtgctgcctacgcagctgccgccctgggtgtttctaatgctgctatggaggatttgttaacagctgcaaccacgggcattttgaggcacattgcagctgaagaagtgtctaaggaaagagagcgaagggagcaggagaggcagcgggctgaagaggaaaggttgaaacaagagagagagctggtgttaagtgagctgagccagggcctggccgtggagctgatggaacgcgtgatgatggagtttgtgagggaaacctgctcccaggagttgaagaatgcagtagagacagaccagagggtccgtgtggcccgttgctgtgaggatgtctgtgcccacttagtggacttgtttctcgtggaggaaatcttccagactgcaaaggagaccctccaggagcttcagtgcttctgcaagtatctacagcggtggagggaagctgtcacagcccgcaagaaactgaggcgccaaatgcgggctttccctgctgcgccctgctgcgtggacgtgagcgaccggctgagggcgctggcgcccagcgcagagtgccccattgctgaagagaacctggccaggggcctcctggacctgggccatgcagggagattgggcatctcctgcaccaggttaaggcggctcagaaacaagacagctcaccagatgaaggttcagcacttctaccagcagctgctgagtgatgtggcatgggcgtctctggacctgccatccctcgtggctgagcacctccctgggaggcaggagcatgtgttttggaagctggtgctggtgttgccggatgtagaggagcagtccccagagagttgtggcagaattctagcaaattggttaaaagtcaagttcatgggagatgaaggctcagtggatgacacatccagcgatgctggtgggattcagacgctttcgcttttcaactcacttagcagcaaaggggatcagatgatttctgttaacgtgtgtataaaggtggcccatggcgccctcagtgatggtgccattgatgctgtggagacacagaaggacctcctgggagccagtgggctcatgctgctgcttccccccaaaatgaagagtgaggacatggcagaggaggacgtgtactggctgtcggccttgctgcagctcaagcagctcctgcaggctaagcccttccagcctgcgcttcctctggtggttcttgtgcctagcccaggaggggacgccgttgagaaggaagtagaagatggtctgatgctacaggacttggtttcagctaagctgatttcagattacactgttaccgagatccctgataccattaatgatctacaaggttcaactaaggttttgcaagcagtgcagtggctggtttcccactgcccccattcccttgacctctgctgccagactctcattcagtacgtcgaagacgggattggccatgagtttagtggccgctttttccatgacagaagagagaggcgtctgggcggtcttgcttctcaggagcctggcgccatcattgagctgtttaacagtgtgctgcagttcctggcttctgtggtgtcctctgaacagctgtgtgacctgtcctggcctgtcactgagtttgctgaggcagggggcagccggctgcttcctcacctgcactggaatgccccagagcacctggcctggctgaagcaggctgtgctcgggttccagcttccgcagatggaccttccacccctgggggccccctggctccccgtgtgctccatggttgtccagtacgcctcccagatccccagctcacgccagacacagcctgtcctccagtcccaggtggagaacctgctccacagaacctactgtaggtggaagagcaagagtccctccccagtccatggggcaggcccctcggtcatggagatcccatgggatgatcttatcgccttgtgtatcaaccacaagctgagagactggacgcccccccggcttcctgttacatcagaggcgctgagtgaagatggtcagatatgtgtgtatttttttaaaaacgatttgaaaaaatatgatgttcctttgtcgtgggaacaagccaggttgcagacgcagaaggagctacagctgagagagggacgtttggcaataaagccttttcatccttctgcaaacaattttcccataccattgcttcacatgcaccgtaactggaagaggagcacagagtgtgctcaagaggggaggattcccagcacagaggatctgatgcgaggagcttctgctgaggagctcttggcgcagtgtttgtcgagcagtctgctgctggagaaagaagagaacaagaggtttgaagatcagcttcagcaatggttgtctgaagactcaggagcatttacggatttaacttcccttcccctctatcttcctcagactctagtgtctctttctcacactattgaacctgtgatgaaaacatctgtaactactagcccacagagtgacatgatgagggagcaactgcagctgtcagaggcgacaggaacgtgtctaggcgaacgactaaagcacctggaaaggctgatccggagttcaagggaagaggaagttgcctctgagctccatctctctgcgctgctagacatggtggacatttgagcagcctgacctgtggggagggggtctctcccgaagagtttctgtttttactcaaaataatgttattctcagatgcttgatgcactgttggaaatgtgattaatttaatcatgcagataaaccatttaaatgtca

SEQ ID NO: 406041 - DNA, 5469 bp, Homo sapiens
  misc_feature (535)..(535): n is a, c, g, or t
ggtctggctttgcagtcggctgagctgagctgggggaagagcgatgggggtgtgccctgggaccagcacatctgacgtaggccccacatgttcatttctgaaaatagtttctcctcaccagtgagaaaatgaggaaggaatcctcctcatgagacaggtgagtgaaccaggagagggagttccaggtgccctgcaaggttgttagcagttccctgttcccagatagttttgtcaaagatctcagaataagagaggaaaaaattatgtaaaacaaaaatgcgaagaatggggtagtgagaatgaatgaatgtaaaaccctggtctgatccataattagtcacttacatgcgaagtctggcgagctctctggccctctgcttgtggtggaccctctgcttgtggttaagctggacttatggtggacagtgtcccctttagttctaagaatcccctatcaatggtgaacctcttttttttttctttgtattttcctcaagaactgtgtgacagaatatctagatgtgtggttgatttnaattttttatttcattttatttttgagaccgagtcctgctctgttgcccaggccggagtacagtagtgctatcttggctcactgcaacctccacctcctgggttcaagcgattctcttgcctcagtctcctgagtagctgggattacaggcacataccaccatgcccgcctcatttttttgtatttttagtagagacagggtttcaccatgttggccaggcttgtccggaactcctgacctcaggtgatccacctgcctcggcctcccaaagcgctgggattacagttagagtctccatgcccggctgattttaaattttaaaattaagccttgtatagcctgggcaacatggtgagacccttccacaaaaatgaataaataaataaaattaaccaggtgtggtgatgtgtgcctgtagttccagcgactggggaggctgaggtgggaggatcccttgagcccaggaggtcaaggctgcagtaagctgtgatcatgccactgtcctccagtctgggtgacaaagcaagaccctatctcttaaaaaaaaaaaaaaaaaacccaggtgtggtggcccatggcctgttatcacagcactttgggaggccgagatgagagggttgcttgaggccaggaggttgaagctgcaatgaactgtgattgtgccagtgcactccagcctgggtgatagagcaagtactctgtctcaaaaaaaaaaaaaattaaactggttatgaaagattgctgtattgtctttttctacgtgacaagcatttgttctccatcacgaataattcagtcaaaatcaattcatttctaaacaaaaagagttaagttttctgttttttagactttaccatccagcacagctgacagtccattggcattactttaaagtaactttttgataactgattcctaaattgctttttgaatttgtttattctattcattattgttttgaaggaaacctttgtcaaaccaatccaagcgtggtagttagtaaactatgaatttaacggcacatttcaccagtaagaccctccttctcagtatggttgaaatccagtatcattattacttgagacagggtcttgctctgtcacccaggctggagtacagtgatgcgatcacagctcactgcagcctcaacctcctgggctcaaacgatcctcccaccttggcctccccacgttttgggattacaggtgtgagccactgcatctggccagtgaaatctattatttatcagatctatcttcatgaaaattttgtcttatttaaaataacattccaaccccttttctctcctttaattaacagagaagtacaacagttccatcctgctgttagaaactcatctgaggtgaaatttgctgttcaggcttttgctgcattgaacagtaataattttgtgagatttttcaaactggtccagtcagcttcttacctgaacgcttgtcttttacactgttacttcagtcagatccgcaaggatgctctccgggcgctcaactttgcgtacacggtgagcacacagcgatctaccatctttcccctggatggtgtggtgcgcatgctgctgttcagagactgtgaagaggccaccgacttcctcacctgccacggcctcaccgtttccgacggctgtgtggagctgaaccggtctgcattcctggaaccagagggattatccaagaccaggaagtcggtgtttattactaggaagctgacggtgtcagtcggggaaattgtgaacggagggccattgccccccgtccctcgtcatacccctgtgtgcagcttcaactcccagaacaagtacatcggggagagcctggccgcggagctgcccgtcagcacccagagacccggctccgacacagtgggcggagggagaggagaggagtgtggtgtagagccggatgcacccctgtccagtctcccacagtctctaccagcccctgcgccctcaccagtgcctctgcctcctgtcctggcactgaccccgtctgtggcgcccagcctcttccagctgtctgtgcagcctgaaccaccgcctccagagcccgtgcccatgtactctgacgaggacctggcgcaggtggtggacgagctcatccaggaggccctgcagagggactgtgaggaagttggctctgcgggtgctgcctacgcagctgccgccctgggtgtttctaatgctgctatggaggatttgttaacagctgcaaccacgggcattttgaggcacattgcagctgaagaagtgtctaaggaaagagagcgaagggagcaggagaggcagcgggctgaagaggaaaggttgaaacaagagagagagctggtgttaagtgagctgagccagggcctggccgtggagctgatggaacgcgtgatgatggagtttgtgagggaaacctgctcccaggagttgaagaatgcagtagagacagaccagagggtccgtgtggcccgttgctgtgaggatgtctgtgcccacttagtggacttgtttctcgtggaggaaatcttccagactgcaaaggagaccctccaggagcttcagtgcttctgcaagtatctacagcggtggagggaagctgtcacagcccgcaagaaactgaggcgccaaatgcgggctttccctgctgcgccctgctgcgtggacgtgagcgaccggctgagggcgctggcgcccagcgcagagtgccccattgctgaagagaacctggccaggggcctcctggacctgggccatgcagggagattgggcatctcctgcaccaggttaaggcggctcagaaacaagacagctcaccagatgaaggttcagcacttctaccagcagctgctgagtgatgtggcatgggcgtctctggacctgccatccctcgtggctgagcacctccctgggaggcaggagcatgtgttttggaagctggtgctggtgttgccggatgtagaggagcagtccccagagagttgtggcagaattctagcaaattggttaaaagtcaagttcatgggagatgaaggctcagtggatgacacatccagcgatgctggtgggattcagacgctttcgcttttcaactcacttagcagcaaaggggatcagatgatttctgttaacgtgtgtataaaggtggcccatggcgccctcagtgatggtgccattgatgctgtggagacacagaaggacctcctgggagccagtgggctcatgctgctgcttccccccaaaatgaagagtgaggacatggcagaggaggacgtgtactggctgtcggccttgctgcagctcaagcagctcctgcaggctaagcccttccagcctgcgcttcctctggtggttcttgtgcctagcccaggaggggacgccgttgagaaggaagtagaagatggtctgatgctacaggacttggtttcagctaagctgatttcagattacactgttaccgagatccctgataccattaatgatctacaaggttcaactaaggttttgcaagcagtgcagtggctggtttcccactgcccccattcccttgacctctgctgccagactctcattcagtacgtcgaagacgggattggccatgagtttagtggccgctttttccatgacagaagagagaggcgtctgggcggtcttgcttctcaggagcctggcgccatcattgagctgtttaacagtgtgctgcagttcctggcttctgtggtgtcctctgaacagctgtgtgacctgtcctggcctgtcactgagtttgctgaggcagggggcagccggctgcttcctcacctgcactggaatgccccagagcacctggcctggctgaagcaggctgtgctcgggttccagcttccgcagatggaccttccacccctgggggccccctggctccccgtgtgctccatggttgtccagtacgcctcccagatccccagctcacgccagacacagcctgtcctccagtcccaggtggagaacctgctccacagaacctactgtaggtggaagagcaagagtccctccccagtccatggggcaggcccctcggtcatggagatcccatgggatgatcttatcgccttgtgtatcaaccacaagctgagagactggacgcccccccggcttcctgttacatcagaggcgctgagtgaagatggtcagatatgtgtgtatttttttaaaaacgatttgaaaaaatatgatgttcctttgtcgtgggaacaagccaggttgcagacgcagaaggagctacagctgagagagggacgtttggcaataaagccttttcatccttctgcaaacaattttcccataccattgcttcacatgcaccgtaactggaagaggagcacagagtgtgctcaagaggggaggattcccagcacagaggatctgatgcgaggagcttctgctgaggagctcttggcgcagtgtttgtcgagcagtctgctgctggagaaagaagagaacaagaggtttgaagatcagcttcagcaatggttgtctgaagactcaggagcatttacggatttaacttcccttcccctctatcttcctcagactctagtgtctctttctcacactattgaacctgtgatgaaaacatctgtaactactagcccacagagtgacatgatgagggagcaactgcagctgtcagaggcgacaggaacgtgtctaggcgaacgactaaagcacctggaaaggctgatccggagttcaagggaagaggaagttgcctctgagctccatctctctgcgctgctagacatggtggacatttgagcagcctgacctgtggggagggggtctctcccgaagagtttctgtttttactcaaaataatgttattctcagatgcttgatgcactgttggaaatgtgattaatttaatcatgcagataaaccatttaaatgtca

SEQ ID NO: 406042 - DNA, 4709 bp, Homo sapiens
aaggctcttgttagaatgccgtgaacagttgtctccaactattatatgtcattccacgggattggtttcctgctggcattccatggtctccggggtcctctgcagcaccttcctggccttttgtcatgtggatgctgcacagctgacttcacctggtcttgttgatggacagtttgtttcatgatttctcttatgaataaaaccttcacaagccatccttctctatgagagtgtttgcttggcacgcattcctgagcactgcccctgagcagaccgcctatgatctctaagcttgggttccgtgttgccaaagcgccttctggtggactcagcccaggaggagcccatgtgccccacgctggccatggctgtggtcatgggctgactgcatgtgtctgactgggccttcgtctgagactgcagtgatttcgctcctcctctcagatccgcaaggatgctctccgggcgctcaactttgcgtacacggtgagcacacagcgatctaccatctttcccctggatggtgtggtgcgcatgctgctgttcagagactgtgaagaggccaccgacttcctcacctgccacggcctcaccgtttccgacgggtaagagctgagaatggaactgtggggcccctgtctccttttttcttgttaattctgatgaagggctgtgaagggctggctgcttgcctgacttgaagaaggtgcattccctctgccatgcaggtgaacacacgagactcagaatggctgggggtgttcccaaggtcacatcctggctgtcagcacattgagggctcagaccaagttctttgtgactccaaaatcagtccttttcatgacttgctgacaaacctaaagataaaagttagggccttctttattctttcccttgactgcctttgccagccaatgacggacaacctctgacggctgggatggaggcacccgcaggccagccggagtcttctccggtacttaccagtcagagtggtgagactcacagacgctctctcagaaactggcagcttacactcaacacccggtgcctagttccccaccctgtctcctctaactcctcacctgcctcctgcctgtctcctccttccagttctgtctccttctagttctgtctcctccttccagttctgtcctcagaaaattagacggttttgggtgagccagcaaggaggcaggagtgagtcagcgtgcgtctgttaacacgctgggcttagtggttctagggacctacagaggctccagggtgggcggcagtgggacctggcgcctgtgctttctgtcatttacacatggctgtggtgacacccaaggggcttgcagtactcggcagggcactgagggcgaagctgtcttctcccctggtgacacccctcgggggtcttttgtggtctgggtagctgtgtggagctgaaccggtctgcattcctggaaccagagggattatccaagaccaggaagtcggtgtttattactaggaagctgacggtgtcagtcggggaaattgtgaacggagggccattgccccccgtccctcgtcatacccctgtgtgcagcttcaactcccagaacaagtacatcggggagagcctggccgcggagctgcccgtcagcacccagagacccggctccgacacagtgggcggagggagaggagaggagtgtggtgtagagccggatgcacccctgtccagtctcccacagtctctaccagcccctgcgccctcaccagtgcctctgcctcctgtcctggcactgaccccgtctgtggcgcccagcctcttccagctgtctgtgcagcctgaaccaccgcctccagagcccgtgcccatgtactctgacgaggacctggcgcaggtggtggacgagctcatccaggaggccctgcagagggactgtgaggaagttggctctgcgggtgctgcctacgcagctgccgccctgggtgtttctaatgctgctatggaggatttgttaacagctgcaaccacgggcattttgaggcacattgcagctgaagaagtgtctaaggaaagagagcgaagggagcaggagaggcagcgggctgaagaggaaaggttgaaacaagagagagagctggtgttaagtgagctgagccagggcctggccgtggagctgatggaacgcgtgatgatggagtttgtgagggaaacctgctcccaggagttgaagaatgcagtagagacagaccagagggtccgtgtggcccgttgctgtgaggatgtctgtgcccacttagtggacttgtttctcgtggaggaaatcttccagactgcaaaggagaccctccaggagcttcagtgcttctgcaagtatctacagcggtggagggaagctgtcacagcccgcaagaaactgaggcgccaaatgcgggctttccctgctgcgccctgctgcgtggacgtgagcgaccggctgagggcgctggcgcccagcgcagagtgccccattgctgaagagaacctggccaggggcctcctggacctgggccatgcagggagattgggcatctcctgcaccaggttaaggcggctcagaaacaagacagctcaccagatgaaggttcagcacttctaccagcagctgctgagtgatgtggcatgggcgtctctggacctgccatccctcgtggctgagcacctccctgggaggcaggagcatgtgttttggaagctggtgctggtgttgccggatgtagaggagcagtccccagagagttgtggcagaattctagcaaattggttaaaagtcaagttcatgggagatgaaggctcagtggatgacacatccagcgatgctggtgggattcagacgctttcgcttttcaactcacttagcagcaaaggggatcagatgatttctgttaacgtgtgtataaaggtggcccatggcgccctcagtgatggtgccattgatgctgtggagacacagaaggacctcctgggagccagtgggctcatgctgctgcttccccccaaaatgaagagtgaggacatggcagaggaggacgtgtactggctgtcggccttgctgcagctcaagcagctcctgcaggctaagcccttccagcctgcgcttcctctggtggttcttgtgcctagcccaggaggggacgccgttgagaaggaagtagaagatggtctgatgctacaggacttggtttcagctaagctgatttcagattacactgttaccgagatccctgataccattaatgatctacaaggttcaactaaggttttgcaagcagtgcagtggctggtttcccactgcccccattcccttgacctctgctgccagactctcattcagtacgtcgaagacgggattggccatgagtttagtggccgctttttccatgacagaagagagaggcgtctgggcggtcttgcttctcaggagcctggcgccatcattgagctgtttaacagtgtgctgcagttcctggcttctgtggtgtcctctgaacagctgtgtgacctgtcctggcctgtcactgagtttgctgaggcagggggcagccggctgcttcctcacctgcactggaatgccccagagcacctggcctggctgaagcaggctgtgctcgggttccagcttccgcagatggaccttccacccctgggggccccctggctccccgtgtgctccatggttgtccagtacgcctcccagatccccagctcacgccagacacagcctgtcctccagtcccaggtggagaacctgctccacagaacctactgtaggtggaagagcaagagtccctccccagtccatggggcaggcccctcggtcatggagatcccatgggatgatcttatcgccttgtgtatcaaccacaagctgagagactggacgcccccccggcttcctgttacatcagaggcgctgagtgaagatggtcagatatgtgtgtatttttttaaaaacgatttgaaaaaatatgatgttcctttgtcgtgggaacaagccaggttgcagacgcagaaggagctacagctgagagagggacgtttggcaataaagccttttcatccttctgcaaacaattttcccataccattgcttcacatgcaccgtaactggaagaggagcacagagtgtgctcaagaggggaggattcccagcacagaggatctgatgcgaggagcttctgctgaggagctcttggcgcagtgtttgtcgagcagtctgctgctggagaaagaagagaacaagaggtttgaagatcagcttcagcaatggttgtctgaagactcaggagcatttacggatttaacttcccttcccctctatcttcctcagactctagtgtctctttctcacactattgaacctgtgatgaaaacatctgtaactactagcccacagagtgacatgatgagggagcaactgcagctgtcagaggcgacaggaacgtgtctaggcgaacgactaaagcacctggaaaggctgatccggagttcaagggaagaggaagttgcctctgagctccatctctctgcgctgctagacatggtggacatttgagcagcctgacctgtggggagggggtctctcccgaagagtttctgtttttactcaaaataatgttattctcagatgcttgatgcactgttggaaatgtgattaatttaatcatgcagataaaccatttaaatgtca

SEQ ID NO: 406043 - DNA, 8462 bp, Homo sapiens
ggcagcgcgggcctcggggtcctggggcgagacggtgagcgtgggggctgggccggcgccaggggcgccgtttccttcccccacgcagctccgcgcgcccgggcctccacatcgtcgctaacggagcgttgcggcgccggcgacccctggcgagcccggggcgggacagtggccaggccggcctgggcccagcgcgtggcctccgccgtttcgggctgtgctgggtggaagattaggctccccgggcacgccgtccccgccgagaggcctcagcttcgtggcagcgccctcgtccttccagcccgctcgagggtggccgccagggcgcgatgaaggaatgtgagaaagtgcttagcgctccagccgctccgagggaagccaggtgggaggagatcccgaaacgctaaggttttgacagcgttacagtgaattctccggctgtagagattggaggaagtcgggagaaattcgtctctaagttgtaagcttgttctaaagacgaaggggaactccctagtgctacaggctgtttcaggaagccaattaattttgtacacgtaatacttaattaccttctaataattggagcagaagatgaacccaactaatcctttcagtgggcagcagcctagtgctttttcggcgtcttctagtaatgtaggaacacttccatctaagccgccatttcgatttggtcaaccttctctttttggacaaaacagtaccttatctgggaagagctcgggattttcacaggtatccagctttccagcgtcttctggagtaagtcattcctcttcagtgcaaacattagggttcacccaaacctcaagtgttggacccttttctggacttgagcacacttccacctttgtggctacctctgggccttcaagttcatctgtgctgggaaacacaggatttagttttaaatcacccaccagtgttggggctttcccaagcacttctgcttttggacaagaagctggagaaatagtgaactctggttttgggaaaacagaattcagctttaaacctctggaaaatgcagtgttcaaaccaatactgggggctgaatctgagccagagaaaacccagagccaaattgcttctgggttttttacattttcccacccaattagtagtgcacctggaggcctggcccctttctcttttcctcaagtaacaagtagttcagctaccacttcaaattttaccttttcaaaacctgttagtagtaataattcattatctgcctttacccctgctttgtcaaaccaaaatgtagaggaagagaagagaggacctaagtcaatatttggaagttctaataatagcttcagtagcttccctgtatcatctgcggttttgggcgaacctttccaggctagcaaagcaggtgtcaggcaggggtgtgaagaagctgtttcccaggtggaaccacttcccagcctaatgaaaggactgaaaaggaaggaggaccaggatcgctccccaaggagacatggccacgagccagcagaagattcggatcctctgtcccggggcgatcatcctccagacaaacgacctgtccgcctgaatcgaccccggggaggtactttatttggtcggacgatacaggatgttttcaaaagcaataaggaagtaggtcgtctgggcaacaaggaggccaaaaaggaaactggctttgttgagtctgcagaaagtgaccacatggctatcccaggagggaatcagtctgtcctggcaccttcccggattccaggtgtgaataaagaggaagaaactgaaagtagagagaagaaagaagattctctaagaggaactccggcgcgtcagagtaacagaagcgagagcacagacagtcttgggggcttgtctccctctgaagtcacagccatccagtgcaagaatatccctgactacctcaacgacaggaccattctggagaaccattttggcaaaattgctaaagtgcagcgcatctttaccaggcgcagcaaaaagcttgcagtggtacatttctttgatcatgcatctgcagccctggctagaaagaaggggaaaagtttgcataaagacatggctatcttttggcacaggaagaaaataagccccaataagaaacccttttccctgaaggagaagaaaccaggtgacggtgaagtcagcccgagcacagaggatgcaccctttcagcactctcctcttggcaaggccgcagggaggactggtgctagcagcctcctgaataaaagctctccagtgaagaagccaagtcttctaaaggcccaccaattcgagggagactcttttgactcagcctccgagggctccgagggcctcgggccatgtgtgctctccctcagtaccctgataggcactgtggctgagacatccaaggagaagtaccgcctgcttgaccagagagacaggatcatgcggcaagctcgggtgaagagaaccgatctggacaaagcgaggacttttgttggcacctgcctggatatgtgtcctgagaaggagaggtacatgcgggagacccgtagccagctgagcgtgttcgaagtggtcccagggactgaccaggtggaccacgcagcagctgtgaaagagtacagtcggtcctcggcggatcaggaggagcccctgccccacgagctgcggcccttgccagtgctcagcaggaccatggactacctggtgacccagatcatggaccagaaggagggcagcctgcgggattggtatgacttcgtgtggaaccgcacgcgtggcatacggaaggatatcacgcagcagcacctctgtgaccccctgacggtgtccctgattgagaagtgcacccggtttcacatccactgtgcccacttcatgtgtgaggagcccatgtcctcctttgatgccaagatcaataatgagaacatgaccaagtgcctgcagagcctgaaggagatgtaccaggacctgagaaacaagggtgtcttctgtgccagcgaagcggagttccagggctacaatgttctgctcagtctcaacaagggagacatcctaagagaagtacaacagttccatcctgctgttagaaactcatctgaggtgaaatttgctgttcaggcttttgctgcattgaacagtaataattttgtgagatttttcaaactggtccagtcagcttcttacctgaacgcttgtcttttacactgttacttcagtcagatccgcaaggatgctctccgggcgctcaactttgcgtacacggtgagcacacagcgatctaccatctttcccctggatggtgtggtgcgcatgctgctgttcagagactgtgaagaggccaccgacttcctcacctgccacggcctcaccgtttccgacggctgtgtggagctgaaccggtctgcattcctggaaccagagggattatccaagaccaggaagtcggtgtttattactaggaagctgacggtgtcagtcggggaaattgtgaacggagggccattgccccccgtccctcgtcatacccctgtgtgcagcttcaactcccagaacaagtacatcggggagagcctggccgcggagctgcccgtcagcacccagagacccggctccgacacagtgggcggagggagaggagaggagtgtggtgtagagccggatgcacccctgtccagtctcccacagtctctaccagcccctgcgccctcaccagtgcctctgcctcctgtcctggcactgaccccgtctgtggcgcccagcctcttccagctgtctgtgcagcctgaaccaccgcctccagagcccgtgcccatgtactctgacgaggacctggcgcaggtggtggacgagctcatccaggaggccctgcagagggactgtgaggaagttggctctgcgggtgctgcctacgcagctgccgccctgggtgtttctaatgctgctatggaggatttgttaacagctgcaaccacgggcattttgaggcacattgcagctgaagaagtgtctaaggaaagagagcgaagggagcaggagaggcagcgggctgaagaggaaaggttgaaacaagagagagagctggtgttaagtgagctgagccagggcctggccgtggagctgatggaacgcgtgatgatggagtttgtgagggaaacctgctcccaggagttgaagaatgcagtagagacagaccagagggtccgtgtggcccgttgctgtgaggatgtctgtgcccacttagtggacttgtttctcgtggaggaaatcttccagactgcaaaggagaccctccaggagcttcagtgcttctgcaagtatctacagcggtggagggaagctgtcacagcccgcaagaaactgaggcgccaaatgcgggctttccctgctgcgccctgctgcgtggacgtgagcgaccggctgagggcgctggcgcccagcgcagagtgccccattgctgaagagaacctggccaggggcctcctggacctgggccatgcagggagattgggcatctcctgcaccaggttaaggcggctcagaaacaagacagctcaccagatgaaggttcagcacttctaccagcagctgctgagtgatgtggcatgggcgtctctggacctgccatccctcgtggctgagcacctccctgggaggcaggagcatgtgttttggaagctggtgctggtgttgccggatgtagaggagcagtccccagagagttgtggcagaattctagcaaattggttaaaagtcaagttcatgggagatgaaggctcagtggatgacacatccagcgatgctggtgggattcagacgctttcgcttttcaactcacttagcagcaaaggggatcagatgatttctgttaacgtgtgtataaaggtggcccatggcgccctcagtgatggtgccattgatgctgtggagacacagaaggacctcctgggagccagtgggctcatgctgctgcttccccccaaaatgaagagtgaggacatggcagaggaggacgtgtactggctgtcggccttgctgcagctcaagcagctcctgcaggctaagcccttccagcctgcgcttcctctggtggttcttgtgcctagcccaggaggggacgccgttgagaaggaagtagaagatggtctgatgctacaggacttggtttcagctaagctgatttcagattacactgttaccgagatccctgataccattaatgatctacaaggttcaactaaggttttgcaagcagtgcagtggctggtttcccactgcccccattcccttgacctctgctgccagactctcattcagtacgtcgaagacgggattggccatgagtttagtggccgctttttccatgacagaagagagaggcgtctgggcggtcttgcttctcaggagcctggcgccatcattgagctgtttaacagtgtgctgcagttcctggcttctgtggtgtcctctgaacagctgtgtgacctgtcctggcctgtcactgagtttgctgaggcagggggcagccggctgcttcctcacctgcactggaatgccccagagcacctggcctggctgaagcaggctgtgctcgggttccagcttccgcagatggaccttccacccctgggggccccctggctccccgtgtgctccatggttgtccagtacgcctcccagatccccagctcacgccagacacagcctgtcctccagtcccaggtggagaacctgctccacagaacctactgtaggtggaagagcaagagtccctccccagtccatggggcaggcccctcggtcatggagatcccatgggatgatcttatcgccttgtgtatcaaccacaagctgagagactggacgcccccccggcttcctgttacatcagaggcgctgagtgaagatggtcagatatgtgtgtatttttttaaaaacgatttgaaaaaatatgatgttcctttgtcgtgggaacaagccaggttgcagacgcagaaggagctacagctgagagagggacgacggtgaggttcatgttcagtatgtttctgttgcttgctaaactgtatttttcttgcaaagtaaatagaaattaacatcctacatgccaaatccagtccactgtgggcagactgtgacaaatcctcaaggaacagatcattcccatgcagtagaaactattctagaacaaagttaaagcatctcacttcatttatcaggcatacctgaccctgaaatcatacctaaccaggagagtacagctgacatttcatctcacttccaaatttggttccaaagcacagtacctaaaaaagttcacaagtatgctttctcccaggataaacaataacagtgaaaatctattaatgtaatttgttgccataatagaaaaataagtggtaattttagcaggcgttgaaatacgtttcttaaaatttatacctgttcctgataaaatttctttattttgggtactttctttagcttgggttaaaaaaaaaaaaaaaaagtcctaacttgataaggctacctaacataaaactaccaaaatagaaaaaaaacatgcttcttggtagaatgttaggaacagtggaatcagaaccagcctgttgtcccgactattattcactattgtcctggaaatcctgaccagtacagggatgtgggatagacaggcacaaatactgaaaggaaggagaaactgtcatttccagacagtacagttgtcagtccaagaaaagtcaagtccatagaaccattctcagttcaataaggtgatcagatagatagatccacaacatgttaaaaaaaaaaaaattctcattcacaacaataaacctgaacagaaagggcacaggatggtggaactttgctgttccttcttgttccccatagagatccttgaagtaccttctccaactccatgatactctaaaaactgttcatcttcataataggagtggagcctaatccttggtctcctcacctcctggtttcccggaatgtctttctcattaacatatgagttctcagggcctgtatgtgcaaaggaaacctgaaccattgaggttcagactaggttgttgacaggatacaatgctgtgaagatgtcagtactggtaagttctaaaattcatcaggataaacaaatatgcatcaattgctgagaaagttttaaataagactaacatggtttgcttggcctgataccaagacatacagtaaagctccagtacttaaaaccatgtggggatgccagagtagataaatggatcagaataaagagtcagaatatgtgacaaaagtgttaggccaaattattgaaattagtggggaaaagacaaacattggcatgtgtttagaaaaaaatgtcagatgccttctctctcaccatttgtaaacattacttccaaatgtatccaagagctatctataaaaaaccttgccaatactagggaagaacagaatctggaaccctagggtgggaagcaagacatgaagcagagaagctccaaaaacctagctgcctcttgagagcagaagcttccaagaggaacaggcagtctcaatgcctctgtgcataagggtccctacagtgcaggggctgccttccctctttgctccactccctgacttgatggaagcttggaagcaggcatggggccagcatgagctgttccaggagggcacatgtgtctgaggcacatgttcttacatgttaatgcacatgtgcaaatgtatctacatgctttacatgatgctgtagaaatattttctcttgaccataaacatttcaaatcatgtacttacatttggcaataaagccttttcatccttctgcaaacaattttcccataccattgcttcacatgcaccgtaactggaagaggagcacagagtgtgctcaagaggggaggattcccagcacagaggatctgatgcgaggagcttctgctgaggagctcttggcgcagtgtttgtcgagcagtctgctgctggagaaagaagagaacaagaggtttgaagatcagcttcagcaatggttgtctgaagactcaggagcatttacggatttaacttcccttcccctctatcttcctcagactctagtgtctctttctcacactattgaacctgtgatgaaaacatctgtaactactagcccacagagtgacatgatgagggagcaactgcagctgtcagaggcgacaggaacgtgtctaggcgaacgactaaagcacctggaaaggctgatccggagttcaagggaagaggaagttgcctctgagctccatctctctgcgctgctagacatggtggacatttgagcagcctgacctgtggggagggggtctctcccgaagagtttctgtttttactcaaaataatgttattctcagatgcttgatgcactgttggaaatgtgattaatttaatcatgcagataaaccatttaaatgtca

SEQ ID NO: 406044 - DNA, 1882 bp, Homo sapiens
aactaggctgtcaggtccaacgctcattgtgagttgaacagatgcttaaccccacatgggtatcagatgatttctgtgtactgtgtgtataatggtggcccatggcgccctcagtgatggtgccattgatgctgtggagacacagaaggacctcctgggagccagtgggctcatgctgctgcttccccccaaaatgaagagtgaggacatggcagaggaggacgtgtactggctgtcggccttgctgcagctcaagcagctcctgcaggctaagcccttccagcctgcgcttcctctggtggttcttgtgcctagcccaggaggggacgccgttgagaaggaagtagaagatggtctgatgctacaggacttggtttcagctaagctgatttcagattacactgttaccgagatccctgataccattaatgatctacaaggttcaactaaggttttgcaagcagtgcagtggctggtttcccactgcccccattcccttgacctctgctgccagactctcattcagtacgtcgaagacgggattggccatgagtttagtggccgctttttccatgacagaagagagaggcgtctgggcggtcttgcttctcaggagcctggcgccatcattgagctgtttaacagtgtgctgcagttcctggcttctgtggtgtcctctgaacagctgtgtgacctgtcctggcctgtcactgagtttgctgaggcagggggcagccggctgcttcctcacctgcactggaatgccccagagcacctggcctggctgaagcaggctgtgctcgggttccagcttccgcagatggaccttccacccctgggggccccctggctccccgtgtgctccatggttgtccagtacgcctcccagatccccagctcacgccagacacagcctgtcctccagtcccaggtggagaacctgctccacagaacctactgtaggtggaagagcaagagtccctccccagtccatggggcaggcccctcggtcatggagatcccatgggatgatcttatcgccttgtgtatcaaccacaagctgagagactggacgcccccccggcttcctgttacatcagaggcgctgagtgaagatggtcagatatgtgtgtatttttttaaaaacgatttgaaaaaatatgatgttcctttgtcgtgggaacaagccaggttgcagacgcagaaggagctacagctgagagagggacgtttggcaataaagccttttcatccttctgcaaacaattttcccataccattgcttcacatgcaccgtaactggaagaggagcacagagtgtgctcaagaggggaggattcccagcacagaggatctgatgcgaggagcttctgctgaggagctcttggcgcagtgtttgtcgagcagtctgctgctggagaaagaagagaacaagaggtttgaagatcagcttcagcaatggttgtctgaagactcaggagcatttacggatttaacttcccttcccctctatcttcctcagactctagtgtctctttctcacactattgaacctgtgatgaaaacatctgtaactactagcccacagagtgacatgatgagggagcaactgcagctgtcagaggcgacaggaacgtgtctaggcgaacgactaaagcacctggaaaggctgatccggagttcaagggaagaggaagttgcctctgagctccatctctctgcgctgctagacatggtggacatttgagcagcctgacctgtggggagggggtctctcccgaagagtttctgtttttactcaaaataatgttattctcagatgcttgatgcactgttggaaatgtgattaatttaatcatgcagataaaccatttaaatgtca

SEQ ID NO: 406045 - DNA, 3021 bp, Homo sapiens
tgagacggagtctcgctctgtcgtccaggctggagtgcagtggcgcgatctctgctcactgcaagctctgcctcccggcttcacgtcattctcctgcttcagcctcccgagtagctgggaccacaggcgcccgccaccacaccaggctaatttttttgtatttttagtagagacagggtttcaccatgttagccaggatcgtctggatctcttgacctcatgatccacccgcttcggccttccaaagtgctgggattacaggcgtgagccaccgcgcctgactgactcttgcacttttcaagcaagccctcagtgtctgtgggccccaagtgcagtgtcttccatgctgattgccctgtttctaggaatgcagtagagacagaccagagggtccgtgtggcccgttgctgtgaggatgtctgtgcccacttagtggacttgtttctcgtggaggaaatcttccagactgcaaaggagaccctccaggagcttcagtgcttctgcaagtatctacagcggtggagggaagctgtcacagcccgcaagaaactgaggcgccaaatgcgggctttccctgctgcgccctgctgcgtggacgtgagcgaccggctgagggcgctggcgcccagcgcagagtgccccattgctgaagagaacctggccaggggcctcctggacctgggccatgcagggagattgggcatctcctgcaccaggttaaggcggctcagaaacaagacagctcaccagatgaaggttcagcacttctaccagcagctgctgagtgatgtggcatgggcgtctctggacctgccatccctcgtggctgagcacctccctgggaggcaggagcatgtgttttggaagctggtgctggtgttgccggatgtagaggagcagtccccagagagttgtggcagaattctagcaaattggttaaaagtcaagttcatgggagatgaaggctcagtggatgacacatccagcgatgctggtgggattcagacgctttcgcttttcaactcacttagcagcaaaggggatcagatgatttctgttaacgtgtgtataaaggtggcccatggcgccctcagtgatggtgccattgatgctgtggagacacagaaggacctcctgggagccagtgggctcatgctgctgcttccccccaaaatgaagagtgaggacatggcagaggaggacgtgtactggctgtcggccttgctgcagctcaagcagctcctgcaggctaagcccttccagcctgcgcttcctctggtggttcttgtgcctagcccaggaggggacgccgttgagaaggaagtagaagatggtctgatgctacaggacttggtttcagctaagctgatttcagattacactgttaccgagatccctgataccattaatgatctacaaggttcaactaaggttttgcaagcagtgcagtggctggtttcccactgcccccattcccttgacctctgctgccagactctcattcagtacgtcgaagacgggattggccatgagtttagtggccgctttttccatgacagaagagagaggcgtctgggcggtcttgcttctcaggagcctggcgccatcattgagctgtttaacagtgtgctgcagttcctggcttctgtggtgtcctctgaacagctgtgtgacctgtcctggcctgtcactgagtttgctgaggcagggggcagccggctgcttcctcacctgcactggaatgccccagagcacctggcctggctgaagcaggctgtgctcgggttccagcttccgcagatggaccttccacccctgggggccccctggctccccgtgtgctccatggttgtccagtacgcctcccagatccccagctcacgccagacacagcctgtcctccagtcccaggtggagaacctgctccacagaacctactgtaggtggaagagcaagagtccctccccagtccatggggcaggcccctcggtcatggagatcccatgggatgatcttatcgccttgtgtatcaaccacaagctgagagactggacgcccccccggcttcctgttacatcagaggcgctgagtgaagatggtcagatatgtgtgtatttttttaaaaacgatttgaaaaaatatgatgttcctttgtcgtgggaacaagccaggttgcagacgcagaaggagctacagctgagagagggacgtttggcaataaagccttttcatccttctgcaaacaattttcccataccattgcttcacatgcaccgtaactggaagaggagcacagagtgtgctcaagaggggaggattcccagcacagaggatctgatgcgaggagcttctgctgaggagctcttggcgcagtgtttgtcgagcagtctgctgctggagaaagaagagaacaagaggtttgaagatcagcttcagcaatggttgtctgaagactcaggagcatttacggatttaacttcccttcccctctatcttcctcagactctagtgtctctttctcacactattgaacctgtgatgaaaacatctgtaactactagcccacagagtgacatgatgagggagcaactgcagctgtcagaggcgacaggaacgtgtctaggcgaacgactaaagcacctggaaaggctgatccggagttcaagggaagaggaagttgcctctgagctccatctctctgcgctgctagacatggtggacatttgagcagcctgacctgtggggagggggtctctcccgaagagtttctgtttttactcaaaataatgttattctcagatgcttgatgcactgttggaaatgtgattaatttaatcatgcagataaaccatttaaatgtcaaaaaaaaaagggggggtttaaatatcctggagggcagttaaggtacagtttggaaaggggctaagggaggtaaggaggagggggtaaaggggagggaaagaggattggggactttggggaatggaccagtgcgaaatagtatggattgggttgtaaaag

SEQ ID NO: 406046 - DNA, 8036 bp, Homo sapiens
ggcagcgcgggcctcggggtcctggggcgagacggtgagcgtgggggctgggccggcgccaggggcgccgtttccttcccccacgcagctccgcgcgcccgggcctccacatcgtcgctaacggagcgttgcggcgccggcgacccctggcgagcccggggcgggacagtggccaggccggcctgggcccagcgcgtggcctccgccgtttcgggctgtgctgggtggaagattaggctccccgggcacgccgtccccgccgagaggcctcagcttcgtggcagcgccctcgtccttccagcccgctcgagggtggccgccagggcgcgatgaaggaatgtgagaaagtgcttagcgctccagccgctccgagggaagccaggtgggaggagatcccgaaacgctaaggttttgacagcgttacagtgaattctccggctgtagagattggaggaagtcgggagaaattcgtctctaagttgtaagcttgttctaaagacgaaggggaactccctagtgctacaggctgtttcaggaagccaattaattttgtacacgtaatacttaattaccttctaataattggagcagaagatgaacccaactaatcctttcagtgggcagcagcctagtgctttttcggcgtcttctagtaatgtaggaacacttccatctaagccgccatttcgatttggtcaaccttctctttttggacaaaacagtaccttatctgggaagagctcgggattttcacaggtatccagctttccagcgtcttctggagtaagtcattcctcttcagtgcaaacattagggttcacccaaacctcaagtgttggacccttttctggacttgagcacacttccacctttgtggctacctctgggccttcaagttcatctgtgctgggaaacacaggatttagttttaaatcacccaccagtgttggggctttcccaagcacttctgcttttggacaagaagctggagaaatagtgaactctggttttgggaaaacagaattcagctttaaacctctggaaaatgcagtgttcaaaccaatactgggggctgaatctgagccagagaaaacccagagccaaattgcttctgggttttttacattttcccacccaattagtagtgcacctggaggcctggcccctttctcttttcctcaagtaacaagtagttcagctaccacttcaaattttaccttttcaaaacctgttagtagtaataattcattatctgcctttacccctgctttgtcaaaccaaaatgtagaggaagagaagagaggacctaagtcaatatttggaagttctaataatagcttcagtagcttccctgtatcatctgcggttttgggcgaacctttccaggctagcaaagcaggtgtcaggcaggggtgtgaagaagctgtttcccaggtggaaccacttcccagcctaatgaaaggactgaaaaggaaggaggaccaggatcgctccccaaggagacatggccacgagccagcagaagattcggatcctctgtcccggggcgatcatcctccagacaaacgacctgtccgcctgaatcgaccccggggaggtactttatttggtcggacgatacaggatgttttcaaaagcaataaggaagtaggtcgtctgggcaacaaggaggccaaaaaggaaactggctttgttgagtctgcagaaagtgaccacatggctatcccaggagggaatcagtctgtcctggcaccttcccggattccaggtgtgaataaagaggaagaaactgaaagtagagagaagaaagaagattctctaagaggaactccggcgcgtcagagtaacagaagcgagagcacagacagtcttgggggcttgtctccctctgaagtcacagccatccagtgcaagaatatccctgactacctcaacgacaggaccattctggagaaccattttggcaaaattgctaaagtgcagcgcatctttaccaggcgcagcaaaaagcttgcagtggtacatttctttgatcatgcatctgcagccctggctagaaagaaggggaaaagtttgcataaagacatggctatcttttggcacaggaagaaaataagccccaataagaaacccttttccctgaaggagaagaaaccaggtgacggtgaagtcagcccgagcacagaggatgcaccctttcagcactctcctcttggcaaggccgcagggaggactggtgctagcagcctcctgaataaaagctctccagtgaagaagccaagtcttctaaaggcccaccaattcgagggagactcttttgactcagcctccgagggctccgagggcctcgggccatgtgtgctctccctcagtaccctgataggcactgtggctgagacatccaaggagaagtaccgcctgcttgaccagagagacaggatcatgcggcaagctcgggtgaagagaaccgatctggacaaagcgaggacttttgttggcacctgcctggatatgtgtcctgagaaggagaggtacatgcgggagacccgtagccagctgagcgtgttcgaagtggtcccagggactgaccaggtggaccacgcagcagctgtgaaagagtacagtcggtcctcggcggatcaggaggagcccctgccccacgagctgcggcccttgccagtgctcagcaggaccatggactacctggtgacccagatcatggaccagaaggagggcagcctgcgggattggtatgacttcgtgtggaaccgcacgcgtggcatacggaaggatatcacgcagcagcacctctgtgaccccctgacggtgtccctgattgagaagtgcacccggtttcacatccactgtgcccacttcatgtgtgaggagcccatgtcctcctttgatgccaagatcaataatgagaacatgaccaagtgcctgcagagcctgaaggagatgtaccaggacctgagaaacaagggtgtcttctgtgccagcgaagcggagttccagggctacaatgttctgctcagtctcaacaagggagacatcctaagagaagtacaacagttccatcctgctgttagaaactcatctgaggtgaaatttgctgttcaggcttttgctgcattgaacagtaataattttgtgagatttttcaaactggtccagtcagcttcttacctgaacgcttgtcttttacactgttacttcagtcagatccgcaaggatgctctccgggcgctcaactttgcgtacacggtgagcacacagcgatctaccatctttcccctggatggtgtggtgcgcatgctgctgttcagagactgtgaagaggccaccgacttcctcacctgccacggcctcaccgtttccgacggctgtgtggagctgaaccggtctgcattcctggaaccagagggattatccaagaccaggaagtcggtgtttattactaggaagctgacggtgtcagtcggggaaattgtgaacggagggccattgccccccgtccctcgtcatacccctgtgtgcagcttcaactcccagaacaagtacatcggggagagcctggccgcggagctgcccgtcagcacccagagacccggctccgacacagtgggcggagggagaggagaggagtgtggtgtagagccggatgcacccctgtccagtctcccacagtctctaccagcccctgcgccctcaccagtgcctctgcctcctgtcctggcactgaccccgtctgtggcgcccagcctcttccagctgtctgtgcagcctgaaccaccgcctccagagcccgtgcccatgtactctgacgaggacctggcgcaggtggtggacgagctcatccaggaggccctgcagagggactgtgaggaagttggctctgcgggtgctgcctacgcagctgccgccctgggtgtttctaatgctgctatggaggatttgttaacagctgcaaccacgggcattttgaggcacattgcagctgaagaagtgtctaaggaaagagagcgaagggagcaggagaggcagcgggctgaagaggaaaggttgaaacaagagagagagctggtgttaagtgagctgagccagggcctggccgtggagctgatggaacgcgtgatgatggagtttgtgagggaaacctgctcccaggagttgaagaatgcagtagagacagaccagagggtccgtgtggcccgttgctgtgaggatgtctgtgcccacttagtggacttgtttctcgtggaggaaatcttccagactgcaaaggagaccctccaggagcttcagtgcttctgcaagtatctacagcggtggagggaagctgtcacagcccgcaagaaactgaggcgccaaatgcgggctttccctgctgcgccctgctgcgtggacgtgagcgaccggctgagggcgctggcgcccagcgcagagtgccccattgctgaagagaacctggccaggggcctcctggacctgggccatgcagggagattgggcatctcctgcaccaggttaaggcggctcagaaacaagacagctcaccagatgaaggttcagcacttctaccagcagctgctgagtgatgtggcatgggcgtctctggacctgccatccctcgtggctgagcacctccctgggaggcaggagcatgtgttttggaagctggtgctggtgttgccggatgtagaggagcagtccccagagagttgtggcagaattctagcaaattggttaaaagtcaagttcatgggagatgaaggctcagtggatgacacatccagcgatgctggtgggattcagacgctttcgcttttcaactcacttagcagcaaaggggatcagatgatttctgttaacgtgtgtataaaggtggcccatggcgccctcagtgatggtgccattgatgctgtggagacacagaaggacctcctgggagccagtgggctcatgctgctgcttccccccaaaatgaagagtgaggacatggcagaggaggacgtgtactggctgtcggccttgctgcagctcaagcagctcctgcaggctaagcccttccagcctgcgcttcctctggtggttcttgtgcctagcccaggaggggacgccgttgagaaggaagtagaagatggtctgatgctacaggacttggtttcagctaagctgatttcagattacactgttaccgagatccctgataccattaatgatctacaaggttcaactaaggttttgcaagcagtgcagtggctggtttcccactgcccccattcccttgacctctgctgccagactctcattcagtacgtcgaagacgggattggccatgagtttagtggccgctttttccatgacagaagagagaggcgtctgggcggtcttgcttctcaggagcctggcgccatcattgagctgtttaacagtgtgctgcagttcctggcttctgtggtgtcctctgaacagctgtgtgacctgtcctggcctgtcactgagtttgctgaggcagggggcagccggctgcttcctcacctgcactggaatgccccagagcacctggcctggctgaagcaggctgtgctcgggttccagcttccgcagatggaccttccacccctgggggccccctggctccccgtgtgctccatggttgtccagtacgcctcccagatccccagctcacgccagacacagcctgtcctccagtcccaggtggagaacctgctccacagaacctactgtaggtggaagagcaagagtccctccccagtccatggggcaggcccctcggtcatggagatcccatgggatgatcttatcgccttgtgtatcaaccacaagctgagagactggacgcccccccggcttcctgttacatcagaggcgctgagtgaagatggtcagatatgtgtgtatttttttaaaaacgatttgaaaaaatatgatgttcctttgtcgtgggaacaagccaggttgcagacgcagaaggagctacagctgagagagggacgacggtgaggttcatgttcagtatgtttctgttgcttgctaaactgtatttttcttgcaaagtaaatagaaattaacatcctacatgccaaatccagtccactgtgggcagactgtgacaaatcctcaaggaacagatcattcccatgcagtagaaactattctagaacaaagttaaagcatctcacttcatttatcaggcatacctgaccctgaaatcatacctaaccaggagagtacagctgacatttcatctcacttccaaatttggttccaaagcacagtacctaaaaaagttcacaagtatgctttctcccaggataaacaataacagtgaaaatctattaatgtaatttgttgccataatagaaaaataagtggtaattttagcaggcgttgaaatacgtttcttaaaatttatacctgttcctgataaaatttctttattttgggtactttctttagcttgggttaaaaaaaaaaaaaaaaagtcctaacttgataaggctacctaacataaaactaccaaaatagaaaaaaaacatgcttcttggtagaatgttaggaacagtggaatcagaaccagcctgttgtcccgactattattcactattgtcctggaaatcctgaccagtacagggatgtgggatagacaggcacaaatactgaaaggaaggagaaactgtcatttccagacagtacagttgtcagtccaagaaaagtcaagtccatagaaccattctcagttcaataaggtgatcagatagatagatccacaacatgttaaaaaaaaaaaaattctcattcacaacaataaacctgaacagaaagggcacaggatggtggaactttgctgttccttcttgttccccatagagatccttgaagtaccttctccaactccatgatactctaaaaactgttcatcttcataataggagtggagcctaatccttggtctcctcacctcctggtttcccggaatgtctttctcattaacatatgagttctcagggcctgtatgtgcaaaggaaacctgaaccattgaggttcagactaggttgttgacaggatacaatgctgtgaagatgtcagtactggtaagttctaaaattcatcaggataaacaaatatgcatcaattgctgagaaagttttaaataagactaacatggtttgcttggcctgataccaagacatacagtaaagctccagtacttaaaaccatgtggggatgccagagtagataaatggatcagaataaagagtcagaatatgtgacaaaagtgttaggccaaattattgaaattagtggggaaaagacaaacattggcatgtgtttagaaaaaaatgtcagatgccttctctctcaccatttgtaaacattacttccaaatgtatccaagagctatctataaaaaaccttgccaatactagggaagaacagaatctggaaccctagggtgggaagcaagacatgaagcagagaagctccaaaaacctagctgcctcttgagagcagaagcttccaagaggaacaggcagtctcaatgcctctgtgcataagggtccctacagtgcaggggctgccttccctctttgctccactccctgacttgatggaagcttggaagcaggcatggggccagcatgagctgttccaggagggcacatgtgtctgaggcacatgttcttacatgttaatgcacatgtgcaaatgtatctacatgctttacatgatgctgtagaaatattttctcttgaccataaacatttcaaatcatgtacttacatttggcaataaagccttttcatccttctgcaaacaattttcccataccattgcttcacatgcaccgtaactggaagaggagcacagagtgtgctcaagaggggaggattcccagcacagaggatctgatgcgaggagcttctgctgaggagctcttggcgcagtgtttgtcgagcagtctgctctcaaagcgcggcgcacgaggccgggccctcgtgccgacgcaa

SEQ ID NO: 406047 - DNA, 960 bp, Homo sapiens
  misc_feature (43)..(43): n is a, c, g, or t
tccatggggagggagtcttgctcttccagctacagtaggttcngtgtgagcaagagtccctccccagtccatggggcaggcccctcggtcatggagatcccatgggatgatcttatcgccttgtgtatcaaccacaagctgagagactggacgcccccccggcttcctgttacatcagaggcgctgagtgaagatggtcagatatgtgtgtatttttttaaaaacgatttgaaaaaatatgatgttcctttgtcgtgggaacaagccaggttgcagacgcagaaggagctacagctgagagagggacgtttggcaataaagccttttcatccttctgcaaacaattttcccataccattgcttcacatgcaccgtaactggaagaggagcacagagtgtgctcaagaggggaggattcccagcacagaggatctgatgcgaggagcttctgctgaggagctcttggcgcagtgtttgtcgagcagtctgctgctggagaaagaagagaacaagaggtttgaagatcagcttcagcaatggttgtctgaagactcaggagcatttacggatttaacttcccttcccctctatcttcctcagactctagtgtctctttctcacactattgaacctgtgatgaaaacatctgtaactactagcccacagagtgacatgatgagggagcaactgcagctgtcagaggcgacaggaacgtgtctaggcgaacgactaaagcacctggaaaggctgatccggagttcaagggaagaggaagttgcctctgagctccatctctctgcgctgctagacatggtggacatttgagcagcctgacctgtggggagggggtctctcccgaagagtttctgtttttactcaaaataatgttattctcagatgcttgatgcactgttggaaatgtgattaatttaatcatgcagataaaccatttaaatgtca

SEQ ID NO: 406048 - DNA, 5876 bp, Homo sapiens
ggcagcgcgggcctcggggtcctggggcgagacggtgagcgtgggggctgggccggcgccaggggcgccgtttccttcccccacgcagctccgcgcgcccgggcctccacatcgtcgctaacggagcgttgcggcgccggcgacccctggcgagcccggggcgggacagtggccaggccggcctgggcccagcgcgtggcctccgccgtttcgggctgtgctgggtggaagattaggctccccgggcacgccgtccccgccgagaggcctcagcttcgtggcagcgccctcgtccttccagcccgctcgagggtggccgccagggcgcgatgaaggaatgtgagaaagtgcttagcgctccagccgctccgagggaagccaggtgggaggagatcccgaaacgctaaggttttgacagcgttacagtgaattctccggctgtagagattggaggaagtcgggagaaattcgtctctaagttgtaagcttgttctaaagacgaaggggaactccctagtgctacaggctgtttcaggaagccaattaattttgtacacgtaatacttaattaccttctaataattggagcagaagatgaacccaactaatcctttcagtgggcagcagcctagtgctttttcggcgtcttctagtaatgtaggaacacttccatctaagccgccatttcgatttggtcaaccttctctttttggacaaaacagtaccttatctgggaagagctcgggattttcacaggtatccagctttccagcgtcttctggagtaagtcattcctcttcagtgcaaacattagggttcacccaaacctcaagtgttggacccttttctggacttgagcacacttccacctttgtggctacctctgggccttcaagttcatctgtgctgggaaacacaggatttagttttaaatcacccaccagtgttggggctttcccaagcacttctgcttttggacaagaagctggagaaatagtgaactctggttttgggaaaacagaattcagctttaaacctctggaaaatgcagtgttcaaaccaatactgggggctgaatctgagccagagaaaacccagagccaaattgcttctgggttttttacattttcccacccaattagtagtgcacctggaggcctggcccctttctcttttcctcaagtaacaagtagttcagctaccacttcaaattttaccttttcaaaacctgttagtagtaataattcattatctgcctttacccctgctttgtcaaaccaaaatgtagaggaagagaagagaggacctaagtcaatatttggaagttctaataatagcttcagtagcttccctgtatcatctgcggttttgggcgaacctttccaggctagcaaagcaggtgtcaggcaggggtgtgaagaagctgtttcccaggtggaaccacttcccagcctaatgaaaggactgaaaaggaaggaggaccaggatcgctccccaaggagacatggccacgagccagcagaagattcggatcctctgtcccggggcgatcatcctccagacaaacgacctgtccgcctgaatcgaccccggggaggtactttatttggtcggacgatacaggatgttttcaaaagcaataaggaagtaggtcgtctgggcaacaaggaggccaaaaaggaaactggctttgttgagtctgcagaaagtgaccacatggctatcccaggagggaatcagtctgtcctggcaccttcccggattccaggtgtgaataaagaggaagaaactgaaagtagagagaagaaagaagattctctaagaggaactccggcgcgtcagagtaacagaagcgagagcacagacagtcttgggggcttgtctccctctgaagtcacagccatccagtgcaagaatatccctgactacctcaacgacaggaccattctggagaaccattttggcaaaattgctaaagtgcagcgcatctttaccaggcgcagcaaaaagcttgcagtggtacatttctttgatcatgcatctgcagccctggctagaaagaaggggaaaagtttgcataaagacatggctatcttttggcacaggaagaaaataagccccaataagaaacccttttccctgaaggagaagaaaccaggtgacggtgaagtcagcccgagcacagaggatgcaccctttcagcactctcctcttggcaaggccgcagggaggactggtgctagcagcctcctgaataaaagctctccagtgaagaagccaagtcttctaaaggcccaccaattcgagggagactcttttgactcagcctccgagggctccgagggcctcgggccatgtgtgctctccctcagtaccctgataggcactgtggctgagacatccaaggagaagtaccgcctgcttgaccagagagacaggatcatgcggcaagctcgggtgaagagaaccgatctggacaaagcgaggacttttgttggcacctgcctggatatgtgtcctgagaaggagaggtacatgcgggagacccgtagccagctgagcgtgttcgaagtggtcccagggactgaccaggtggaccacgcagcagctgtgaaagagtacagtcggtcctcggcggatcaggaggagcccctgccccacgagctgcggcccttgccagtgctcagcaggaccatggactacctggtgacccagatcatggaccagaaggagggcagcctgcgggattggtatgacttcgtgtggaaccgcacgcgtggcatacggaaggatatcacgcagcagcacctctgtgaccccctgacggtgtccctgattgagaagtgcacccggtttcacatccactgtgcccacttcatgtgtgaggagcccatgtcctcctttgatgccaagatcaataatgagaacatgaccaagtgcctgcagagcctgaaggagatgtaccaggacctgagaaacaagggtgtcttctgtgccagcgaagcggagttccagggctacaatgttctgctcagtctcaacaagggagacatcctaagagaagtacaacagttccatcctgctgttagaaactcatctgaggtgaaatttgctgttcaggcttttgctgcattgaacagtaataattttgtgagatttttcaaactggtccagtcagcttcttacctgaacgcttgtcttttacactgttacttcagtcagatccgcaaggatgctctccgggcgctcaactttgcgtacacggtgagcacacagcgatctaccatctttcccctggatggtgtggtgcgcatgctgctgttcagagactgtgaagaggccaccgacttcctcacctgccacggcctcaccgtttccgacggctgtgtggagctgaaccggtctgcattcctggaaccagagggattatccaagaccaggaagtcggtgtttattactaggaagctgacggtgtcagtcggggaaattgtgaacggagggccattgccccccgtccctcgtcatacccctgtgtgcagcttcaactcccagaacaagtacatcggggagagcctggccgcggagctgcccgtcagcacccagagacccggctccgacacagtgggcggagggagaggagaggagtgtggtgtagagccggatgcacccctgtccagtctcccacagtctctaccagcccctgcgccctcaccagtgcctctgcctcctgtcctggcactgaccccgtctgtggcgcccagcctcttccagctgtctgtgcagcctgaaccaccgcctccagagcccgtgcccatgtactctgacgaggacctggcgcaggtggtggacgagctcatccaggaggccctgcagagggactgtgaggaagttggctctgcgggtgctgcctacgcagctgccgccctgggtgtttctaatgctgctatggaggatttgttaacagctgcaaccacgggcattttgaggcacattgcagctgaagaagtgtctaaggaaagagagcgaagggagcaggagaggcagcgggctgaagaggaaaggttgaaacaagagagagagctggtgttaagtgagctgagccagggcctggccgtggagctgatggaacgcgtgatgatggagtttgtgagggaaacctgctcccaggagttgaagaatgcagtagagacagaccagagggtccgtgtggcccgttgctgtgaggatgtctgtgcccacttagtggacttgtttctcgtggaggaaatcttccagactgcaaaggagaccctccaggagcttcagtgcttctgcaagtatctacagcggtggagggaagctgtcacagcccgcaagaaactgaggcgccaaatgcgggctttccctgctgcgccctgctgcgtggacgtgagcgaccggctgagggcgctggcgcccagcgcagagtgccccattgctgaagagaacctggccaggggcctcctggacctgggccatgcagggagattgggcatctcctgcaccaggttaaggcggctcagaaacaagacagctcaccagatgaaggttcagcacttctaccagcagctgctgagtgatgtggcatgggcgtctctggacctgccatccctcgtggctgagcacctccctgggaggcaggagcatgtgttttggaagctggtgctggtgttgccggatgtagaggagcagtccccagagagttgtggcagaattctagcaaattggttaaaagtcaagttcatgggagatgaaggctcagtggatgacacatccagcgatgctggtgggattcagacgctttcgcttttcaactcacttagcagcaaaggggatcagatgatttctgttaacgtgtgtataaaggtggcccatggcgccctcagtgatggtgccattgatgctgtggagacacagaaggacctcctgggagccagtgggctcatgctgctgcttccccccaaaatgaagagtgaggacatggcagaggaggacgtgtactggctgtcggccttgctgcagctcaagcagctcctgcaggctaagcccttccagcctgcgcttcctctggtggttcttgtgcctagcccaggaggggacgccgttgagaaggaagtagaagatggtctgatgctacaggacttggtttcagctaagctgatttcagattacactgttaccgagatccctgataccattaatgatctacaaggttcaactaaggttttgcaagcagtgcagtggctggtttcccactgcccccattcccttgacctctgctgccagactctcattcagtacgtcgaagacgggattggccatgagtttagtggccgctttttccatgacagaagagcctggcgccatcattgagctgtttaacagtgtgctgcagttcctggcttctgtggtgtcctctgaacagctgtgtgacctgtcctggcctgtcactgagtttgctgaggcagggggcagccggctgcttcctcacctgcactggaatgccccagagcacctggcctggctgaagcaggctgtgctcgggttccagcttccgcagatggaccttccacccctgggggccccctggctccccgtgtgctccatggttgtccagtacgcctcccagatccccagctcacgccagacacagcctgtcctccagtcccaggtggagaacctgctccacagaacctactgtaggtggaagagcaagagtccctccccagtccatggggcaggcccctcggtcatggagatcccatgggatgatcttatcgccttgtgtatcaaccacaagctgagagactggacgcccccccggcttcctgttacatcaggtaattagagcttgatgc

SEQ ID NO: 406049 - DNA, 5156 bp, Homo sapiens
ggcagcgcgggcctcggggtcctggggcgagacggtgagcgtgggggctgggccggcgccaggggcgccgtttccttcccccacgcagctccgcgcgcccgggcctccacatcgtcgctaacggagcgttgcggcgccggcgacccctggcgagcccggggcgggacagtggccaggccggcctgggcccagcgcgtggcctccgccgtttcgggctgtgctgggtggaagattaggctccccgggcacgccgtccccgccgagaggcctcagcttcgtggcagcgccctcgtccttccagcccgctcgagggtggccgccagggcgcgatgaaggaatgtgagaaagtgcttagcgctccagccgctccgagggaagccaggtgggaggagatcccgaaacgctaaggttttgacagcgttacagtgaattctccggctgtagagattggaggaagtcgggagaaattcgtctctaagttgtaagcttgttctaaagacgaaggggaactccctagtgctacaggctgtttcaggaagccaattaattttgtacacgtaatacttaattaccttctaataattggagcagaagatgaacccaactaatcctttcagtgggcagcagcctagtgctttttcggcgtcttctagtaatgtaggaacacttccatctaagccgccatttcgatttggtcaaccttctctttttggacaaaacagtaccttatctgggaagagctcgggattttcacaggtatccagctttccagcgtcttctggagtaagtcattcctcttcagtgcaaacattagggttcacccaaacctcaagtgttggacccttttctggacttgagcacacttccacctttgtggctacctctgggccttcaagttcatctgtgctgggaaacacaggatttagttttaaatcacccaccagtgttggggctttcccaagcacttctgcttttggacaagaagctggagaaatagtgaactctggttttgggaaaacagaattcagctttaaacctctggaaaatgcagtgttcaaaccaatactgggggctgaatctgagccagagaaaacccagagccaaattgcttctgggttttttacattttcccacccaattagtagtgcacctggaggcctggcccctttctcttttcctcaagtaacaagtagttcagctaccacttcaaattttaccttttcaaaacctgttagtagtaataattcattatctgcctttacccctgctttgtcaaaccaaaatgtagaggaagagaagagaggacctaagtcaatatttggaagttctaataatagcttcagtagcttccctgtatcatctgcggttttgggcgaacctttccaggctagcaaagcaggtgtcaggcaggggtgtgaagaagctgtttcccaggtggaaccacttcccagcctaatgaaaggactgaaaaggaaggaggaccaggatcgctccccaaggagacatggccacgagccagcagaagattcggatcctctgtcccggggcgatcatcctccagacaaacgacctgtccgcctgaatcgaccccggggaggtactttatttggtcggacgatacaggatgttttcaaaagcaataaggaagtaggtcgtctgggcaacaaggaggccaaaaaggaaactggctttgttgagtctgcagaaagtgaccacatggctatcccaggagggaatcagtctgtcctggcaccttcccggattccaggtgtgaataaagaggaagaaactgaaagtagagagaagaaagaagattctctaagaggaactccggcgcgtcagagtaacagaagcgagagcacagacagtcttgggggcttgtctccctctgaagtcacagccatccagtgcaagaatatccctgactacctcaacgacaggaccattctggagaaccattttggcaaaattgctaaagtgcagcgcatctttaccaggcgcagcaaaaagcttgcagtggtacatttctttgatcatgcatctgcagccctggctagaaagaaggggaaaagtttgcataaagacatggctatcttttggcacaggaagaaaataagccccaataagaaacccttttccctgaaggagaagaaaccaggtgacggtgaagtcagcccgagcacagaggatgcaccctttcagcactctcctcttggcaaggccgcagggaggactggtgctagcagcctcctgaataaaagctctccagtgaagaagccaagtcttctaaaggcccaccaattcgagggagactcttttgactcagcctccgagggctccgagggcctcgggccatgtgtgctctccctcagtaccctgataggcactgtggctgagacatccaaggagaagtaccgcctgcttgaccagagagacaggatcatgcggcaagctcgggtgaagagaaccgatctggacaaagcgaggacttttgttggcacctgcctggatatgtgtcctgagaaggagaggtacatgcgggagacccgtagccagctgagcgtgttcgaagtggtcccagggactgaccaggtggaccacgcagcagctgtgaaagagtacagtcggtcctcggcggatcaggaggagcccctgccccacgagctgcggcccttgccagtgctcagcaggaccatggactacctggtgacccagatcatggaccagaaggagggcagcctgcgggattggtatgacttcgtgtggaaccgcacgcgtggcatacggaaggatatcacgcagcagcacctctgtgaccccctgacggtgtccctgattgagaagtgcacccggtttcacatccactgtgcccacttcatgtgtgaggagcccatgtcctcctttgatgccaagatcaataatgagaacatgaccaagtgcctgcagagcctgaaggagatgtaccaggacctgagaaacaagggtgtcttctgtgccagcgaagcggagttccagggctacaatgttctgctcagtctcaacaagggagacatcctaagagaagtacaacagttccatcctgctgttagaaactcatctgaggtgaaatttgctgttcaggcttttgctgcattgaacagtaataattttgtgagatttttcaaactggtccagtcagcttcttacctgaacgcttgtcttttacactgttacttcagtcagatccgcaaggatgctctccgggcgctcaactttgcgtacacggtgagcacacagcgatctaccatctttcccctggatggtgtggtgcgcatgctgctgttcagagactgtgaagaggccaccgacttcctcacctgccacggcctcaccgtttccgacggctgtgtggagctgaaccggtctgcattcctggaaccagagggattatccaagaccaggaagtcggtgtttattactaggaagctgacggtgtcagtcggggaaattgtgaacggagggccattgccccccgtccctcgtcatacccctgtgtgcagcttcaactcccagaacaagtacatcggggagagcctggccgcggagctgcccgtcagcacccagagacccggctccgacacagtgggcggagggagaggagaggagtgtggtgtagagccggatgcacccctgtccagtctcccacagtctctaccagcccctgcgccctcaccagtgcctctgcctcctgtcctggcactgaccccgtctgtggcgcccagcctcttccagctgtctgtgcagcctgaaccaccgcctccagagcccgtgcccatgtactctgacgaggacctggcgcaggtggtggacgagctcatccaggaggccctgcagagggactgtgaggaagttggctctgcgggtgctgcctacgcagctgccgccctgggtgtttctaatgctgctatggaggatttgttaacagctgcaaccacgggcattttgaggcacattgcagctgaagaagtgtctaaggaaagagagcgaagggagcaggagaggcagcgggctgaagaggaaaggttgaaacaagagagagagctggtgttaagtgagctgagccagggcctggccgtggagctgatggaacgcgtgatgatggagtttgtgagggaaacctgctcccaggagttgaagaatgcagtagagacagaccagagggtccgtgtggcccgttgctgtgaggatgtctgtgcccacttagtggacttgtttctcgtggaggaaatcttccagactgcaaaggagaccctccaggagcttcagtgcttctgcaagtatctacagcggtggagggaagctgtcacagcccgcaagaaactgaggcgccaaatgcgggctttccctgctgcgccctgctgcgtggacgtgagcgaccggctgagggcgctggcgcccagcgcagagtgccccattgctgaagagaacctggccaggggcctcctggacctgggccatgcagggagattgggcatctcctgcaccaggttaaggcggctcagaaacaagacagctcaccagatgaaggttcagcacttctaccagcagctgctgagtgatgtggcatgggcgtctctggacctgccatccctcgtggctgagcacctccctgggaggcaggagcatgtgttttggaagctggtgctggtgttgccggatgtagaggagcagtccccagagagttgtggcagaattctagcaaattggttaaaagtcaagttcatgggagatgaaggctcagtggatgacacatccagcgatgctggtgggattcagacgctttcgcttttcaactcacttagcagcaaaggggatcagatgattttttggcaataaagccttttcatccttctgcaaacaattttcccataccattgcttcacatgcaccgtaactggaagaggagcacagagtgtgctcaagaggggaggattcccagcacagaggatctgatgcgaggagcttctgctgaggagctcttggcgcagtgtttgtcgagcagtctgctcattcttccttcagtggttaaagatgcaaaaacagagtttcaatcacagatatgtgccactgaacaggtaaaaactgtgctcctggactggctttaggaagtccttcaa

SEQ ID NO: 406050 - DNA, 4503 bp, Homo sapiens
ggcagcgcgggcctcggggtcctggggcgagacggtgagcgtgggggctgggccggcgccaggggcgccgtttccttcccccacgcagctccgcgcgcccgggcctccacatcgtcgctaacggagcgttgcggcgccggcgacccctggcgagcccggggcgggacagtggccaggccggcctgggcccagcgcgtggcctccgccgtttcgggctgtgctgggtggaagattaggctccccgggcacgccgtccccgccgagaggcctcagcttcgtggcagcgccctcgtccttccagcccgctcgagggtggccgccagggcgcgatgaaggaatgtgagaaagtgcttagcgctccagccgctccgagggaagccaggtgggaggagatcccgaaacgctaaggttttgacagcgttacagtgaattctccggctgtagagattggaggaagtcgggagaaattcgtctctaagttgtaagcttgttctaaagacgaaggggaactccctagtgctacaggctgtttcaggaagccaattaattttgtacacgtaatacttaattaccttctaataattggagcagaagatgaacccaactaatcctttcagtgggcagcagcctagtgctttttcggcgtcttctagtaatgtaggaacacttccatctaagccgccatttcgatttggtcaaccttctctttttggacaaaacagtaccttatctgggaagagctcgggattttcacaggtatccagctttccagcgtcttctggagtaagtcattcctcttcagtgcaaacattagggttcacccaaacctcaagtgttggacccttttctggacttgagcacacttccacctttgtggctacctctgggccttcaagttcatctgtgctgggaaacacaggatttagttttaaatcacccaccagtgttggggctttcccaagcacttctgcttttggacaagaagctggagaaatagtgaactctggttttgggaaaacagaattcagctttaaacctctggaaaatgcagtgttcaaaccaatactgggggctgaatctgagccagagaaaacccagagccaaattgcttctgggttttttacattttcccacccaattagtagtgcacctggaggcctggcccctttctcttttcctcaagtaacaagtagttcagctaccacttcaaattttaccttttcaaaacctgttagtagtaataattcattatctgcctttacccctgctttgtcaaaccaaaatgtagaggaagagaagagaggacctaagtcaatatttggaagttctaataatagcttcagtagcttccctgtatcatctgcggttttgggcgaacctttccaggctagcaaagcaggtgtcaggcaggggtgtgaagaagctgtttcccaggtggaaccacttcccagcctaatgaaaggactgaaaaggaaggaggaccaggatcgctccccaaggagacatggccacgagccagcagaagattcggatcctctgtcccggggcgatcatcctccagacaaacgacctgtccgcctgaatcgaccccggggaggtactttatttggtcggacgatacaggatgttttcaaaagcaataaggaagtaggtcgtctgggcaacaaggaggccaaaaaggaaactggctttgttgagtctgcagaaagtgaccacatggctatcccaggagggaatcagtctgtcctggcaccttcccggattccaggtgtgaataaagaggaagaaactgaaagtagagagaagaaagaagattctctaagaggaactccggcgcgtcagagtaacagaagcgagagcacagacagtcttgggggcttgtctccctctgaagtcacagccatccagtgcaagaatatccctgactacctcaacgacaggaccattctggagaaccattttggcaaaattgctaaagtgcagcgcatctttaccaggcgcagcaaaaagcttgcagtggtacatttctttgatcatgcatctgcagccctggctagaaagaaggggaaaagtttgcataaagacatggctatcttttggcacaggaagaaaataagccccaataagaaacccttttccctgaaggagaagaaaccaggtgacggtgaagtcagcccgagcacagaggatgcaccctttcagcactctcctcttggcaaggccgcagggaggactggtgctagcagcctcctgaataaaagctctccagtgaagaagccaagtcttctaaaggcccaccaattcgagggagactcttttgactcagcctccgagggctccgagggcctcgggccatgtgtgctctccctcagtaccctgataggcactgtggctgagacatccaaggagaagtaccgcctgcttgaccagagagacaggatcatgcggcaagctcgggtgaagagaaccgatctggacaaagcgaggacttttgttggcacctgcctggatatgtgtcctgagaaggagaggtacatgcgggagacccgtagccagctgagcgtgttcgaagtggtcccagggactgaccaggtggaccacgcagcagctgtgaaagagtacagtcggtcctcggcggatcaggaggagcccctgccccacgagctgcggcccttgccagtgctcagcaggaccatggactacctggtgacccagatcatggaccagaaggagggcagcctgcgggattggtatgacttcgtgtggaaccgcacgcgtggcatacggaaggatatcacgcagcagcacctctgtgaccccctgacggtgtccctgattgagaagtgcacccggtttcacatccactgtgcccacttcatgtgtgaggagcccatgtcctcctttgatgccaagatcaataatgagaacatgaccaagtgcctgcagagcctgaaggagatgtaccaggacctgagaaacaagggtgtcttctgtgccagcgaagcggagttccagggctacaatgttctgctcagtctcaacaagggagacatcctaagagaagtacaacagttccatcctgctgttagaaactcatctgaggtgaaatttgctgttcaggcttttgctgcattgaacagtaataattttgtgagatttttcaaactggtccagtcagcttcttacctgaacgcttgtcttttacactgttacttcagtcagatccgcaaggatgctctccgggcgctcaactttgcgtacacggtgagcacacagcgatctaccatctttcccctggatggtgtggtgcgcatgctgctgttcagagactgtgaagaggccaccgacttcctcacctgccacggcctcaccgtttccgacggctgtgtggagctgaaccggtctgcattcctggaaccagagggattatccaagaccaggaagtcggtgtttattactaggaagctgacggtgtcagtcggggaaattgtgaacggagggccattgccccccgtccctcgtcatacccctgtgtgcagcttcaactcccagaacaagtacatcggggagagcctggccgcggagctgcccgtcagcacccagagacccggctccgacacagtgggcggagggagaggagaggagtgtggtgtagagccggatgcacccctgtccagtctcccacagtctctaccagcccctgcgccctcaccagtgcctctgcctcctgtcctggcactgaccccgtctgtggcgcccagcctcttccagctgtctgtgcagcctgaaccaccgcctccagagcccgtgcccatgtactctgacgaggacctggcgcaggtggtggacgagctcatccaggaggccctgcagagggactgtgaggaagttggctctgcgggtgctgcctacgcagctgccgccctgggtgtttctaatgctgctatggaggatttgttaacagctgcaaccacgggcattttgaggcacattgcagctgaagaagtgtctaaggaaagagagcgaagggagcaggagaggcagcgggctgaagaggaaaggttgaaacaagagagagagctggtgttaagtgagctgagccagggcctggccgtggagctgatggaacgcgtgatgatggagtttgtgagggaaacctgctcccaggagttgaagaatgcagtagagacagaccagagggtccgtgtggcccgttgctgtgaggatgtctgtgcccacttagtggacttgtttctcgtggaggaaatcttccagactgcaaaggagaccctccaggagcttcagtgcttctgcaagtatctacagcggtgagtcctgtgttcctacaggcaaaatccacacacacggggaagagtcttttaacaaattcaaaatatatgagctattagtttctgtattcagtggtaaaaggatgagggaaaatgttatagcaatgaatacctaaaatagactaattggattatactgcatttcagaaatact

SEQ ID NO: 406051 - DNA, 4326 bp, Homo sapiens
ggcagcgcgggcctcggggtcctggggcgagacggtgagcgtgggggctgggccggcgccaggggcgccgtttccttcccccacgcagctccgcgcgcccgggcctccacatcgtcgctaacggagcgttgcggcgccggcgacccctggcgagcccggggcgggacagtggccaggccggcctgggcccagcgcgtggcctccgccgtttcgggctgtgctgggtggaagattaggctccccgggcacgccgtccccgccgagaggcctcagcttcgtggcagcgccctcgtccttccagcccgctcgagggtggccgccagggcgcgatgaaggaatgtgagaaagtgcttagcgctccagccgctccgagggaagccaggtgggaggagatcccgaaacgctaaggttttgacagcgttacagtgaattctccggctgtagagattggaggaagtcgggagaaattcgtctctaagttgtaagcttgttctaaagacgaaggggaactccctagtgctacaggctgtttcaggaagccaattaattttgtacacgtaatacttaattaccttctaataattggagcagaagatgaacccaactaatcctttcagtgggcagcagcctagtgctttttcggcgtcttctagtaatgtaggaacacttccatctaagccgccatttcgatttggtcaaccttctctttttggacaaaacagtaccttatctgggaagagctcgggattttcacaggtatccagctttccagcgtcttctggagtaagtcattcctcttcagtgcaaacattagggttcacccaaacctcaagtgttggacccttttctggacttgagcacacttccacctttgtggctacctctgggccttcaagttcatctgtgctgggaaacacaggatttagttttaaatcacccaccagtgttggggctttcccaagcacttctgcttttggacaagaagctggagaaatagtgaactctggttttgggaaaacagaattcagctttaaacctctggaaaatgcagtgttcaaaccaatactgggggctgaatctgagccagagaaaacccagagccaaattgcttctgggttttttacattttcccacccaattagtagtgcacctggaggcctggcccctttctcttttcctcaagtaacaagtagttcagctaccacttcaaattttaccttttcaaaacctgttagtagtaataattcattatctgcctttacccctgctttgtcaaaccaaaatgtagaggaagagaagagaggacctaagtcaatatttggaagttctaataatagcttcagtagcttccctgtatcatctgcggttttgggcgaacctttccaggctagcaaagcaggtgtcaggcaggggtgtgaagaagctgtttcccaggtggaaccacttcccagcctaatgaaaggactgaaaaggaaggaggaccaggatcgctccccaaggagacatggccacgagccagcagaagattcggatcctctgtcccggggcgatcatcctccagacaaacgacctgtccgcctgaatcgaccccggggaggtactttatttggtcggacgatacaggatgttttcaaaagcaataaggaagtaggtcgtctgggcaacaaggaggccaaaaaggaaactggctttgttgagtctgcagaaagtgaccacatggctatcccaggagggaatcagtctgtcctggcaccttcccggattccaggtgtgaataaagaggaagaaactgaaagtagagagaagaaagaagattctctaagaggaactccggcgcgtcagagtaacagaagcgagagcacagacagtcttgggggcttgtctccctctgaagtcacagccatccagtgcaagaatatccctgactacctcaacgacaggaccattctggagaaccattttggcaaaattgctaaagtgcagcgcatctttaccaggcgcagcaaaaagcttgcagtggtacatttctttgatcatgcatctgcagccctggctagaaagaaggggaaaagtttgcataaagacatggctatcttttggcacaggaagaaaataagccccaataagaaacccttttccctgaaggagaagaaaccaggtgacggtgaagtcagcccgagcacagaggatgcaccctttcagcactctcctcttggcaaggccgcagggaggactggtgctagcagcctcctgaataaaagctctccagtgaagaagccaagtcttctaaaggcccaccaattcgagggagactcttttgactcagcctccgagggctccgagggcctcgggccatgtgtgctctccctcagtaccctgataggcactgtggctgagacatccaaggagaagtaccgcctgcttgaccagagagacaggatcatgcggcaagctcgggtgaagagaaccgatctggacaaagcgaggacttttgttggcacctgcctggatatgtgtcctgagaaggagaggtacatgcgggagacccgtagccagctgagcgtgttcgaagtggtcccagggactgaccaggtggaccacgcagcagctgtgaaagagtacagtcggtcctcggcggatcaggaggagcccctgccccacgagctgcggcccttgccagtgctcagcaggaccatggactacctggtgacccagatcatggaccagaaggagggcagcctgcgggattggtatgacttcgtgtggaaccgcacgcgtggcatacggaaggatatcacgcagcagcacctctgtgaccccctgacggtgtccctgattgagaagtgcacccggtttcacatccactgtgcccacttcatgtgtgaggagcccatgtcctcctttgatgccaagatcaataatgagaacatgaccaagtgcctgcagagcctgaaggagatgtaccaggacctgagaaacaagggtgtcttctgtgccagcgaagcggagttccagggctacaatgttctgctcagtctcaacaagggagacatcctaagagaagtacaacagttccatcctgctgttagaaactcatctgaggtgaaatttgctgttcaggcttttgctgcattgaacagtaataattttgtgagatttttcaaactggtccagtcagcttcttacctgaacgcttgtcttttacactgttacttcagtcaggtgagtaaatgagctgtgcttgcagagttggaagaaagcaggtggttcttgtgctgtttgggtgctttcttattccaagcttttcaaaggaggtctcaggctgatgctgtgtcacccttgcagcagccccacgaaggggttaccggtgttgccctgttttataggggttatcactgttggtcaccatccggaaaggctgtgcaatggaaaatactgttccatggttcaaataagaaaaatctctttaggaaaacataggttgaattcagcactatcatcatccatgaaagctaactaaaaagcaaaaatctcatatcatatgcacaaaatctctgactttgaaatgcttcatgttttaaatcgaagtttctggagtgaggctgatggcgctaagttcctttcagtgggtgcctcagtgtctgtgctttgccgtgtgctagggttgcagaggcaatgggaaggccagtccctcccctggggtttgcgcagagtaaactgtgtcttggggtttccagtcggttattttgttccacttccacggaacttggggatgaggacagagcagcccctgtagcacctgctgttctaggccctgcatgattccgttcagtgcaatgtgaccaggaccgcggcccaccgcacagagcgccacctcacctcgcacacactctgctgcccattctggcagcggctccaaggaggctgccaggattccttgccacaagcccgtagtggccacagcgtggggaggatgctgcctgggagatcctgggacctgccttggttgatctgtggctccaggtcatttctttggtcacacatcagggcctcctgtaaacagtgactaaacccacagtcatgtcacagtcagaaggtcttttgcaggtttgctccttgtcagatctgcaggttgccaaacagaactgatattctggagtaaatgaaaaggttttccacaacttgccacttgtagttaatattggctgggtgctttggctcacacctgttatcctggcaccttggcaaacttgggaggtgggaaaattgcttgagctcaggagttcaaggccagcctgggcaacatagggaggccctgtctctact

SEQ ID NO: 406052 - DNA, 2500 bp, Homo sapiens
agcgggcgcgctccgctcggcagcctgtgggacgcgaccgcggcgctagtctcgttcctttgtgctgcggcggcggcttctcgagtcctccccgacgcgtcctctaggccagcgagccccgcgctctccggtgacggaccatgtcggcggcgggagcgggcgcgggcgtagaggcgggcttctccagcgaggagctgctctcgctccgtttcccgctgcaccgcgcctgccgcgacggggacctggccacgctctgctcgctgctgcagcagacaccccacgcccacctggcctctgaggactccttctatggctggacgcccgtgcactgggccgcgcatttcggcaagttggagtgcttagtgcagttggtgagagcgggagccacactcaacgtctccaccacacggtacgcgcagacgccagcccacattgcagcctttgggggacatcctcagtgcctggtctggctgattcaagcaggagccaacattaacaaaccggattgtgagggtgaaactcccattcacaaggcagctcgctctgggagcctagaatgcatcagtgcccttgtggcgaatggggctcacgtcgacctgagaaatgccagtggcctgacagcagcagacattgcacaaacccagggtttccaagagtgtgcccagtttctcttgaacctccagaattgtcatctgaaccatttctataacaatggcatcttaaatgggggtcatcagaatgtatttcctaatcatattagtgtgggaacaaatcgaaagagatgcttggaagactcagaagactttggagtaaagaaagctagaactgaagctcaaagcttggattctgccgtgccactcacgaatggcgacacagaagacgatgctgacaaaatgcacgttgatagggagtttgctgttgtaacagatatgaaaaacagtagctccgtatcgaatacattgacaaatggatgtgtcatcaatggacatttggacttcccctccacgaccccgctcagtgggatggaaagcaggaatggccagtgcttgacaggaactaacggaattagcagtggattagccccaggacagccgtttccgagtagccagggttctctctgcattagtgggactgaggagccagagaagaccctgagagctaaccctgagttgtgcggttctctgcacctgaacgggagtccaagtagctgcatagccagtaggccttcctgggtggaagacattggggataacctgtactatggacactaccacgggtttggggacactgctgaaagcatcccagaactgaacagtgtggtcgagcattccaagtccgtgaaggtgcaggagcggtacgacagtgccgtgctgggcaccatgcacctgcaccacggctcctagagacgctgacctggctctcggaaacgcaggagtccttcctggtagccagctcagaatacccatgtagcagcaacttgaacgaatgtcacaacttgtactttttttatatacttcaactttctgaaaaagtaaacttcgacaagttcccagcaactgcttgtttgtgcatgagtagggcttactaagtgcatagatgtttctacagtgaggtgtcctttttataaggtgcacttttggagtttttctgatgccaatctcaacattgtctttttaatactgtcaccagatattgccatttttctttttgttaaaagattatatgatcaagataaattggggtggtaaatcaggtgcctggtaatttatctctttgcacatgggcatcattttaaaaagcttgcttccactcttttctgtagaatttgacggaacacagctatttccctatgcaaggtacagccttacaaagatttctgcagtgatttgtgtgaagaagagaatgtttgtctttttcaatgaagctttgcagatcaccatgtggttgaaggttttagttgtggacacagtggtccctccttaatgatgaagatcactgccttgggcttcatggaaaacaggcccagcctggggctgcgtttggatttattgtttttattccacacttcctacttggtctctggaagttttaccacatgtaacagattcctttatatgtagtgaaaatcactatttgtagaaactgtcaggtcaaaatatttaactgactgttgacatgtattttcttttttccttgtttttgttttttggggttttctgctttaagatatataccactatgtatatccagttaactgagagaattttgactctcttaataaaactgcattaagtttttgattttgtagaaattagcttttgtctaggcaactagtggttatactctgcaaatattgtaatgaatttttacttttttgatttttgtaataaaaattggtgcagataaaatgtcaaatgaacaaaccagtgttctaagagtgttactaacattttgttctaaaactgtccttcacaaattgaataaaaaactctcacactca

SEQ ID NO: 406053 - DNA, 1255 bp, Homo sapiens
agcgggcgcgctccgctcggcagcctgtgggacgcgaccgcggcgctagtctcgttcctttgtgctgcggcggcggcttctcgagtcctccccgacgcgtcctctaggccagcgagccccgcgctctccggtgacggaccatgtcggcggcgggagcgggcgcgggcgtagaggcgggcttctccagcgaggagctgctctcgctccgtttcccgctgcaccgcgcctgccgcgacggggacctggccacgctctgctcgctgctgcagcagacaccccacgcccacctggcctctgaggactccttctatggctggacgcccgtgcactgggccgcgcatttcggcaagttggagtgcttagtgcagttggtgagagcgggagccacactcaacgtctccaccacacggtacgcgcagacgccagcccacattgcagcctttgggggacatcctcagtgcctggtctggctgattcaagcaggagccaacattaacaaaccggattgtgagggtgaaactcccattcacaaggcagctcgctctgggagcctagaatgcatcagtgcccttgtggcgaatggggctcacgtcgagtttatttcacagagcagtgtacattcttgtcttccaggggaacttcaacatggagttacttttgatccctcagttttaattcagtgtctaaagcctgagaaatgccagtggcctgacagcagcagacattgcacaaacccagggtttccaagagtgtgcccagtttctcttgaacctccagaattgtcatctgaaccatttctataacaatggcatcttaaatgggggtcatcagaatgtatttcctaatcatattagtgtgggaacaaatcgaaagagatgcttggaagactcagaagactttggagtaaagaaagctagaactgaaggtgagaccgctttgcgggtgggaagagcacacttatttttcctttctgtaatatgttttctttttatggctgagcgcaccttcgagatgagaccttcacttcaggtggtaatgcgcctggtggattgtgcggtgacggtggagatttctcctgtactgccactgcgaagatgggacacttaacaaaagggaatgtgagggaaatactgatggcccaagtgtaaatgtctatgtggaactttttgagcacccatgtttacctgccgtgaattagattttttaatttgttgtatctgtttgaaatatatctattaaagaaaatctgccactg

SEQ ID NO: 406054 - DNA, 998 bp, Homo sapiens
ttttaatgtgagcagggatagtagagatgatgaatgtaggtaaggagaggaaatgagaatgaggactttcaggggcaagagatggtggtgtcattttgtgttgtgttcctgagtcaggtaccaacagatttcctctgagtagaatataaatgctaacaaattaaactgtatgttgtatacattcagcccttggtaacaaggaaaatgatagaattgaaatgttcttgtacctcactagaagcagagaaagggtgctggatatttctgtttccgataatgctgcatagatagtgccacttaaatgtagagcaaaattacagtctcctctaagtaattcctccagttaccatgtgtcctagattccgatacctgtccaatacaatttctagaactttttcacctccccatcatgtctgccttctagtgccccaaaattatgtgagatgctagaagttgtttgacctgtgattgttcttgcttccttggtccttacgtacgagtacatagcatgattgggccagaatccgtcttttgagctcttctagtaaagtaagttttgagataatacctaagaccacatggaaatttggttggtctaagtagaggacaagcacgtatttaactacctttggcaggggaaaaagtgaagtgggagagcttaccagtgctacctatgtgtaggctgacactctgaaacttcagtctccaggaatctccatatgttggcactattttgttgattatttttctataaggttatatttctttggaagatcagtaaacttgctgttctaacccaaattcagtgtagtcttcagcttctgaataaggaataaaggaatcgaatgtgctttggatgttcttttaacaatttcagaatgttggcatgccctttgagcatctaaacttccctcagcgaattggtatttatttatttatttagagatagaatcttgccttcactccagcctaggcaacaagagtgaaactccgtttca

SEQ ID NO: 406055 - DNA, 934 bp, Homo sapiens
ttttaatgtgagcagggatagtagagatgatgaatgtaggtaaggagaggaaatgagaatgaggactttcaggggcaagagatggtggtgtcattttgtgttgtgttcctgagtcaggtaccaacagatttcctctgagtagaatataaatgctaacaaattaaactgtatgttgtatacattcagcccttggtaacaaggaaaatgatagaattgaaatgttcttgtacctcactagaagcagagaaagggtgctggatatttctgtttccgataatgctgcatagatagtgccacttaaatgtagagcaaaattacagtctcctctaagtaattcctccagttaccatgtgtcctagattccgatacctgtccaatacaatttctagaactttttcacctccccatcatgtctgccttctagtgccccaaaattatgtgagatgctagaagttgtttgacctgtgattgttcttgcttccttggtccttacgtacgagtacatagcatgattgggccagaatccgtcttttgagctcttctagtaaagtaagttttgagataatacctaagaccacatggaaatttggttggtctaagtagaggacaagcacgtatttaactacctttggcaggggaaaaagtgaagtgggagagcttaccagtgctacctatgtgtaggctgacactctgaaacttcagtctccaggaatctccatatgttggcactattttgttgattatttttctataaggttatatttctttggaagatcagtaaacttgctgttctaacccaaattcagtgtagtcttcagcttctgaataaggaataaaggaatcgaatgtgctttggatgttcttttaacaatttcagaatgttggcatgccctttgagcatctaaacttccctcgggatcctctagatcacccc

SEQ ID NO: 406056 - DNA, 672 bp, Homo sapiens
ttttaatgtgagcagggatagtagagatgatgaatgtaggtaaggagaggaaatgagaatgaggactttcaggggcaagagatggtggtgtcattttgtgttgtgttcctgagtcaggtaccaacagatttcctctgagtagaatataaatgctaacaaattaaactgtatgttgtatacattcagcccttggtaacaaggaaaatgatagaattgaaatgttcttgtacctcactagaagcagagaaagggtgctggatatttctgtttccgataatgctgcatagatagtgccacttaaatgtagagcaaaattacagtctcctctaagtaattcctccagttaccatgtgtcctagattccgatacctgtccaatacaatttctagaactttttcacctccccatcatgtctgccttctagtgccccaaaattatgtgagatgctagaagttgtttgacctgtgattgttcttgcttccttggtccttacgtacgagtacatagcatgattgggccagaatccgtcttttgagctcttctagtaaagtaagttttgagataatacctaagaccacatggaaatttggttggtctaagtagaggacaagcacgtatttaactacctttggcagggtgtccgactgaccgaatcctgggagtgaccgcgca

SEQ ID NO: 406057 - DNA, 840 bp, Homo sapiens
gtagctgagatctgtttttattttacctgtcccttttgctccttccatttccatcactacctttagactcatttgcctgcatatccattttcaaaagatcctgcttaggccaggagcagtggctcacaccttcatcccagcactttgagaggccaaggcaggaggatcacttgagctcaggagtttgagaccagcctgggcaacatggtgagatctcatctctacaaaaaatacaaaaattagccaggcatggtagcacatgcctgtatacctagctacttgggaggctgaggctaaggaggatcccttagcccaggagttccagggtgtggtgaactatgattgtgccactgcactccagctggggcaacagggagatactctgtctctttaaaaaacagtggttactagatggaaagataaattctagtgttaccttgcactgtagggtgactaacagtaattttttattttttttgtatggctaattcagtacaaatggaaagtgtttgaggtgatgcatatgcaattatgctggttttttttaatccctatacattgtattggaatttacaatgtaccccataataaaggatagaggaatatttacagtatcatctatttggttaaatgttattcagcagttctggcctgctgcctttttttgtataacctatggcccaagaatggtttctacattttttaatagttgagcaaaaatcaatagaataatattttctaatacataaaattagatgaaatttcagtttcagtgttcataaataaagctttatgagagccatgctcaattgccttgaggctgctttcagcctacaacaa

SEQ ID NO: 406058 - DNA, 329 bp, Homo sapiens
acatagtggtatatatcttaaagcagaaaaccccaaaaaacaaaaacaaggaaaaaagaaaatacatgtcaacagtcagttaactgagagaattttgactctcttaataaaactgcattaagtttttgattttgtagaaattagcttttgtctaggcaactagtggttatactctgcaaatattgtaatgaatttttacttttttgatttttgtaataaaaattggtgcagataaaatgtcaaatgaacaaaccagtgttctaagagtgttactaacattttgttctaaaactgtccttcacaaattgaataaaaaactctcacactca

SEQ ID NO: 406059 - DNA, 1005 bp, Homo sapiens
ggcctacacaaagttttttaacccaccaatccctttaacgtttttgtttagaatagtctgtgcaacaaacagttttgatagaagtcttggaacagcgcagtccaatattttctgattttggcttattcaattgtagggaaacaaatatttaaatctgtatagtgttagtcgtctttttgcatttttctatttctatctaccgtctttttcataaggacaagggaatatgttatcttaaatgtcctttaaaatttgcatggcattgggaaagagtgacttaatctgttaaaaaactggtaacaatgccatttgtcaccattatagaatttcgattattcatgtaatattgaatagtgtactgacatgtctgcgtgttttcattacccctcttgttttcgaagttggagtgcttagtgcagttggtgagagcgggagccacactcaacgtctccaccacacggtacgcgcagacgccagcccacattgcagcctttgggggacatcctcagtgcctggtctggctgattcaagcaggagccaacattaacaaaccggattgtgagggtgaaactcccattcacaaggcagctcgctctgggagcctagaatgcatcagtgcccttgtggcgaatggggctcacgtcgagtaagtgtctttcgtttattctttccagctaaagatgtagttgaggatgttttgtttaaaggcagtacataagcaggcaaaagtcctaaaactttgttttcaaaattagtaatgtaattttgccttttagaacagttggtgttagtgaggaaaattgtgtggattaaattgatctctagaggagggggtttaatttcacagcagcctcaatattcttgtcgagagagtgtatttgaactgaaagaacagttaactaattagatttggaacttggcatcattactttgccaccattactttgccactaactagttgtgtcactgtggtctttaaacttttctttgcctaattttgatttc

SEQ ID NO: 406060 - DNA, 281 bp, Homo sapiens
  misc_feature (238)..(238): n is a, c, g, or t
  misc_feature (245)..(245): n is a, c, g, or t
  misc_feature (247)..(247): n is a, c, g, or t
tttttttttttgcattaacagtaaccccaagaaaggcatcagggttctggagtggttgtttgagtgacacagcacaaggccttgatttcatcatgcttttgctgtggatgtagtgtagcttgctgaacaggtatggaagctgtctttgctgttaagtacttctcccgtttgtttatcaacctgcagctaacaggatgtctgcttttttacaggtttatttcacagagcagtacggganggcgaananaagaatagagaagatagggaaattagaagataaa

SEQ ID NO: 406061 - DNA, 647 bp, Homo sapiens
cagatattttctatgcttatctatagaaataatcagtttgtaaacttatgttctccttgaagagttttcgaattttcatgtggcaacttattcttctgttcacattcttgacagaatagaccctcccaggttcaagcgattctcctgcctcagcctcccaagtagcagggactataggcatgtgccaccaccacactccgctaattttttgtatttttagtagagccagggtttcatcatgtaagccaagctggtctcaaagctcctgacctcaggtgatccacccgctttggcctcccaaagtgctgggattacaggcgtgagccaccgtgcccagcatggtatttatgattctaagtgccatttcaaaaatctgtttgctcttttttattctctggtccactaaagagtaatctttactgtgggctttatttcatatttttatttgtcctaatactaagtggtagcttctcatttctctgtttcttgattttggagagcaagtctatgcttatctatagaaataatcagtttgtaaacttatgttctccttgaagagtttttgaattttcatgtggcaacttatttttctgttcacattcttgacagaatagaccctcccaggtcatctgcacttctgatatctt

SEQ ID NO: 406062 - DNA, 3056 bp, Homo sapiens
tttttttttttgcattaacagtaaccccaagaaaggcatcagggttctggagtggttgtttgagtgacacagcacaaggccttgatttcatcatgcttttgctgtggatgtagtgtagcttgctgaacaggtatggaagctgtctttgctgttaagtacttctcccgtttgtttatcaacctgcagctaacaggatgtctgcttttttacaggtttatttcacagagcagtgtacattcttgtcttccaggggaacttcaacatggagttacttttgatccctcagttttaattcagtgtctaaaggtttacaagttcaacttactctattttattcagctctttcacttactctgccatcacttcctacttgaatctgagttttagctactgtagaggtctcagacctttcctttttagtactattagccaggtaaaactttggttcttgtgagtggtagggatgagtttttaggacagtattcaaagcctttttaaaggaaccaactactcaaatgctctacaatgccaaaaatacaatactcctgcaggttttcccaagcaaggccaaaacaatcaaaatctgacagaaaaacacagctgttcagctctggaatctgatgataggctactttttaatgtcaggacatccttctaaacttccacttacagtgtcacatgtaagcatgaaggctggctcgttggtgagccattgctttgtttttaggaagacagttatgaatgccatggacaatctcagtacatgttgtttgttatgattttattcacgctaaaggaatgggtattaaaattaagtgcatataatatagaattcagtttcaagtctgaagttagcgtaaatttagattcttcagactaacataaaacatgattttgagaagttaaataggaagatgccttttttagaagtttagcatatttagtttatctcccaaatcttgcttagaaatcaaatgtatataagagaagttagttacagagctagattgattaactacttctttaatgaagatttgctatgaatttgtttactctttcataccaccttcagatagctagtcagttcagcaggagcagagaccaggttagcacgcggatggggtgtaattcagtgtttttgtgttgtacagcctgagaaatgccagtggcctgacagcagcagacattgcacaaacccagggtttccaagagtgtgcccagtttctcttgaacctccagaattgtcatctgaaccatttctataacaatggcatcttaaatgggggtcatcagaatgtatttcctaatcatattagtgtgggaacaaatcgaaagagatgcttggaagactcagaagactttggagtaaagaaagctagaactgaagctcaaagcttggattctgccgtgccactcacgaatggcgacacagaagacgatgctgacaaaatgcacgttgatagggagtttgctgttgtaacagatatgaaaaacagtagctccgtatcgaatacattgacaaatggatgtgtcatcaatggacatttggacttcccctccacgaccccgctcagtgggatggaaagcaggaatggccagtgcttgacaggaactaacggaattagcagtggattagccccaggacagccgtttccgagtagccagggttctctctgcattagtgggactgaggagccagagaagaccctgagagctaaccctgagttgtgcggttctctgcacctgaacgggagtccaagtagctgcatagccagtaggccttcctgggtggaagacattggggataacctgtactatggacactaccacgggtttggggacactgctgaaagcatcccagaactgaacagtgtggtcgagcattccaagtccgtgaaggtgcaggagcggtacgacagtgccgtgctgggcaccatgcacctgcaccacggctcctagagacgctgacctggctctcggaaacgcaggagtccttcctggtagccagctcagaatacccatgtagcagcaacttgaacgaatgtcacaacttgtactttttttatatacttcaactttctgaaaaagtaaacttcgacaagttcccagcaactgcttgtttgtgcatgagtagggcttactaagtgcatagatgtttctacagtgaggtgtcctttttataaggtgcacttttggagtttttctgatgccaatctcaacattgtctttttaatactgtcaccagatattgccatttttctttttgttaaaagattatatgatcaagataaattggggtggtaaatcaggtgcctggtaatttatctctttgcacatgggcatcattttaaaaagcttgcttccactcttttctgtagaatttgacggaacacagctatttccctatgcaaggtacagccttacaaagatttctgcagtgatttgtgtgaagaagagaatgtttgtctttttcaatgaagctttgcagatcaccatgtggttgaaggttttagttgtggacacagtggtccctccttaatgatgaagatcactgccttgggcttcatggaaaacaggcccagcctggggctgcgtttggatttattgtttttattccacacttcctacttggtctctggaagttttaccacatgtaacagattcctttatatgtagtgaaaatcactatttgtagaaactgtcaggtcaaaatatttaactgactgttgacatgtattttcttttttccttgtttttgttttttggggttttctgctttaagatatataccactatgtatatccagttaactgagagaattttgactctcttaataaaactgcattaagtttttgattttgtagaaattagcttttgtctaggcaactagtggttatactctgcaaatattgtaatgaatttttacttttttgatttttgtaataaaaattggtgcagataaaatgtcaaatgaacaaaccagtgttctaagagtgttactaacattttgttctaaaactgtccttcacaaattgaataaaaaactctcacactca

SEQ ID NO: 406063 - DNA, 3199 bp, Homo sapiens
tttttttttttgcattaacagtaaccccaagaaaggcatcagggttctggagtggttgtttgagtgacacagcacaaggccttgatttcatcatgcttttgctgtggatgtagtgtagcttgctgaacaggtatggaagctgtctttgctgttaagtacttctcccgtttgtttatcaacctgcagctaacaggatgtctgcttttttacaggtttatttcacagagcagtgtacattcttgtcttccaggggaacttcaacatggagttacttttgatccctcagttttaattcagtgtctaaaggtttacaagttcaacttactctattttattcagctctttcacttactctgccatcacttcctacttgaatctgagttttagctactgtagaggtctcagacctttcctttttagtactattagccaggtaaaactttggttcttgtgagtggtagggatgagtttttaggacagtattcaaagcctttttaaaggaaccaactactcaaatgctctacaatgccaaaaatacaatactcctgcaggttttcccaagcaaggccaaaacaatcaaaatctgacagaaaaacacagctgttcagctctggaatctgatgataggctactttttaatgtcaggacatccttctaaacttccacttacagtgtcacatgtaagcatgaaggctggctcgttggtgagccattgctttgtttttaggaagacagttatgaatgccatggacaatctcagtacatgttgtttgttatgattttattcacgctaaaggaatgggtattaaaattaagtgcatataatatagaattcagtttcaagtctgaagttagcgtaaatttagattcttcagactaacataaaacatgattttgagaagttaaataggaagatgccttttttagaagtttagcatatttagtttatctcccaaatcttgcttagaaatcaaatgtatataagagaagttagttacagagctagattgattaactacttctttaatgaagatttgctatgaatttgtttactctttcataccaccttcagatagctagtcagttcagcaggagcagagaccaggttagcacgcggatggggtgtaattcagtgtttttgtgttgtacagcctgagaaatgccagtggcctgacagcagcagacattgcacaaacccagggtttccaagagtgtgcccagtttctcttgaacctccagaattgtcatctgaaccatttctataacaatggcatcttaaatgggggtcatcagaatgtatttcctaatcatattagtgtgggaacaaatcgaaagagatgcttggaagactcagaagactttggagtaaagaaagctagaactgaagctcaaagcttggattctgccgtgccactcacgaatggcgacacagaagacgatgctgacaaaatgcacgttgatagggagtttgctgttgtaacaggggagtggacagtttcctgttagctgcaacaacaatccaatggttgaagacaccaaacagcaggagagtggttctgttggaccaaaagaaatagaaatatatactgtgtcagcaatgcagaccccctgtcgttgcaggaatcaatatgaaaaacagtagctccgtatcgaatacattgacaaatggatgtgtcatcaatggacatttggacttcccctccacgaccccgctcagtgggatggaaagcaggaatggccagtgcttgacaggaactaacggaattagcagtggattagccccaggacagccgtttccgagtagccagggttctctctgcattagtgggactgaggagccagagaagaccctgagagctaaccctgagttgtgcggttctctgcacctgaacgggagtccaagtagctgcatagccagtaggccttcctgggtggaagacattggggataacctgtactatggacactaccacgggtttggggacactgctgaaagcatcccagaactgaacagtgtggtcgagcattccaagtccgtgaaggtgcaggagcggtacgacagtgccgtgctgggcaccatgcacctgcaccacggctcctagagacgctgacctggctctcggaaacgcaggagtccttcctggtagccagctcagaatacccatgtagcagcaacttgaacgaatgtcacaacttgtactttttttatatacttcaactttctgaaaaagtaaacttcgacaagttcccagcaactgcttgtttgtgcatgagtagggcttactaagtgcatagatgtttctacagtgaggtgtcctttttataaggtgcacttttggagtttttctgatgccaatctcaacattgtctttttaatactgtcaccagatattgccatttttctttttgttaaaagattatatgatcaagataaattggggtggtaaatcaggtgcctggtaatttatctctttgcacatgggcatcattttaaaaagcttgcttccactcttttctgtagaatttgacggaacacagctatttccctatgcaaggtacagccttacaaagatttctgcagtgatttgtgtgaagaagagaatgtttgtctttttcaatgaagctttgcagatcaccatgtggttgaaggttttagttgtggacacagtggtccctccttaatgatgaagatcactgccttgggcttcatggaaaacaggcccagcctggggctgcgtttggatttattgtttttattccacacttcctacttggtctctggaagttttaccacatgtaacagattcctttatatgtagtgaaaatcactatttgtagaaactgtcaggtcaaaatatttaactgactgttgacatgtattttcttttttccttgtttttgttttttggggttttctgctttaagatatataccactatgtatatccagttaactgagagaattttgactctcttaataaaactgcattaagtttttgattttgtagaaattagcttttgtctaggcaactagtggttatactctgcaaatattgtaatgaatttttacttttttgatttttgtaataaaaattggtgcagataaaatgtcaaatgaacaaaccagtgttctaagagtgttactaacattttgttctaaaactgtccttcacaaattgaataaaaaactctcacactca

SEQ ID NO: 406064 - DNA, 2996 bp, Homo sapiens
tttttttttttgcattaacagtaaccccaagaaaggcatcagggttctggagtggttgtttgagtgacacagcacaaggccttgatttcatcatgcttttgctgtggatgtagtgtagcttgctgaacaggtatggaagctgtctttgctgttaagtacttctcccgtttgtttatcaacctgcagctaacaggatgtctgcttttttacaggtttatttcacagagcagtgtacattcttgtcttccaggggaacttcaacatggagttacttttgatccctcagttttaattcagtgtctaaaggtttacaagttcaacttactctattttattcagctctttcacttactctgccatcacttcctacttgaatctgagttttagctactgtagaggtctcagacctttcctttttagtactattagccaggtaaaactttggttcttgtgagtggtagggatgagtttttaggacagtattcaaagcctttttaaaggaaccaactactcaaatgctctacaatgccaaaaatacaatactcctgcaggttttcccaagcaaggccaaaacaatcaaaatctgacagaaaaacacagctgttcagctctggaatctgatgataggctactttttaatgtcaggacatccttctaaacttccacttacagtgtcacatgtaagcatgaaggctggctcgttggtgagccattgctttgtttttaggaagacagttatgaatgccatggacaatctcagtacatgttgtttgttatgattttattcacgctaaaggaatgggtattaaaattaagtgcatataatatagaattcagtttcaagtctgaagttagcgtaaatttagattcttcagactaacataaaacatgattttgagaagttaaataggaagatgccttttttagaagtttagcatatttagtttatctcccaaatcttgcttagaaatcaaatgtatataagagaagttagttacagagctagattgattaactacttctttaatgaagatttgctatgaatttgtttactctttcataccaccttcagatagctagtcagttcagcaggagcagagaccaggttagcacgcggatggggtgtaattcagtgtttttgtgttgtacagcctgagaaatgccagtggcctgacagcagcagacattgcacaaacccagggtttccaagagtgtgcccagtttctcttgaacctccagaattgtcatctgaaccatttctataacaatggcatcttaaatgggggtcatcagaatgtatttcctaatcatattagtgtgggaacaaatcgaaagagatgcttggaagactcagaagactttggagtaaagaaagctagaactgaagctcaaagcttggattctgccgtgccactcacgaatggcgacacagaagacgatgctgacaaaatgcacgttgatagggagtttgctgttgtaacagatttggacttcccctccacgaccccgctcagtgggatggaaagcaggaatggccagtgcttgacaggaactaacggaattagcagtggattagccccaggacagccgtttccgagtagccagggttctctctgcattagtgggactgaggagccagagaagaccctgagagctaaccctgagttgtgcggttctctgcacctgaacgggagtccaagtagctgcatagccagtaggccttcctgggtggaagacattggggataacctgtactatggacactaccacgggtttggggacactgctgaaagcatcccagaactgaacagtgtggtcgagcattccaagtccgtgaaggtgcaggagcggtacgacagtgccgtgctgggcaccatgcacctgcaccacggctcctagagacgctgacctggctctcggaaacgcaggagtccttcctggtagccagctcagaatacccatgtagcagcaacttgaacgaatgtcacaacttgtactttttttatatacttcaactttctgaaaaagtaaacttcgacaagttcccagcaactgcttgtttgtgcatgagtagggcttactaagtgcatagatgtttctacagtgaggtgtcctttttataaggtgcacttttggagtttttctgatgccaatctcaacattgtctttttaatactgtcaccagatattgccatttttctttttgttaaaagattatatgatcaagataaattggggtggtaaatcaggtgcctggtaatttatctctttgcacatgggcatcattttaaaaagcttgcttccactcttttctgtagaatttgacggaacacagctatttccctatgcaaggtacagccttacaaagatttctgcagtgatttgtgtgaagaagagaatgtttgtctttttcaatgaagctttgcagatcaccatgtggttgaaggttttagttgtggacacagtggtccctccttaatgatgaagatcactgccttgggcttcatggaaaacaggcccagcctggggctgcgtttggatttattgtttttattccacacttcctacttggtctctggaagttttaccacatgtaacagattcctttatatgtagtgaaaatcactatttgtagaaactgtcaggtcaaaatatttaactgactgttgacatgtattttcttttttccttgtttttgttttttggggttttctgctttaagatatataccactatgtatatccagttaactgagagaattttgactctcttaataaaactgcattaagtttttgattttgtagaaattagcttttgtctaggcaactagtggttatactctgcaaatattgtaatgaatttttacttttttgatttttgtaataaaaattggtgcagataaaatgtcaaatgaacaaaccagtgttctaagagtgttactaacattttgttctaaaactgtccttcacaaattgaataaaaaactctcacactca

SEQ ID NO: 406065 - DNA, 3002 bp, Homo sapiens
tttttttttttgcattaacagtaaccccaagaaaggcatcagggttctggagtggttgtttgagtgacacagcacaaggccttgatttcatcatgcttttgctgtggatgtagtgtagcttgctgaacaggtatggaagctgtctttgctgttaagtacttctcccgtttgtttatcaacctgcagctaacaggatgtctgcttttttacaggtttatttcacagagcagtgtacattcttgtcttccaggggaacttcaacatggagttacttttgatccctcagttttaattcagtgtctaaaggtttacaagttcaacttactctattttattcagctctttcacttactctgccatcacttcctacttgaatctgagttttagctactgtagaggtctcagacctttcctttttagtactattagccaggtaaaactttggttcttgtgagtggtagggatgagtttttaggacagtattcaaagcctttttaaaggaaccaactactcaaatgctctacaatgccaaaaatacaatactcctgcaggttttcccaagcaaggccaaaacaatcaaaatctgacagaaaaacacagctgttcagctctggaatctgatgataggctactttttaatgtcaggacatccttctaaacttccacttacagtgtcacatgtaagcatgaaggctggctcgttggtgagccattgctttgtttttaggaagacagttatgaatgccatggacaatctcagtacatgttgtttgttatgattttattcacgctaaaggaatgggtattaaaattaagtgcatataatatagaattcagtttcaagtctgaagttagcgtaaatttagattcttcagactaacataaaacatgattttgagaagttaaataggaagatgccttttttagaagtttagcatatttagtttatctcccaaatcttgcttagaaatcaaatgtatataagagaagttagttacagagctagattgattaactacttctttaatgaagatttgctatgaatttgtttactctttcataccaccttcagatagctagtcagttcagcaggagcagagaccaggttagcacgcggatggggtgtaattcagtgtttttgtgttgtacagcctgagaaatgccagtggcctgacagcagcagacattgcacaaacccagggtttccaagagtgtgcccagtttctcttgaacctccagaattgtcatctgaaccatttctataacaatggcatcttaaatgggggtcatcagaatgtatttcctaatcatattagtgtgggaacaaatcgaaagagatgcttggaagactcagaagactttggagtaaagaaagctagaactgaagctcaaagcttggattctgccgtgccactcacgaatggcgacacagaagacgatgctgacaaaatgcacgttgatagggagtttgctgttgtaacagatatgaaaaacagtagctccgtatcgaatacattgacaaatggatgtgtcatcaatggacatttggacttcccctccacgaccccgctcagtgggatggaaagcaggaatggccagtgcttgacaggaactaacggaattagcagtggattagccccaggacagccgtttccgagtagccagggttctctctgcattagtgggactgaggagccagagaagaccctgagagctaaccctgagttgtgcggttctctgcacctgaacgggagtccaagtagctgcatagccagtaggccttcctgggtggaagacattggggataacctgtactatggacactaccacgggtttggggacactgctgaaagcatcccagaactgaacagtgtggtcgagcattccaagtccgtgaaggtgcaggagcggtacgacagtgccgtgctgggcaccatgcacctgcaccacggctcctagagacgctgacctggctctcggaaacgcaggagtccttcctggtagccagctcagaatacccatgtagcagcaacttgaacgaatgtcacaacttgtactttttttatatacttcaactttctgattactaagtgcatagatgtttctacagtgaggtgtcctttttataaggtgcacttttggagtttttctgatgccaatctcaacattgtctttttaatactgtcaccagatattgccatttttctttttgttaaaagattatatgatcaagataaattggggtggtaaatcaggtgcctggtaatttatctctttgcacatgggcatcattttaaaaagcttgcttccactcttttctgtagaatttgacggaacacagctatttccctatgcaaggtacagccttacaaagatttctgcagtgatttgtgtgaagaagagaatgtttgtctttttcaatgaagctttgcagatcaccatgtggttgaaggttttagttgtggacacagtggtccctccttaatgatgaagatcactgccttgggcttcatggaaaacaggcccagcctggggctgcgtttggatttattgtttttattccacacttcctacttggtctctggaagttttaccacatgtaacagattcctttatatgtagtgaaaatcactatttgtagaaactgtcaggtcaaaatatttaactgactgttgacatgtattttcttttttccttgtttttgttttttggggttttctgctttaagatatataccactatgtatatccagttaactgagagaattttgactctcttaataaaactgcattaagtttttgattttgtagaaattagcttttgtctaggcaactagtggttatactctgcaaatattgtaatgaatttttacttttttgatttttgtaataaaaattggtgcagataaaatgtcaaatgaacaaaccagtgttctaagagtgttactaacattttgttctaaaactgtccttcacaaattgaataaaaaactctcacactca

SEQ ID NO: 406066 - DNA, 4462 bp, Homo sapiens
gcatttagaatatctaaaatgatttgtccatttagctattgcttttttattcaggtgactacaaaaacatttttagccattctcttaacatgtatgaatatttagaagtagattttttttaagtttattatgtctttatgcaaattcttcactggggatgaaaaaaagaagagtatgtatattgtttcccaaacccacatgaaaaaaatcatttgtgttcactaaacttaaaagaaaatgtgttcatctttctggaagctacagaattgctgtggtcaccttcttcccagtagagaaattcagatcagttagtatatttaaaataataggttttctgtagtcaggggctatttgaccttagctaaagatccataacaaaactcaaatcctgctttttttaaaagtgaccttgctaccttcttttgaataggcagaagtggccaccttttattcctcagacattagttatttgttaaactttatccaagctggaacatacttttgaaaaacccagcccatcccgtctaccagatgccgagtccatacaccctgtgtttcccatcatttgatttatgacactctgactgagtaagcaatgtgttaaatcactagagattactcgaggctttccttgtgggacatggcactccacgtccactggaagcttgagggagctgccttcacagtcctttgagaatcagaccaaaagtcaggctgctctcctttaaacacttgagtaacttcaaatttttgttctgccaaaattatttccaagaattctacatttttgaacaactgtgtacagctatctttgcattttaaatgcccctagtttgagactcgggagggtcaagtgtccccacccctggaaagggctcggataggagggtgcttgcttctaaatcctgatcttctctatggggttggctggaagagaagtaggatcttgtctgaaacctcatccccagcattgtgtttggatgttcgtgggatccgagggctggccgggcagacagaagggaagtgcgggtcttggctggcagctgggagcagaggaagggagagcgttggaggtcgtgatgtgcgtgctctgcctcagtaggtctgaggtgcccactgttgttatgcttagttttattagattctctgtaacaacatgagcttaccaaccagccttgattttgagattaaataattgaacagattaactgggcactgaagtaaaattctacctactttattctcttagtaaaaactatacacacaataaacaactgtcaaggttgccatcatatttgagttttgtcacctaggaaaacattgtttatactttgtttttgaaaaaattcatatgaatttcccctgggaataacttgttttatttcagtttttattttctattgaaacacttgttttctagtctaggattttagccaaatagaaaagctatcatttaatttgggggaaaaaaaaatctattgtcctgtgaagaatttatagcaattattaaactatgttgcttaaatataaaaaaaaggatgattaatggaatatttagataatgtttccattcactgaagaagccgtgatcctttattggcaggaagacttgcaggacatatcagaagcctctgtcagaggtttacaggaggtgagatggaggggaagccctctatgggaagagtcccatggtgtgtgacatgttagggtaatcggatgtatttaagctgcgtcctcattctaaaagttattagaactgagctcttctagatttaataacatgctttgctttggtagtgaagaacattgagataaaatctagtattaccgagttagagataattttagatcatcccttatactgttacgtgaattcctgtgaacatgaatattactgattctcaagttccagtatacagaagaataacttgtcattgcctgtcctggtgtacccagatgttccatgatggacgttttatcccataagacgtctccctcctgatagatgtccgtatatgcagattaaactaccaacattttttccagcaaaggtggtttttgaaagtaacctaatgaaaccctggctgccatggtcattttaattgctggactgagaagaagcgactctgcgttgtgctgttggcccaggcctgcatgcctgaggactgttggccgttacagttccttgctgtggtcgccggtctctctgtattctgccactgctctcatgtggcatttggcagaagtactacgtagatttctgtgctactgaaaaaaataaaaacagtggttccttttaatagccctgatttgagacttaggagagggtcaagagtccctacctgatttatgaggagagaagattttttaaaaacctcatgtgatgctgtcatacatagttcaaagagcttccttaattcacttcatttacctttttttccattttcgcttgagaactagagaagtttgtgttctgttggaaccctctgtagaacactttacactcagttctgatggaccttttcaggggcgattttttaaaaaccgctctcgaaagtagtcttaaaatgagagcactttattgatggcttttcaggactgtgttggtatttttcatgcagtgtatttgtcagcttacatttttcagttgagctacctgatgctactgacacacatatgattttcctatcttaccaggcaaatactactgttaacgttttaatagtaagtctacttatgcacattgattttactttgaaaaaagaactggtttaaaaggaaaaaaaagaaactaaaattctttaaaattgtaatggcagtgaagcattttatagtttctcctccctcattggttctgaattttggtgacaggtgtatttcttaatgcagatatgaaaaacagtagctccgtatcgaatacattgacaaatggatgtgtcatcaatggacatttggacttcccctccacgaccccgctcagtgggatggaaagcaggaatggccagtgcttgacaggaactaacggaattagcagtggattagccccaggacagccgtttccgagtagccagggttctctctgcattagtgggactgaggagccagagaagaccctgagagctaaccctgagttgtgcggttctctgcacctgaacgggagtccaagtagctgcatagccagtaggccttcctgggtggaagacattggggataacctgtactatggacactaccacgggtttggggacactgctgaaagcatcccagaactgaacagtgtggtcgagcattccaagtccgtgaaggtgcaggagcggtacgacagtgccgtgctgggcaccatgcacctgcaccacggctcctagagacgctgacctggctctcggaaacgcaggagtccttcctggtagccagctcagaatacccatgtagcagcaacttgaacgaatgtcacaacttgtactttttttatatacttcaactttctgaaaaagtaaacttcgacaagttcccagcaactgcttgtttgtgcatgagtagggcttactaagtgcatagatgtttctacagtgaggtgtcctttttataaggtgcacttttggagtttttctgatgccaatctcaacattgtctttttaatactgtcaccagatattgccatttttctttttgttaaaagattatatgatcaagataaattggggtggtaaatcaggtgcctggtaatttatctctttgcacatgggcatcattttaaaaagcttgcttccactcttttctgtagaatttgacggaacacagctatttccctatgcaaggtacagccttacaaagatttctgcagtgatttgtgtgaagaagagaatgtttgtctttttcaatgaagctttgcagatcaccatgtggttgaaggttttagttgtggacacagtggtccctccttaatgatgaagatcactgccttgggcttcatggaaaacaggcccagcctggggctgcgtttggatttattgtttttattccacacttcctacttggtctctggaagttttaccacatgtaacagattcctttatatgtagtgaaaatcactatttgtagaaactgtcaggtcaaaatatttaactgactgttgacatgtattttcttttttccttgtttttgttttttggggttttctgctttaagatatataccactatgtatatccagttaactgagagaattttgactctcttaataaaactgcattaagtttttgattttgtagaaattagcttttgtctaggcaactagtggttatactctgcaaatattgtaatgaatttttacttttttgatttttgtaataaaaattggtgcagataaaatgtcaaatgaacaaaccagtgttctaagagtgttactaacattttgttctaaaactgtccttcacaaattgaataaaaaactctcacactca

SEQ ID NO: 406067 - DNA, 3490 bp, Homo sapiens
ggcctacacaaagttttttaacccaccaatccctttaacgtttttgtttagaatagtctgtgcaacaaacagttttgatagaagtcttggaacagcgcagtccaatattttctgattttggcttattcaattgtagggaaacaaatatttaaatctgtatagtgttagtcgtctttttgcatttttctatttctatctaccgtctttttcataaggacaagggaatatgttatcttaaatgtcctttaaaatttgcatggcattgggaaagagtgacttaatctgttaaaaaactggtaacaatgccatttgtcaccattatagaatttcgattattcatgtaatattgaatagtgtactgacatgtctgcgtgttttcattacccctcttgttttcgaagttggagtgcttagtgcagttggtgagagcgggagccacactcaacgtctccaccacacggtacgcgcagacgccagcccacattgcagcctttgggggacatcctcagtgcctggtctggctgattcaagcaggagccaacattaacaaaccggattgtgagggtgaaactcccattcacaaggcagctcgctctgggagcctagaatgcatcagtgcccttgtggcgaatggggctcacgtcgagtttatttcacagagcagtgtacattcttgtcttccaggggaacttcaacatggagttacttttgatccctcagttttaattcagtgtctaaaggtttacaagttcaacttactctattttattcagctctttcacttactctgccatcacttcctacttgaatctgagttttagctactgtagaggtctcagacctttcctttttagtactattagccaggtaaaactttggttcttgtgagtggtagggatgagtttttaggacagtattcaaagcctttttaaaggaaccaactactcaaatgctctacaatgccaaaaatacaatactcctgcaggttttcccaagcaaggccaaaacaatcaaaatctgacagaaaaacacagctgttcagctctggaatctgatgataggctactttttaatgtcaggacatccttctaaacttccacttacagtgtcacatgtaagcatgaaggctggctcgttggtgagccattgctttgtttttaggaagacagttatgaatgccatggacaatctcagtacatgttgtttgttatgattttattcacgctaaaggaatgggtattaaaattaagtgcatataatatagaattcagtttcaagtctgaagttagcgtaaatttagattcttcagactaacataaaacatgattttgagaagttaaataggaagatgccttttttagaagtttagcatatttagtttatctcccaaatcttgcttagaaatcaaatgtatataagagaagttagttacagagctagattgattaactacttctttaatgaagatttgctatgaatttgtttactctttcataccaccttcagatagctagtcagttcagcaggagcagagaccaggttagcacgcggatggggtgtaattcagtgtttttgtgttgtacagcctgagaaatgccagtggcctgacagcagcagacattgcacaaacccagggtttccaagagtgtgcccagtttctcttgaacctccagaattgtcatctgaaccatttctataacaatggcatcttaaatgggggtcatcagaatgtatttcctaatcatattagtgtgggaacaaatcgaaagagatgcttggaagactcagaagactttggagtaaagaaagctagaactgaagctcaaagcttggattctgccgtgccactcacgaatggcgacacagaagacgatgctgacaaaatgcacgttgatagggagtttgctgttgtaacagatatgaaaaacagtagctccgtatcgaatacattgacaaatggatgtgtcatcaatggacatttggacttcccctccacgaccccgctcagtgggatggaaagcaggaatggccagtgcttgacaggaactaacggaattagcagtggattagccccaggacagccgtttccgagtagccagggttctctctgcattagtgggactgaggagccagagaagaccctgagagctaaccctgagttgtgcggttctctgcacctgaacgggagtccaagtagctgcatagccagtaggccttcctgggtggaagacattggggataacctgtactatggacactaccacgggtttggggacactgctgaaagcatcccagaactgaacagtgtggtcgagcattccaagtccgtgaaggtgcaggagcggtacgacagtgccgtgctgggcaccatgcacctgcaccacggctcctagagacgctgacctggctctcggaaacgcaggagtccttcctggtagccagctcagaatacccatgtagcagcaacttgaacgaatgtcacaacttgtactttttttatatacttcaactttctgaaaaagtaaacttcgacaagttcccagcaactgcttgtttgtgcatgagtagggcttactaagtgcatagatgtttctacagtgaggtgtcctttttataaggtgcacttttggagtttttctgatgccaatctcaacattgtctttttaatactgtcaccagatattgccatttttctttttgttaaaagattatatgatcaagataaattggggtggtaaatcaggtgcctggtaatttatctctttgcacatgggcatcattttaaaaagcttgcttccactcttttctgtagaatttgacggaacacagctatttccctatgcaaggtacagccttacaaagatttctgcagtgatttgtgtgaagaagagaatgtttgtctttttcaatgaagctttgcagatcaccatgtggttgaaggttttagttgtggacacagtggtccctccttaatgatgaagatcactgccttgggcttcatggaaaacaggcccagcctggggctgcgtttggatttattgtttttattccacacttcctacttggtctctggaagttttaccacatgtaacagattcctttatatgtagtgaaaatcactatttgtagaaactgtcaggtcaaaatatttaactgactgttgacatgtattttcttttttccttgtttttgttttttggggttttctgctttaagatatataccactatgtatatccagttaactgagagaattttgactctcttaataaaactgcattaagtttttgattttgtagaaattagcttttgtctaggcaactagtggttatactctgcaaatattgtaatgaatttttacttttttgatttttgtaataaaaattggtgcagataaaatgtcaaatgaacaaaccagtgttctaagagtgttactaacattttgttctaaaactgtccttcacaaattgaataaaaaactctcacactca

SEQ ID NO: 406068 - DNA, 4160 bp, Homo sapiens
tgtaggtccgttttaatactgcattatacggatgccagtgtttaatggcagagtctcagaacttttctacaggagaggatttcttgagaagccatttattctgtggtaaccagattttcagctgggctacatgtattttaacttaattatttttatcttaactgggatcatcagatagcttgagaagcatcgatagccttatataagcaaattcagtgactcactctagaaaagtctctcttgcctagtttaggaagtaggcacagttggctataacaaagcctagaatgtgatgttagtagactattctaatgccacaaagaatactgcttcactttaattaaaagaaattttaattaaaatggaattgtcttagtttggatcataattgaccatttatgacccacctttgtttgtttaccatagagccctgtctagaaaccagattttcattaggtcaaatacaggtgatgagcatatttaatattagtgttaaattcatttgtgacttttgcccttagcaaaatgtaacctagatttacttttagctattcattttgaaattcgtggtttctttatatttgttcatttttttgcccatcagaataatatttcagttacaaaatctaccagaattatgactctgaattcatattttctgattttaggtcctctgaattctagtcatcctcacatcctacttttgcctcctcttttttttttttttttttttttctaaaaagagacagagtctccctttgtcgtccaggctaaagtacagtggcatgattatagttcactgcaacttcaaactcctgggctccagtgatcctcctgcctcagattcttgagtagccaggactataggcacataccaccatgcccaactaatttttaaaaatgttttgtagagatggggtcttgctgtgttacccaggctggtctcaaactcctgggctcaagcagtccttccaccttggcctcccagagcactgggtttacaggtgtgagccactgtgcagcctccttttatctaattgtccccacagcagacttgtctggtcttggctattttccggttgttaaggtgtttcaggatggaggaatcagttcctgagatagttattaagttctgcctgctagaaagggacagtaagtgggttgatatcattctagacttgttaagaaattgttcagaattttgattgtttttcatagcagcttgattaaaatacagattttaataatttccttactacttttataggtagtgctttcaaataaaaccagtgtttgctaaatccaaatgtctttctcccttgctaaattatagcaggagcatgctaaatatttcatcagactactggaatgatggttttacattttaatgtttgaaaacataattttggttcaattgcagtgtaaaactattctcagtaactttaaacttgaaaacttggcaccaaatttatttaggtagaaactctttaaaaatagtttcttcctattattaactgaagaatatatttaagaaagtcttcataattaaataagagtttggataccaaagggttaaaaatacacatgtatttcttttgctgaagatatcttagatgtttgctaatgttttatctttacaaatggacaatttagtaatgttttttatctttttttaatgattccatgtatttgcttatttccatctaggaatagttactaatgtatttgagatacagcataccaaattttaaagtaaccagaatcgtgagttgatggtttttagtccatactgttaaacttatgttgaaatattgacatatttaaattggcttcatgctaaaaaattaccaaaggtaatttaaaaggcagtgttttagagcagtagctcatggtcaaggtggtcacatgacaatggcttaagctcagtgtgcttctgcaccttatgttgtctatgtatttttaatccaaatgttgcctgcaaatatgtgatcccttattatttaagtttcctgtattatgaaccattgcccgttttaaatcacacagaagattctgaatctgtaaaaactacacatgtcaatgttttacagctacgtaattcgaattgacttgattttttcaagtaatcctagaaagggggagcattccatatagaaactgctgaaactgccacaggtgcttctccgaaaaccttacagttgtggcattgaatgttcagtatcgcttcctttctgcacacgaggcatactgttgagcctgagaaatgccagtggcctgacagcagcagacattgcacaaacccagggtttccaagagtgtgcccagtttctcttgaacctccagaattgtcatctgaaccatttctataacaatggcatcttaaatgggggtcatcagaatgtatttcctaatcatattagtgtgggaacaaatcgaaagagatgcttggaagactcagaagactttggagtaaagaaagctagaactgaagctcaaagcttggattctgccgtgccactcacgaatggcgacacagaagacgatgctgacaaaatgcacgttgatagggagtttgctgttgtaacagatatgaaaaacagtagctccgtatcgaatacattgacaaatggatgtgtcatcaatggacatttggacttcccctccacgaccccgctcagtgggatggaaagcaggaatggccagtgcttgacaggaactaacggaattagcagtggattagccccaggacagccgtttccgagtagccagggttctctctgcattagtgggactgaggagccagagaagaccctgagagctaaccctgagttgtgcggttctctgcacctgaacgggagtccaagtagctgcatagccagtaggccttcctgggtggaagacattggggataacctgtactatggacactaccacgggtttggggacactgctgaaagcatcccagaactgaacagtgtggtcgagcattccaagtccgtgaaggtgcaggagcggtacgacagtgccgtgctgggcaccatgcacctgcaccacggctcctagagacgctgacctggctctcggaaacgcaggagtccttcctggtagccagctcagaatacccatgtagcagcaacttgaacgaatgtcacaacttgtactttttttatatacttcaactttctgaaaaagtaaacttcgacaagttcccagcaactgcttgtttgtgcatgagtagggcttactaagtgcatagatgtttctacagtgaggtgtcctttttataaggtgcacttttggagtttttctgatgccaatctcaacattgtctttttaatactgtcaccagatattgccatttttctttttgttaaaagattatatgatcaagataaattggggtggtaaatcaggtgcctggtaatttatctctttgcacatgggcatcattttaaaaagcttgcttccactcttttctgtagaatttgacggaacacagctatttccctatgcaaggtacagccttacaaagatttctgcagtgatttgtgtgaagaagagaatgtttgtctttttcaatgaagctttgcagatcaccatgtggttgaaggttttagttgtggacacagtggtccctccttaatgatgaagatcactgccttgggcttcatggaaaacaggcccagcctggggctgcgtttggatttattgtttttattccacacttcctacttggtctctggaagttttaccacatgtaacagattcctttatatgtagtgaaaatcactatttgtagaaactgtcaggtcaaaatatttaactgactgttgacatgtattttcttttttccttgtttttgttttttggggttttctgctttaagatatataccactatgtatatccagttaactgagagaattttgactctcttaataaaactgcattaagtttttgattttgtagaaattagcttttgtctaggcaactagtggttatactctgcaaatattgtaatgaatttttacttttttgatttttgtaataaaaattggtgcagataaaatgtcaaatgaacaaaccagtgttctaagagtgttactaacattttgttctaaaactgtccttcacaaattgaataaaaaactctcacactca

SEQ ID NO: 406069 - DNA, 2594 bp, Homo sapiens
agcgggcgcgctccgctcggcagcctgtgggacgcgaccgcggcgctagtctcgttcctttgtgctgcggcggcggcttctcgagtcctccccgacgcgtcctctaggccagcgagccccgcgctctccggtgacggaccatgtcggcggcgggagcgggcgcgggcgtagaggcgggcttctccagcgaggagctgctctcgctccgtttcccgctgcaccgcgcctgccgcgacggggacctggccacgctctgctcgctgctgcagcagacaccccacgcccacctggcctctgaggactccttctatggctggacgcccgtgcactgggccgcgcatttcggcaagttggagtgcttagtgcagttggtgagagcgggagccacactcaacgtctccaccacacggtacgcgcagacgccagcccacattgcagcctttgggggacatcctcagtgcctggtctggctgattcaagcaggagccaacattaacaaaccggattgtgagggtgaaactcccattcacaaggcagctcgctctgggagcctagaatgcatcagtgcccttgtggcgaatggggctcacgtcgagtttatttcacagagcagtgtacattcttgtcttccaggggaacttcaacatggagttacttttgatccctcagttttaattcagtgtctaaagcctgagaaatgccagtggcctgacagcagcagacattgcacaaacccagggtttccaagagtgtgcccagtttctcttgaacctccagaattgtcatctgaaccatttctataacaatggcatcttaaatgggggtcatcagaatgtatttcctaatcatattagtgtgggaacaaatcgaaagagatgcttggaagactcagaagactttggagtaaagaaagctagaactgaagctcaaagcttggattctgccgtgccactcacgaatggcgacacagaagacgatgctgacaaaatgcacgttgatagggagtttgctgttgtaacagatatgaaaaacagtagctccgtatcgaatacattgacaaatggatgtgtcatcaatggacatttggacttcccctccacgaccccgctcagtgggatggaaagcaggaatggccagtgcttgacaggaactaacggaattagcagtggattagccccaggacagccgtttccgagtagccagggttctctctgcattagtgggactgaggagccagagaagaccctgagagctaaccctgagttgtgcggttctctgcacctgaacgggagtccaagtagctgcatagccagtaggccttcctgggtggaagacattggggataacctgtactatggacactaccacgggtttggggacactgctgaaagcatcccagaactgaacagtgtggtcgagcattccaagtccgtgaaggtgcaggagcggtacgacagtgccgtgctgggcaccatgcacctgcaccacggctcctagagacgctgacctggctctcggaaacgcaggagtccttcctggtagccagctcagaatacccatgtagcagcaacttgaacgaatgtcacaacttgtactttttttatatacttcaactttctgaaaaagtaaacttcgacaagttcccagcaactgcttgtttgtgcatgagtagggcttactaagtgcatagatgtttctacagtgaggtgtcctttttataaggtgcacttttggagtttttctgatgccaatctcaacattgtctttttaatactgtcaccagatattgccatttttctttttgttaaaagattatatgatcaagataaattggggtggtaaatcaggtgcctggtaatttatctctttgcacatgggcatcattttaaaaagcttgcttccactcttttctgtagaatttgacggaacacagctatttccctatgcaaggtacagccttacaaagatttctgcagtgatttgtgtgaagaagagaatgtttgtctttttcaatgaagctttgcagatcaccatgtggttgaaggttttagttgtggacacagtggtccctccttaatgatgaagatcactgccttgggcttcatggaaaacaggcccagcctggggctgcgtttggatttattgtttttattccacacttcctacttggtctctggaagttttaccacatgtaacagattcctttatatgtagtgaaaatcactatttgtagaaactgtcaggtcaaaatatttaactgactgttgacatgtattttcttttttccttgtttttgttttttggggttttctgctttaagatatataccactatgtatatccagttaactgagagaattttgactctcttaataaaactgcattaagtttttgattttgtagaaattagcttttgtctaggcaactagtggttatactctgcaaatattgtaatgaatttttacttttttgatttttgtaataaaaattggtgcagataaaatgtcaaatgaacaaaccagtgttctaagagtgttactaacattttgttctaaaactgtccttcacaaattgaataaaaaactctcacactca

SEQ ID NO: 406070 - DNA, 4408 bp, Homo sapiens
gcatttagaatatctaaaatgatttgtccatttagctattgcttttttattcaggtgactacaaaaacatttttagccattctcttaacatgtatgaatatttagaagtagattttttttaagtttattatgtctttatgcaaattcttcactggggatgaaaaaaagaagagtatgtatattgtttcccaaacccacatgaaaaaaatcatttgtgttcactaaacttaaaagaaaatgtgttcatctttctggaagctacagaattgctgtggtcaccttcttcccagtagagaaattcagatcagttagtatatttaaaataataggttttctgtagtcaggggctatttgaccttagctaaagatccataacaaaactcaaatcctgctttttttaaaagtgaccttgctaccttcttttgaataggcagaagtggccaccttttattcctcagacattagttatttgttaaactttatccaagctggaacatacttttgaaaaacccagcccatcccgtctaccagatgccgagtccatacaccctgtgtttcccatcatttgatttatgacactctgactgagtaagcaatgtgttaaatcactagagattactcgaggctttccttgtgggacatggcactccacgtccactggaagcttgagggagctgccttcacagtcctttgagaatcagaccaaaagtcaggctgctctcctttaaacacttgagtaacttcaaatttttgttctgccaaaattatttccaagaattctacatttttgaacaactgtgtacagctatctttgcattttaaatgcccctagtttgagactcgggagggtcaagtgtccccacccctggaaagggctcggataggagggtgcttgcttctaaatcctgatcttctctatggggttggctggaagagaagtaggatcttgtctgaaacctcatccccagcattgtgtttggatgttcgtgggatccgagggctggccgggcagacagaagggaagtgcgggtcttggctggcagctgggagcagaggaagggagagcgttggaggtcgtgatgtgcgtgctctgcctcagtaggtctgaggtgcccactgttgttatgcttagttttattagattctctgtaacaacatgagcttaccaaccagccttgattttgagattaaataattgaacagattaactgggcactgaagtaaaattctacctactttattctcttagtaaaaactatacacacaataaacaactgtcaaggttgccatcatatttgagttttgtcacctaggaaaacattgtttatactttgtttttgaaaaaattcatatgaatttcccctgggaataacttgttttatttcagtttttattttctattgaaacacttgttttctagtctaggattttagccaaatagaaaagctatcatttaatttgggggaaaaaaaaatctattgtcctgtgaagaatttatagcaattattaaactatgttgcttaaatataaaaaaaaggatgattaatggaatatttagataatgtttccattcactgaagaagccgtgatcctttattggcaggaagacttgcaggacatatcagaagcctctgtcagaggtttacaggaggtgagatggaggggaagccctctatgggaagagtcccatggtgtgtgacatgttagggtaatcggatgtatttaagctgcgtcctcattctaaaagttattagaactgagctcttctagatttaataacatgctttgctttggtagtgaagaacattgagataaaatctagtattaccgagttagagataattttagatcatcccttatactgttacgtgaattcctgtgaacatgaatattactgattctcaagttccagtatacagaagaataacttgtcattgcctgtcctggtgtacccagatgttccatgatggacgttttatcccataagacgtctccctcctgatagatgtccgtatatgcagattaaactaccaacattttttccagcaaaggtggtttttgaaagtaacctaatgaaaccctggctgccatggtcattttaattgctggactgagaagaagcgactctgcgttgtgctgttggcccaggcctgcatgcctgaggactgttggccgttacagttccttgctgtggtcgccggtctctctgtattctgccactgctctcatgtggcatttggcagaagtactacgtagatttctgtgctactgaaaaaaatagtccctacctgatttatgaggagagaagattttttaaaaacctcatgtgatgctgtcatacatagttcaaagagcttccttaattcacttcatttacctttttttccattttcgcttgagaactagagaagtttgtgttctgttggaaccctctgtagaacactttacactcagttctgatggaccttttcaggggcgattttttaaaaaccgctctcgaaagtagtcttaaaatgagagcactttattgatggcttttcaggactgtgttggtatttttcatgcagtgtatttgtcagcttacatttttcagttgagctacctgatgctactgacacacatatgattttcctatcttaccaggcaaatactactgttaacgttttaatagtaagtctacttatgcacattgattttactttgaaaaaagaactggtttaaaaggaaaaaaaagaaactaaaattctttaaaattgtaatggcagtgaagcattttatagtttctcctccctcattggttctgaattttggtgacaggtgtatttcttaatgcagatatgaaaaacagtagctccgtatcgaatacattgacaaatggatgtgtcatcaatggacatttggacttcccctccacgaccccgctcagtgggatggaaagcaggaatggccagtgcttgacaggaactaacggaattagcagtggattagccccaggacagccgtttccgagtagccagggttctctctgcattagtgggactgaggagccagagaagaccctgagagctaaccctgagttgtgcggttctctgcacctgaacgggagtccaagtagctgcatagccagtaggccttcctgggtggaagacattggggataacctgtactatggacactaccacgggtttggggacactgctgaaagcatcccagaactgaacagtgtggtcgagcattccaagtccgtgaaggtgcaggagcggtacgacagtgccgtgctgggcaccatgcacctgcaccacggctcctagagacgctgacctggctctcggaaacgcaggagtccttcctggtagccagctcagaatacccatgtagcagcaacttgaacgaatgtcacaacttgtactttttttatatacttcaactttctgaaaaagtaaacttcgacaagttcccagcaactgcttgtttgtgcatgagtagggcttactaagtgcatagatgtttctacagtgaggtgtcctttttataaggtgcacttttggagtttttctgatgccaatctcaacattgtctttttaatactgtcaccagatattgccatttttctttttgttaaaagattatatgatcaagataaattggggtggtaaatcaggtgcctggtaatttatctctttgcacatgggcatcattttaaaaagcttgcttccactcttttctgtagaatttgacggaacacagctatttccctatgcaaggtacagccttacaaagatttctgcagtgatttgtgtgaagaagagaatgtttgtctttttcaatgaagctttgcagatcaccatgtggttgaaggttttagttgtggacacagtggtccctccttaatgatgaagatcactgccttgggcttcatggaaaacaggcccagcctggggctgcgtttggatttattgtttttattccacacttcctacttggtctctggaagttttaccacatgtaacagattcctttatatgtagtgaaaatcactatttgtagaaactgtcaggtcaaaatatttaactgactgttgacatgtattttcttttttccttgtttttgttttttggggttttctgctttaagatatataccactatgtatatccagttaactgagagaattttgactctcttaataaaactgcattaagtttttgattttgtagaaattagcttttgtctaggcaactagtggttatactctgcaaatattgtaatgaatttttacttttttgatttttgtaataaaaattggtgcagataaaatgtcaaatgaacaaaccagtgttctaagagtgttactaacattttgttctaaaactgtccttcacaaattgaataaaaaactctcacactca

SEQ ID NO: 406071 - DNA, 2665 bp, Homo sapiens
agcgggcgcgctccgctcggcagcctgtgggacgcgaccgcggcgctagtctcgttcctttgtgctgcggcggcggcttctcgagtcctccccgacgcgtcctctaggccagcgagccccgcgctctccggtgacggaccatgtcggcggcgggagcgggcgcgggcgtagaggcgggcttctccagcgaggagctgctctcgctccgtttcccgctgcaccgcgcctgccgcgacggggacctggccacgctctgctcgctgctgcagcagacaccccacgcccacctggcctctgaggactccttctatggctggacgcccgtgcactgggccgcgcatttcggcaagttggagtgcttagtgcagttggtgagagcgggagccacactcaacgtctccaccacacggtacgcgcagacgccagcccacattgcagcctttgggggacatcctcagtgcctggtctggctgattcaagcaggagccaacattaacaaaccggattgtgagggtgaaactcccattcacaaggcagctcgctctgggagcctagaatgcatcagtgcccttgtggcgaatggggctcacgtcgactacgtaattcgaattgacttgattttttcaagtaatcctagaaagggggagcattccatatagaaactgctgaaactgccacaggtgcttctccgaaaaccttacagttgtggcattgaatgttcagtatcgcttcctttctgcacacgaggcatactgttgagcctgagaaatgccagtggcctgacagcagcagacattgcacaaacccagggtttccaagagtgtgcccagtttctcttgaacctccagaattgtcatctgaaccatttctataacaatggcatcttaaatgggggtcatcagaatgtatttcctaatcatattagtgtgggaacaaatcgaaagagatgcttggaagactcagaagactttggagtaaagaaagctagaactgaagctcaaagcttggattctgccgtgccactcacgaatggcgacacagaagacgatgctgacaaaatgcacgttgatagggagtttgctgttgtaacagatatgaaaaacagtagctccgtatcgaatacattgacaaatggatgtgtcatcaatggacatttggacttcccctccacgaccccgctcagtgggatggaaagcaggaatggccagtgcttgacaggaactaacggaattagcagtggattagccccaggacagccgtttccgagtagccagggttctctctgcattagtgggactgaggagccagagaagaccctgagagctaaccctgagttgtgcggttctctgcacctgaacgggagtccaagtagctgcatagccagtaggccttcctgggtggaagacattggggataacctgtactatggacactaccacgggtttggggacactgctgaaagcatcccagaactgaacagtgtggtcgagcattccaagtccgtgaaggtgcaggagcggtacgacagtgccgtgctgggcaccatgcacctgcaccacggctcctagagacgctgacctggctctcggaaacgcaggagtccttcctggtagccagctcagaatacccatgtagcagcaacttgaacgaatgtcacaacttgtactttttttatatacttcaactttctgaaaaagtaaacttcgacaagttcccagcaactgcttgtttgtgcatgagtagggcttactaagtgcatagatgtttctacagtgaggtgtcctttttataaggtgcacttttggagtttttctgatgccaatctcaacattgtctttttaatactgtcaccagatattgccatttttctttttgttaaaagattatatgatcaagataaattggggtggtaaatcaggtgcctggtaatttatctctttgcacatgggcatcattttaaaaagcttgcttccactcttttctgtagaatttgacggaacacagctatttccctatgcaaggtacagccttacaaagatttctgcagtgatttgtgtgaagaagagaatgtttgtctttttcaatgaagctttgcagatcaccatgtggttgaaggttttagttgtggacacagtggtccctccttaatgatgaagatcactgccttgggcttcatggaaaacaggcccagcctggggctgcgtttggatttattgtttttattccacacttcctacttggtctctggaagttttaccacatgtaacagattcctttatatgtagtgaaaatcactatttgtagaaactgtcaggtcaaaatatttaactgactgttgacatgtattttcttttttccttgtttttgttttttggggttttctgctttaagatatataccactatgtatatccagttaactgagagaattttgactctcttaataaaactgcattaagtttttgattttgtagaaattagcttttgtctaggcaactagtggttatactctgcaaatattgtaatgaatttttacttttttgatttttgtaataaaaattggtgcagataaaatgtcaaatgaacaaaccagtgttctaagagtgttactaacattttgttctaaaactgtccttcacaaattgaataaaaaactctcacactca

SEQ ID NO: 406072 - DNA, 4402 bp, Homo sapiens
gcatttagaatatctaaaatgatttgtccatttagctattgcttttttattcaggtgactacaaaaacatttttagccattctcttaacatgtatgaatatttagaagtagattttttttaagtttattatgtctttatgcaaattcttcactggggatgaaaaaaagaagagtatgtatattgtttcccaaacccacatgaaaaaaatcatttgtgttcactaaacttaaaagaaaatgtgttcatctttctggaagctacagaattgctgtggtcaccttcttcccagtagagaaattcagatcagttagtatatttaaaataataggttttctgtagtcaggggctatttgaccttagctaaagatccataacaaaactcaaatcctgctttttttaaaagtgaccttgctaccttcttttgaataggcagaagtggccaccttttattcctcagacattagttatttgttaaactttatccaagctggaacatacttttgaaaaacccagcccatcccgtctaccagatgccgagtccatacaccctgtgtttcccatcatttgatttatgacactctgactgagtaagcaatgtgttaaatcactagagattactcgaggctttccttgtgggacatggcactccacgtccactggaagcttgagggagctgccttcacagtcctttgagaatcagaccaaaagtcaggctgctctcctttaaacacttgagtaacttcaaatttttgttctgccaaaattatttccaagaattctacatttttgaacaactgtgtacagctatctttgcattttaaatgcccctagtttgagactcgggagggtcaagtgtccccacccctggaaagggctcggataggagggtgcttgcttctaaatcctgatcttctctatggggttggctggaagagaagtaggatcttgtctgaaacctcatccccagcattgtgtttggatgttcgtgggatccgagggctggccgggcagacagaagggaagtgcgggtcttggctggcagctgggagcagaggaagggagagcgttggaggtcgtgatgtgcgtgctctgcctcagtaggtctgaggtgcccactgttgttatgcttagttttattagattctctgtaacaacatgagcttaccaaccagccttgattttgagattaaataattgaacagattaactgggcactgaagtaaaattctacctactttattctcttagtaaaaactatacacacaataaacaactgtcaaggttgccatcatatttgagttttgtcacctaggaaaacattgtttatactttgtttttgaaaaaattcatatgaatttcccctgggaataacttgttttatttcagtttttattttctattgaaacacttgttttctagtctaggattttagccaaatagaaaagctatcatttaatttgggggaaaaaaaaatctattgtcctgtgaagaatttatagcaattattaaactatgttgcttaaatataaaaaaaaggatgattaatggaatatttagataatgtttccattcactgaagaagccgtgatcctttattggcaggaagacttgcaggacatatcagaagcctctgtcagaggtttacaggaggtgagatggaggggaagccctctatgggaagagtcccatggtgtgtgacatgttagggtaatcggatgtatttaagctgcgtcctcattctaaaagttattagaactgagctcttctagatttaataacatgctttgctttggtagtgaagaacattgagataaaatctagtattaccgagttagagataattttagatcatcccttatactgttacgtgaattcctgtgaacatgaatattactgattctcaagttccagtatacagaagaataacttgtcattgcctgtcctggtgtacccagatgttccatgatggacgttttatcccataagacgtctccctcctgatagatgtccgtatatgcagattaaactaccaacattttttccagcaaaggtggtttttgaaagtaacctaatgaaaccctggctgccatggtcattttaattgctggactgagaagaagcgactctgcgttgtgctgttggcccaggcctgcatgcctgaggactgttggccgttacagttccttgctgtggtcgccggtctctctgtattctgccactgctctcatgtggcatttggcagaagtactacgtagatttctgtgctactgaaaaaaataaaaacagtggttccttttaatagccctgatttgagacttaggagagggtcaagagtccctacctgatttatgaggagagaagattttttaaaaacctcatgtgatgctgtcatacatagttcaaagagcttccttaattcacttcatttacctttttttccattttcgcttgagaactagagaagtttgtgttctgttggaaccctctgtagaacactttacactcagttctgatggaccttttcaggggcgattttttaaaaaccgctctcgaaagtagttgtatttgtcagcttacatttttcagttgagctacctgatgctactgacacacatatgattttcctatcttaccaggcaaatactactgttaacgttttaatagtaagtctacttatgcacattgattttactttgaaaaaagaactggtttaaaaggaaaaaaaagaaactaaaattctttaaaattgtaatggcagtgaagcattttatagtttctcctccctcattggttctgaattttggtgacaggtgtatttcttaatgcagatatgaaaaacagtagctccgtatcgaatacattgacaaatggatgtgtcatcaatggacatttggacttcccctccacgaccccgctcagtgggatggaaagcaggaatggccagtgcttgacaggaactaacggaattagcagtggattagccccaggacagccgtttccgagtagccagggttctctctgcattagtgggactgaggagccagagaagaccctgagagctaaccctgagttgtgcggttctctgcacctgaacgggagtccaagtagctgcatagccagtaggccttcctgggtggaagacattggggataacctgtactatggacactaccacgggtttggggacactgctgaaagcatcccagaactgaacagtgtggtcgagcattccaagtccgtgaaggtgcaggagcggtacgacagtgccgtgctgggcaccatgcacctgcaccacggctcctagagacgctgacctggctctcggaaacgcaggagtccttcctggtagccagctcagaatacccatgtagcagcaacttgaacgaatgtcacaacttgtactttttttatatacttcaactttctgaaaaagtaaacttcgacaagttcccagcaactgcttgtttgtgcatgagtagggcttactaagtgcatagatgtttctacagtgaggtgtcctttttataaggtgcacttttggagtttttctgatgccaatctcaacattgtctttttaatactgtcaccagatattgccatttttctttttgttaaaagattatatgatcaagataaattggggtggtaaatcaggtgcctggtaatttatctctttgcacatgggcatcattttaaaaagcttgcttccactcttttctgtagaatttgacggaacacagctatttccctatgcaaggtacagccttacaaagatttctgcagtgatttgtgtgaagaagagaatgtttgtctttttcaatgaagctttgcagatcaccatgtggttgaaggttttagttgtggacacagtggtccctccttaatgatgaagatcactgccttgggcttcatggaaaacaggcccagcctggggctgcgtttggatttattgtttttattccacacttcctacttggtctctggaagttttaccacatgtaacagattcctttatatgtagtgaaaatcactatttgtagaaactgtcaggtcaaaatatttaactgactgttgacatgtattttcttttttccttgtttttgttttttggggttttctgctttaagatatataccactatgtatatccagttaactgagagaattttgactctcttaataaaactgcattaagtttttgattttgtagaaattagcttttgtctaggcaactagtggttatactctgcaaatattgtaatgaatttttacttttttgatttttgtaataaaaattggtgcagataaaatgtcaaatgaacaaaccagtgttctaagagtgttactaacattttgttctaaaactgtccttcacaaattgaataaaaaactctcacactca

SEQ ID NO: 406073 - DNA, 3404 bp, Homo sapiens
tttttttttttgcattaacagtaaccccaagaaaggcatcagggttctggagtggttgtttgagtgacacagcacaaggccttgatttcatcatgcttttgctgtggatgtagtgtagcttgctgaacaggtatggaagctgtctttgctgttaagtacttctcccgtttgtttatcaacctgcagctaacaggatgtctgcttttttacaggtttatttcacagagcagtgtacattcttgtcttccaggggaacttcaacatggagttacttttgatccctcagttttaattcagtgtctaaaggtttacaagttcaacttactctattttattcagctctttcacttactctgccatcacttcctacttgaatctgagttttagctactgtagaggtctcagacctttcctttttagtactattagccaggtaaaactttggttcttgtgagtggtagggatgagtttttaggacagtattcaaagcctttttaaaggaaccaactactcaaatgctctacaatgccaaaaatacaatactcctgcaggttttcccaagcaaggccaaaacaatcaaaatctgacagaaaaacacagctgttcagctctggaatctgatgataggctactttttaatgtcaggacatccttctaaacttccacttacagtgtcacatgtaagcatgaaggctggctcgttggtgagccattgctttgtttttaggaagacagttatgaatgccatggacaatctcagtacatgttgtttgttatgattttattcacgctaaaggaatgggtattaaaattaagtgcatataatatagaattcagtttcaagtctgaagttagcgtaaatttagattcttcagactaacataaaacatgattttgagaagttaaataggaagatgccttttttagaagtttagcatatttagtttatctcccaaatcttgcttagaaatcaaatgtatataagagaagttagttacagagctagattgattaactacttctttaatgaagatttgctatgaatttgtttactctttcataccaccttcagatagctagtcagttcagcaggagcagagaccaggttagcacgcggatggggtgtaattcagtgtttttgtgttgtacagcctgagaaatgccagtggcctgacagcagcagacattgcacaaacccagggtttccaagagtgtgcccagtttctcttgaacctccagaattgtcatctgaaccatttctataacaatggcatcttaaatgggggtcatcagaatgtatttcctaatcatattagtgtgggaacaaatcgaaagagatgcttggaagactcagaagactttggagtaaagaaagctagaactgaagctcaaagcttggattctgccgtgccactcacgaatggcgacacagaagacgatgctgacaaaatgcacgttgatagggagtttgctgttgtaacagatatgaaaaacagtagctccgtatcgaatacattgacaaatggatgtgtcatcaatggacatttggacttcccctccacgaccccgctcagtgggatggaaagcaggaatggccagtgcttgacaggaactaacggaattagcagtggattagccccaggacagccgtttccgagtagccagggttctctctgcattagtgggactgaggagccagagaagaccctgagagctaaccctgagttgtgcggttctctgcacctgaacgggagtccaagtagctgcatagccagtaggccttcctgggtggaagacattggggataacctgtactatggacactaccacgggtttggggacactgctgaaagcatcccagaactgaacagtgtggtcgagcattccaagtccgtgaaggtgcaggagcggtacgacagtgccgtgctgggcaccatgcacctgcaccacggctcctagagacgctgacctggctctcggaaacgcaggagtccttcctggtagccagctcagaatacccatgtagcagcaacttgaacgaatgtcacaacttgtactttttttatatacttcaactttctgaaaaagtaaacttcgacaagttcccagcaactgcttgtttgtgcatgagtagggcttactaagtgcatagatgtttctacagtgaggtgtcctttttataaggtgcacttttggagtttttctgatgccaatctcaacattgtctttttaatactgtcaccagatattgccatttttctttttgttaaaagattatatgatcaagataaattggggtggtaaatcaggtgcctggtaatttatctctttgcacatgggcatcattttaaaaagcttgcttccactcttttctgtagaatttgacggaacacagctatttccctatgcaaggtacagccttacaaagatttctgcagtgatttgtgtgaagaagagaatgtttgtctttttcaatgaagctttgcagatcaccatgtggttgaaggttttagttgtggacacagtggtccctccttaatgatgaagatcactgccttgggcttcatggaaaacaggcccagcctggggctgcgtttggatttattgtttttattccacacttcctacttggtctctggaagttttaccacatgtaacagattcctttatatgtagtgaaaatcactatttgtagaaactgtcaggtcaaaatatttaactgactgttgacatgtattttcttttttccttgtttttgttttttggggttttctgctttaagatatataccactatgtatatccagttaactgagagaattttgactctcttaataaaactgcattaagtttttgattttgtagaaattagcttttgtctaggcaactagtggttatactctgcaaatattgtaatgaatttttacttttttgatttttgtaataaaaattggtgcagataaaatgtcaaatgaacaaaccagtgttctaagagtgttactaacattttgttctaaaactgtccttcacaaattgaataaaaaactctcacactcaaaaaaaaaaaaaaaaagggcggccgccctttttttttttttttttctcatttaacttttttaatgggtctcaaaattctgtgacaaatttttggtcaagttgtttccattaaaaagtactgattttaaaaactaataacttaaaactgccacacgcaaaaaagaaaaccaaagtggtccacaaaacattctcctttccttctgaaggttttacgatgcattggtatcattaaccagtcttttactactaaacttaaatggccaattgaaacaaacagttctgagaccgttcttccaccactgattaaaaagtggggtggcaggtattagggataatattcatttagcc

SEQ ID NO: 406074 - DNA, 2546 bp, Homo sapiens
agtaaaaaatatgctggttataaaccttaggggactacccattgaatatgtggtccatcgttgacctaaacatcattatgtcctgatagatgtccgtatatgcagattaaactaccaacattttttccagcaaaggtggtttttgaaagtaacctaatgaaaccctggctgccatggtcattttaattgctggactgagaagaagcgactctgcgttgtgctgttggcccaggcctgcatgcctgaggactgttggccgttacagttccttgctgtggtcgccggtctctctgtattctgccactgctctcatgtggcatttggcagaagtactacgtagatttctgtgctactgaaaaaaataaaaacagtggttccttttaatagccctgatttgagacttaggagagggtcaagagtccctacctgatttatgaggagagaagattttttaaaaacctcatgtgatgctgtcatacatagttcaaagagcttccttaattcacttcatttacctttttttccattttcgcttgagaactagagaagtttgtgttctgttggaaccctctgtagaacactttacactcagttctgatggaccttttcaggggcgattttttaaaaaccgctctcgaaagtagtcttaaaatgagagcactttattgatggcttttcaggactgtgttggtatttttcatgcagtgtatttgtcagcttacatttttcagttgagctacctgatgctactgacacacatatgattttcctatcttaccaggcaaatactactgttaacgttttaatagtaagtctacttatgcacattgattttactttgaaaaaagaactggtttaaaaggaaaaaaaagaaactaaaattctttaaaattgtaatggcagtgaagcattttatagtttctcctccctcattggttctgaattttggtgacaggtgtatttcttaatgcagatatgaaaaacagtagctccgtatcgaatacattgacaaatggatgtgtcatcaatggacatttggacttcccctccacgaccccgctcagtgggatggaaagcaggaatggccagtgcttgacaggaactaacggaattagcagtggattagccccaggacagccgtttccgagtagccagggttctctctgcattagtgggactgaggagccagagaagaccctgagagctaaccctgagttgtgcggttctctgcacctgaacgggagtccaagtagctgcatagccagtaggccttcctgggtggaagacattggggataacctgtactatggacactaccacgggtttggggacactgctgaaagcatcccagaactgaacagtgtggtcgagcattccaagtccgtgaaggtgcaggagcggtacgacagtgccgtgctgggcaccatgcacctgcaccacggctcctagagacgctgacctggctctcggaaacgcaggagtccttcctggtagccagctcagaatacccatgtagcagcaacttgaacgaatgtcacaacttgtactttttttatatacttcaactttctgaaaaagtaaacttcgacaagttcccagcaactgcttgtttgtgcatgagtagggcttactaagtgcatagatgtttctacagtgaggtgtcctttttataaggtgcacttttggagtttttctgatgccaatctcaacattgtctttttaatactgtcaccagatattgccatttttctttttgttaaaagattatatgatcaagataaattggggtggtaaatcaggtgcctggtaatttatctctttgcacatgggcatcattttaaaaagcttgcttccactcttttctgtagaatttgacggaacacagctatttccctatgcaaggtacagccttacaaagatttctgcagtgatttgtgtgaagaagagaatgtttgtctttttcaatgaagctttgcagatcaccatgtggttgaaggttttagttgtggacacagtggtccctccttaatgatgaagatcactgccttgggcttcatggaaaacaggcccagcctggggctgcgtttggatttattgtttttattccacacttcctacttggtctctggaagttttaccacatgtaacagattcctttatatgtagtgaaaatcactatttgtagaaactgtcaggtcaaaatatttaactgactgttgacatgtattttcttttttccttgtttttgttttttggggttttctgctttaagatatataccactatgtatatccagttaactgagagaattttgactctcttaataaaactgcattaagtttttgattttgtagaaattagcttttgtctaggcaactagtggttatactctgcaaatattgtaatgaatttttacttttttgatttttgtaataaaaattggtgcagataaaatgtcaaatgaacaaaccagtgttctaagagtgttactaacattttgttctaaaactgtccttcacaaattgaataaaaaactctcacactca

SEQ ID NO: 406075 - DNA, 2129 bp, Homo sapiens
tttttttttttgcattaacagtaaccccaagaaaggcatcagggttctggagtggttgtttgagtgacacagcacaaggccttgatttcatcatgcttttgctgtggatgtagtgtagcttgctgaacaggtttatttcacagagcagtgtacattcttgtcttccaggggaacttcaacatggagttacttttgatccctcagttttaattcagtgtctaaagcctgagaaatgccagtggcctgacagcagcagacattgcacaaacccagggtttccaagagtgtgcccagtttctcttgaacctccagaattgtcatctgaaccatttctataacaatggcatcttaaatgggggtcatcagaatgtatttcctaatcatattagtgtgggaacaaatcgaaagagatgcttggaagactcagaagactttggagtaaagaaagctagaactgaagctcaaagcttggattctgccgtgccactcacgaatggcgacacagaagacgatgctgacaaaatgcacgttgatagggagtttgctgttgtaacagatatgaaaaacagtagctccgtatcgaatacattgacaaatggatgtgtcatcaatggacatttggacttcccctccacgaccccgctcagtgggatggaaagcaggaatggccagtgcttgacaggaactaacggaattagcagtggattagccccaggacagccgtttccgagtagccagggttctctctgcattagtgggactgaggagccagagaagaccctgagagctaaccctgagttgtgcggttctctgcacctgaacgggagtccaagtagctgcatagccagtaggccttcctgggtggaagacattggggataacctgtactatggacactaccacgggtttggggacactgctgaaagcatcccagaactgaacagtgtggtcgagcattccaagtccgtgaaggtgcaggagcggtacgacagtgccgtgctgggcaccatgcacctgcaccacggctcctagagacgctgacctggctctcggaaacgcaggagtccttcctggtagccagctcagaatacccatgtagcagcaacttgaacgaatgtcacaacttgtactttttttatatacttcaactttctgaaaaagtaaacttcgacaagttcccagcaactgcttgtttgtgcatgagtagggcttactaagtgcatagatgtttctacagtgaggtgtcctttttataaggtgcacttttggagtttttctgatgccaatctcaacattgtctttttaatactgtcaccagatattgccatttttctttttgttaaaagattatatgatcaagataaattggggtggtaaatcaggtgcctggtaatttatctctttgcacatgggcatcattttaaaaagcttgcttccactcttttctgtagaatttgacggaacacagctatttccctatgcaaggtacagccttacaaagatttctgcagtgatttgtgtgaagaagagaatgtttgtctttttcaatgaagctttgcagatcaccatgtggttgaaggttttagttgtggacacagtggtccctccttaatgatgaagatcactgccttgggcttcatggaaaacaggcccagcctggggctgcgtttggatttattgtttttattccacacttcctacttggtctctggaagttttaccacatgtaacagattcctttatatgtagtgaaaatcactatttgtagaaactgtcaggtcaaaatatttaactgactgttgacatgtattttcttttttccttgtttttgttttttggggttttctgctttaagatatataccactatgtatatccagttaactgagagaattttgactctcttaataaaactgcattaagtttttgattttgtagaaattagcttttgtctaggcaactagtggttatactctgcaaatattgtaatgaatttttacttttttgatttttgtaataaaaattggtgcagataaaatgtcaaatgaacaaaccagtgttctaagagtgttactaacattttgttctaaaactgtccttcacaaattgaataaaaaactctcacactca

SEQ ID NO: 406076 - DNA, 1717 bp, Homo sapiens
tttttttttttgcattaacagtaaccccaagaaaggcatcagggttctggagtggttgtttgagtgacacagcacaaggccttgatttcatcatgcttttgctgtggatgtagtgtagcttgctgaacaggtatggaagctgtctttgctgttaagtacttctcccgtttgtttatcaacctgcagctaacaggatgtctgcttttttacaggtttatttcacagagcagtgtacattcttgtcttccaggggaacttcaacatggagttacttttgatccctcagttttaattcagtgtctaaaggtttacaagttcaacttactctattttattcagctctttcacttactctgccatcacttcctacttgaatctgagttttagctactgtagaggtctcagacctttcctttttagtactattagccaggtaaaactttggttcttgtgagtggtagggatgagtttttaggacagtattcaaagcctttttaaaggaaccaactactcaaatgctctacaatgccaaaaatacaatactcctgcaggttttcccaagcaaggccaaaacaatcaaaatctgacagaaaaacacagctgttcagctctggaatctgatgataggctactttttaatgtcaggacatccttctaaacttccacttacagtgtcacatgtaagcatgaaggctggctcgttggtgagccattgctttgtttttaggaagacagttatgaatgccatggacaatctcagtacatgttgtttgttatgattttattcacgctaaaggaatgggtattaaaattaagtgcatataatatagaattcagtttcaagtctgaagttagcgtaaatttagattcttcagactaacataaaacatgattttgagaagttaaataggaagatgccttttttagaagtttagcatatttagtttatctcccaaatcttgcttagaaatcaaatgtatataagagaagttagttacagagctagattgattaactacttctttaatgaagatttgctatgaatttgtttactctttcataccaccttcagatagctagtcagttcagcaggagcagagaccaggttagcacgcggatggggtgtaattcagtgtttttgtgttgtacagcctgagaaatgccagtggcctgacagcagcagacattgcacaaacccagggtttccaagagtgtgcccagtttctcttgaacctccagaattgtcatctgaaccatttctataacaatggcatcttaaatgggggtcatcagaatgtatttcctaatcatattagtgtgggaacaaatcgaaagagatgcttggaagactcagaagactttggagtaaagaaagctagaactgaaggtgagaccgctttgcgggtgggaagagcacacttatttttcctttctgtaatatgttttctttttatggctgagcgcaccttcgagatgagaccttcacttcaggtggtaatgcgcctggtggattgtgcggtgacggtggagatttctcctgtactgccactgcgaagatgggacacttaacaaaagggaatgtgagggaaatactgatggcccaagtgtaaatgtctatgtggaactttttgagcacccatgtttacctgccgtgaattagattttttaatttgttgtatctgtttgaaatatatctattaaagaaaatctgccactg

SEQ ID NO: 406077 - DNA, 2091 bp, Homo sapiens
tttttttttttgcattaacagtaaccccaagaaaggcatcagggttctggagtggttgtttgagtgacacagcacaaggccttgatttcatcatgcttttgctgtggatgtagtgtagcttgctgaacaggggaacttcaacatggagttacttttgatccctcagttttaattcagtgtctaaagcctgagaaatgccagtggcctgacagcagcagacattgcacaaacccagggtttccaagagtgtgcccagtttctcttgaacctccagaattgtcatctgaaccatttctataacaatggcatcttaaatgggggtcatcagaatgtatttcctaatcatattagtgtgggaacaaatcgaaagagatgcttggaagactcagaagactttggagtaaagaaagctagaactgaagctcaaagcttggattctgccgtgccactcacgaatggcgacacagaagacgatgctgacaaaatgcacgttgatagggagtttgctgttgtaacagatatgaaaaacagtagctccgtatcgaatacattgacaaatggatgtgtcatcaatggacatttggacttcccctccacgaccccgctcagtgggatggaaagcaggaatggccagtgcttgacaggaactaacggaattagcagtggattagccccaggacagccgtttccgagtagccagggttctctctgcattagtgggactgaggagccagagaagaccctgagagctaaccctgagttgtgcggttctctgcacctgaacgggagtccaagtagctgcatagccagtaggccttcctgggtggaagacattggggataacctgtactatggacactaccacgggtttggggacactgctgaaagcatcccagaactgaacagtgtggtcgagcattccaagtccgtgaaggtgcaggagcggtacgacagtgccgtgctgggcaccatgcacctgcaccacggctcctagagacgctgacctggctctcggaaacgcaggagtccttcctggtagccagctcagaatacccatgtagcagcaacttgaacgaatgtcacaacttgtactttttttatatacttcaactttctgaaaaagtaaacttcgacaagttcccagcaactgcttgtttgtgcatgagtagggcttactaagtgcatagatgtttctacagtgaggtgtcctttttataaggtgcacttttggagtttttctgatgccaatctcaacattgtctttttaatactgtcaccagatattgccatttttctttttgttaaaagattatatgatcaagataaattggggtggtaaatcaggtgcctggtaatttatctctttgcacatgggcatcattttaaaaagcttgcttccactcttttctgtagaatttgacggaacacagctatttccctatgcaaggtacagccttacaaagatttctgcagtgatttgtgtgaagaagagaatgtttgtctttttcaatgaagctttgcagatcaccatgtggttgaaggttttagttgtggacacagtggtccctccttaatgatgaagatcactgccttgggcttcatggaaaacaggcccagcctggggctgcgtttggatttattgtttttattccacacttcctacttggtctctggaagttttaccacatgtaacagattcctttatatgtagtgaaaatcactatttgtagaaactgtcaggtcaaaatatttaactgactgttgacatgtattttcttttttccttgtttttgttttttggggttttctgctttaagatatataccactatgtatatccagttaactgagagaattttgactctcttaataaaactgcattaagtttttgattttgtagaaattagcttttgtctaggcaactagtggttatactctgcaaatattgtaatgaatttttacttttttgatttttgtaataaaaattggtgcagataaaatgtcaaatgaacaaaccagtgttctaagagtgttactaacattttgttctaaaactgtccttcacaaattgaataaaaaactctcacactca

SEQ ID NO: 406078 - DNA, 6092 bp, Homo sapiens
tgtaggtccgttttaatactgcattatacggatgccagtgtttaatggcagagtctcagaacttttctacaggagaggatttcttgagaagccatttattctgtggtaaccagattttcagctgggctacatgtattttaacttaattatttttatcttaactgggatcatcagatagcttgagaagcatcgatagccttatataagcaaattcagtgactcactctagaaaagtctctcttgcctagtttaggaagtaggcacagttggctataacaaagcctagaatgtgatgttagtagactattctaatgccacaaagaatactgcttcactttaattaaaagaaattttaattaaaatggaattgtcttagtttggatcataattgaccatttatgacccacctttgtttgtttaccatagagccctgtctagaaaccagattttcattaggtcaaatacaggtgatgagcatatttaatattagtgttaaattcatttgtgacttttgcccttagcaaaatgtaacctagatttacttttagctattcattttgaaattcgtggtttctttatatttgttcatttttttgcccatcagaataatatttcagttacaaaatctaccagaattatgactctgaattcatattttctgattttaggtcctctgaattctagtcatcctcacatcctacttttgcctcctcttttttttttttttttttttttctaaaaagagacagagtctccctttgtcgtccaggctaaagtacagtggcatgattatagttcactgcaacttcaaactcctgggctccagtgatcctcctgcctcagattcttgagtagccaggactataggcacataccaccatgcccaactaatttttaaaaatgttttgtagagatggggtcttgctgtgttacccaggctggtctcaaactcctgggctcaagcagtccttccaccttggcctcccagagcactgggtttacaggtgtgagccactgtgcagcctccttttatctaattgtccccacagcagacttgtctggtcttggctattttccggttgttaaggtgtttcaggatggaggaatcagttcctgagatagttattaagttctgcctgctagaaagggacagtaagtgggttgatatcattctagacttgttaagaaattgttcagaattttgattgtttttcatagcagcttgattaaaatacagattttaataatttccttactacttttataggtagtgctttcaaataaaaccagtgtttgctaaatccaaatgtctttctcccttgctaaattatagcaggagcatgctaaatatttcatcagactactggaatgatggttttacattttaatgtttgaaaacataattttggttcaattgcagtgtaaaactattctcagtaactttaaacttgaaaacttggcaccaaatttatttaggtagaaactctttaaaaatagtttcttcctattattaactgaagaatatatttaagaaagtcttcataattaaataagagtttggataccaaagggttaaaaatacacatgtatttcttttgctgaagatatcttagatgtttgctaatgttttatctttacaaatggacaatttagtaatgttttttatctttttttaatgattccatgtatttgcttatttccatctaggaatagttactaatgtatttgagatacagcataccaaattttaaagtaaccagaatcgtgagttgatggtttttagtccatactgttaaacttatgttgaaatattgacatatttaaattggcttcatgctaaaaaattaccaaaggtaatttaaaaggcagtgttttagagcagtagctcatggtcaaggtggtcacatgacaatggcttaagctcagtgtgcttctgcaccttatgttgtctatgtatttttaatccaaatgttgcctgcaaatatgtgatcccttattatttaagtttcctgtattatgaaccattgcccgttttaaatcacacagaagattctgaatctgtaaaaactacacatgtcaatgttttacagctacgtaattcgaattgacttgattttttcaagtaatcctagaaagggggagcattccatatagaaactgctgaaactgccacaggtgcttctccgaaaaccttacagttgtggcattgaatgttcagtatcgcttcctttctgcacacgaggcatactgttgaggtatttgttgcggtgattggttttaacgctaatctaggaattcagatagagatgctttagatttgcatgctttgcttacctaatttatgatatctacctttctatttgtaaactaacaatagctaagttgagatcagaattttaacagaaatattatttatataaaaattgttatcttttattgtcacatggcattaacaataagaaaacatcctgaaggtgatgtgacaactcggattctaaaaattatacttcaggtatttcctgatccgtggtttttcaaaattgaaacaaagtcgttctcatcagaatggcttctcctttgttctggaattgtggcactataagtggaaactggtgggaccctggctggcttcagagtggagcctaatttttaaagttctttaggggagaattcttagatataaattttagtgaaagttctttgggggagaattcttagatataaatttgagtgtttgaagagacggggtcttcctgtgttgcctaggctggtctcaaacttctggcctcaggtgatcctcctgcttctgcctcccaaagcgccaggattatagggttgagccactgtgcttggcttagaggtaataaattttaatattctattcagaataagaaaatatagcatataagcatttgtatctttagtaaagttactgccagtttgatttttttttttgcaagttacttagcagaacatgtaattcacagtaaagatgattctgtgttgtaccatattttaatattcctgttttgaaagaatagtagagagaaaatgggtggcctgctcagtgattgcttttcgtagtcttggtgaatgttacaggagattgaatttatagataaaagcacagtcatcatagtttccacagtacattgcagcacatttagcttgctagcctaaaaatctgatcatgctgagtttcttttaaagaaagttaattttagaacttcaaactagaaccagtttgaacctcaagttgaccgttgtctgagttttaaaaatctcttcccattttcaaagatttttcaaatggatgtaggagaggaccaaggaggtaggctatagctgtagaacaacacagtcctattttcagaaacgaacagacacacgttttaggtcaggcacagcccatgtatccaggtgcatcaaactggggatgctaagttcaaaagtgcgtctgttttgaagatttcatctgaaaataatgtgtacactttcattactaccagtttgcattcaaaatagtttttgagactctttaaactcttctggatactttaattttccctttggaatagtgtgtaaacacagtccggatgaactttactactgatacctcacttgaggttgacaggagtggccagcagttagtgcctatggtcatgtaatacactaagtcaatacctgtggagtgaaatccggtctctataaaaaatacaaaaaaaatggctggacgcagtggctctcgcctgtaatcccagcactttgggaggctgaggtgggtgggtcatctgaggtcaggagttcaagaccagcctggccaacatggtgaaaccccgtctctactaaaaatacaaaaaattagctgggtgtggtggtgggcgcttgtaataccagctactcgggaggctgaagcaggagaatctcttgaacctgggaggcagaggttgcggtgagccgagatcacgccattgcactccagcctaggcaacaagagtgaaactccgtctcaaaaaaaaaaaaaaaaaaaaaagaaaagaaaaactagttgggtatggtgttgtgtacctgtggtcccagctactcaggaggctgaagtgggaggagcacctgagcccaggaggtagacgaggctacagtgagctgtgattgcaccactgcactccagcctgggtgatgggagtgagaccctgtttaaaacaaacagacaaaaaaacctgtggattgaagggtaaaggatggagtatttaaaaagtactgtgacagaacaaagtactgtaagtactagagttgagtgtggatggaaacacagaacctgtaaatcaagtgtttcatttacgtgctcaactcctactgaattttagcaattaaaacatgaaaactgaaatattggttaacaaatgaaaatagaatttaaagacctgaacttcttttatgatctttaatgattatttgttctaatctttgacttggaaacccaaattattttcagtctaacgtacttgaaatttaactattaaaaaagttggaggaactcaaactttgaagttagggctccctttctccagataaagcacattgcctggtttattgtaaggcacttagaacatgtaaccaaaaacactcaatttaggaataggaatgattgttttacagctaagtgcgctctcagagtcttttgttttacacccctctcaagtttacctttagatatttttcttgttgtttaatattttgtgacagatttggcaacttttaaaaagttgtttgaattgaatagtgcataaaattaatagatgtttttcagaaaatccattattaagagtagaggaatgaggagaaatattcgttctaaagagaatcaaaaccacaatgagagattgtcttacccccgttagaatgacagttaccaaaagacagtaacaaatgctgacgagaatgcagaggcaaaggaacgtttaaacactgttagtgggaatgtagacttgtacaaccgttatggagaagagtatggaggttcctgaacaaactaaaaatagaactaccatatgattcagcagtcccactactgggtatatatccaaaagaaaatccatatatggagacatctgcacctgccatgctcgttccagcactattcacagtacccaagattggaatcaacctgtgtctatcagcaaatgaacagataaaatgtggtatatataccccgtggaatactatttggccattaaaaaaacaaaattctgttattctcagcaacatgtatgatcttagaagacattatgttaagtaagccaggcacagaaagataaatactccatgtactgtacttatgtggaaggtaaaaaagatctcatagaagtagagagtggctcatgcctctaatctcggtgctttgggagtctaaggtgggaggatcacttgaggcctggagtttgagaccagcctgagcaacatctctcaaaattataaaaaaaaaaaaaaaaaagtagccaggcatggtagcacatgcctgtatacctagctacttgggaggctgaggctaaggaggatcccttagcccaggagttccagggtgtggtgaactatgattgtgccactgcactccagctggggcaacagggagatactctgtctctttaaaaaacagtggttactagatggaaagataaattctagtgttaccttgcactgtagggtgactaacagtaattttttattttttttgtatggctaattcagtacaaatggaaagtgtttgaggtgatgcatatgcaattatgctggttttttttaatccctatacattgtattggaatttacaatgtaccccataataaaggatagaggaatatttacagtatcatctatttggttaaatgttattcagcagttctggcctgctgcctttttttgtataacctatggcccaagaatggtttctacattttttaatagttgagcaaaaatcaatagaataatattttctaatacataaaattagatgaaatttcagtttcagtgttcataaataaagctttatgagagccatgctcaattgccttgaggctgctttcagcctacaacaa

SEQ ID NO: 406079 - DNA, 3061 bp, Homo sapiens
gcatttagaatatctaaaatgatttgtccatttagctattgcttttttattcaggtgactacaaaaacatttttagccattctcttaacatgtatgaatatttagaagtagattttttttaagtttattatgtctttatgcaaattcttcactggggatgaaaaaaagaagagtatgtatattgtttcccaaacccacatgaaaaaaatcatttgtgttcactaaacttaaaagaaaatgtgttcatctttctggaagctacagaattgctgtggtcaccttcttcccagtagagaaattcagatcagttagtatatttaaaataataggttttctgtagtcaggggctatttgaccttagctaaagatccataacaaaactcaaatcctgctttttttaaaagtgaccttgctaccttcttttgaataggcagaagtggccaccttttattcctcagacattagttatttgttaaactttatccaagctggaacatacttttgaaaaacccagcccatcccgtctaccagatgccgagtccatacaccctgtgtttcccatcatttgatttatgacactctgactgagtaagcaatgtgttaaatcactagagattactcgaggctttccttgtgggacatggcactccacgtccactggaagcttgagggagctgccttcacagtcctttgagaatcagaccaaaagtcaggctgctctcctttaaacacttgagtaacttcaaatttttgttctgccaaaattatttccaagaattctacatttttgaacaactgtgtacagctatctttgcattttaaatgcccctagtttgagactcgggagggtcaagtgtccccacccctggaaagggctcggataggagggtgcttgcttctaaatcctgatcttctctatggggttggctggaagagaagtaggatcttgtctgaaacctcatccccagcattgtgtttggatgttcgtgggatccgagggctggccgggcagacagaagggaagtgcgggtcttggctggcagctgggagcagaggaagggagagcgttggaggtcgtgatgtgcgtgctctgcctcagtaggtctgaggtgcccactgttgttatgcttagttttattagattctctgtaacaacatgagcttaccaaccagccttgattttgagattaaataattgaacagattaactgggcactgaagtaaaattctacctactttattctcttagtaaaaactatacacacaataaacaactgtcaaggttgccatcatatttgagttttgtcacctaggaaaacattgtttatactttgtttttgaaaaaattcatatgaatttcccctgggaataacttgttttatttcagtttttattttctattgaaacacttgttttctagtctaggattttagccaaatagaaaagctatcatttaatttgggggaaaaaaaaatctattgtcctgtgaagaatttatagcaattattaaactatgttgcttaaatataaaaaaaaggatgattaatggaatatttagataatgtttccattcactgaagaagccgtgatcctttattggcaggaagacttgcaggacatatcagaagcctctgtcagaggtttacaggaggtgagatggaggggaagccctctatgggaagagtcccatggtgtgtgacatgttagggtaatcggatgtatttaagctgcgtcctcattctaaaagttattagaactgagctcttctagatttaataacatgctttgctttggtagtgaagaacattgagataaaatctagtattaccgagttagagataattttagatcatcccttatactgttacgtgaattcctgtgaacatgaatattactgattctcaagttccagtatacagaagaataacttgtcattgcctgtcctggtgtacccagatgttccatgatggacgttttatcccataagacgtctccctccttcctggtagccagctcagaatacccatgtagcagcaacttgaacgaatgtcacaacttgtactttttttatatacttcaactttctgaaaaagtaaacttcgacaagttcccagcaactgcttgtttgtgcatgagtagggcttactaagtgcatagatgtttctacagtgaggtgtcctttttataaggtgcacttttggagtttttctgatgccaatctcaacattgtctttttaatactgtcaccagatattgccatttttctttttgttaaaagattatatgatcaagataaattggggtggtaaatcaggtgcctggtaatttatctctttgcacatgggcatcattttaaaaagcttgcttccactcttttctgtagaatttgacggaacacagctatttccctatgcaaggtacagccttacaaagatttctgcagtgatttgtgtgaagaagagaatgtttgtctttttcaatgaagctttgcagatcaccatgtggttgaaggttttagttgtggacacagtggtccctccttaatgatgaagatcactgccttgggcttcatggaaaacaggcccagcctggggctgcgtttggatttattgtttttattccacacttcctacttggtctctggaagttttaccacatgtaacagattcctttatatgtagtgaaaatcactatttgtagaaactgtcaggtcaaaatatttaactgactgttgacatgtattttcttttttccttgtttttgttttttggggttttctgctttaagatatataccactatgtatatccagttaactgagagaattttgactctcttaataaaactgcattaagtttttgattttgtagaaattagcttttgtctaggcaactagtggttatactctgcaaatattgtaatgaatttttacttttttgatttttgtaataaaaattggtgcagataaaatgtcaaatgaacaaaccagtgttctaagagtgttactaacattttgttctaaaactgtccttcacaaattgaataaaaaactctcacactca

SEQ ID NO: 406080 - DNA, 4503 bp, Homo sapiens
tgtaggtccgttttaatactgcattatacggatgccagtgtttaatggcagagtctcagaacttttctacaggagaggatttcttgagaagccatttattctgtggtaaccagattttcagctgggctacatgtattttaacttaattatttttatcttaactgggatcatcagatagcttgagaagcatcgatagccttatataagcaaattcagtgactcactctagaaaagtctctcttgcctagtttaggaagtaggcacagttggctataacaaagcctagaatgtgatgttagtagactattctaatgccacaaagaatactgcttcactttaattaaaagaaattttaattaaaatggaattgtcttagtttggatcataattgaccatttatgacccacctttgtttgtttaccatagagccctgtctagaaaccagattttcattaggtcaaatacaggtgatgagcatatttaatattagtgttaaattcatttgtgacttttgcccttagcaaaatgtaacctagatttacttttagctattcattttgaaattcgtggtttctttatatttgttcatttttttgcccatcagaataatatttcagttacaaaatctaccagaattatgactctgaattcatattttctgattttaggtcctctgaattctagtcatcctcacatcctacttttgcctcctcttttttttttttttttttttttctaaaaagagacagagtctccctttgtcgtccaggctaaagtacagtggcatgattatagttcactgcaacttcaaactcctgggctccagtgatcctcctgcctcagattcttgagtagccaggactataggcacataccaccatgcccaactaatttttaaaaatgttttgtagagatggggtcttgctgtgttacccaggctggtctcaaactcctgggctcaagcagtccttccaccttggcctcccagagcactgggtttacaggtgtgagccactgtgcagcctccttttatctaattgtccccacagcagacttgtctggtcttggctattttccggttgttaaggtgtttcaggatggaggaatcagttcctgagatagttattaagttctgcctgctagaaagggacagtaagtgggttgatatcattctagacttgttaagaaattgttcagaattttgattgtttttcatagcagcttgattaaaatacagattttaataatttccttactacttttataggtagtgctttcaaataaaaccagtgtttgctaaatccaaatgtctttctcccttgctaaattatagcaggagcatgctaaatatttcatcagactactggaatgatggttttacattttaatgtttgaaaacataattttggttcaattgcagtgtaaaactattctcagtaactttaaacttgaaaacttggcaccaaatttatttaggtagaaactctttaaaaatagtttcttcctattattaactgaagaatatatttaagaaagtcttcataattaaataagagtttggataccaaagggttaaaaatacacatgtatttcttttgctgaagatatcttagatgtttgctaatgttttatctttacaaatggacaatttagtaatgttttttatctttttttaatgattccatgtatttgcttatttccatctaggaatagttactaatgtatttgagatacagcataccaaattttaaagtaaccagaatcgtgagttgatggtttttagtccatactgttaaacttatgttgaaatattgacatatttaaattggcttcatgctaaaaaattaccaaaggtaatttaaaaggcagtgttttagagcagtagctcatggtcaaggtggtcacatgacaatggcttaagctcagtgtgcttctgcaccttatgttgtctatgtatttttaatccaaatgttgcctgcaaatatgtgatcccttattatttaagtttcctgtattatgaaccattgcccgttttaaatcacacagaagattctgaatctgtaaaaactacacatgtcaatgttttacagctacgtaattcgaattgacttgattttttcaagtaatcctagaaagggggagcattccatatagaaactgctgaaactgccacaggtgcttctccgaaaaccttacagttgtggcattgaatgttcagtatcgcttcctttctgcacacgaggcatactgttgaggtatttgttgcggtgattggttttaacgctaatctaggaattcagatagagatgctttagatttgcatgctttgcttacctaatttatgatatctacctttctatttgtaaactaacaatagctaagttgagatcagaattttaacagaaatattatttatataaaaattgttatcttttattgtcacatggcattaacaataagaaaacatcctgaaggtgatgtgacaactcggattctaaaaattatacttcaggtatttcctgatccgtggtttttcaaaattgaaacaaagtcgttctcatcagaatggcttctcctttgttctggaattgtggcactataagtggaaactggtgggaccctggctggcttcagagtggagcctaatttttaaagttctttaggggagaattcttagatataaattttagtgaaagttctttgggggagaattcttagatataaatttgagtgtttgaagagacggggtcttcctgtgttgcctaggctggtctcaaacttctggcctcaggtgatcctcctgcttctgcctcccaaagcgccaggattatagggttgagccactgtgcttggcttagaggtaataaattttaatattctattcagaataagaaaatatagcatataagcatttgtatctttagtaaagttactgccagtttgatttttttttttgcaagttacttagcagaacatgtaattcacagtaaagatgattctgtgttgtaccatattttaatattcctgttttgaaagaatagtagagagaaaatgggtggcctgctcagtgattgcttttcgtagtcttggtgaatgttacaggagattgaatttatagataaaagcacagtcatcatagtttccacagtacattgcagcacatttagcttgctagcctaaaaatctgatcatgctgagtttcttttaaagaaagttaattttagaacttcaaactagaaccagtttgaacctcaagttgaccgttgtctgagttttaaaaatctcttcccattttcaaagatttttcaaatggatgtaggagaggaccaaggaggtaggctatagctgtagaacaacacagtcctattttcagaaacgaacagacacacgttttaggtcaggcacagcccatgtatccaggtgcatcaaactggggatgctaagttcaaaagtgcgtctgttttgaagatttcatctgaaaataatgtgtacactttcattactaccagtttgcattcaaaatagtttttgagactctttaaactcttctggatactttaattttccctttggaatagtgtgtaaacacagtccggatgaactttactactgatacctcacttgaggttgacaggagtggccagcagttagtgcctatggtcatgtaatacactaagtcaatacctgtggagtgaaatccggtctctataaaaaatacaaaaaaaatggctggacgcagtggctctcgcctgtaatcccagcactttgggaggctgaggtgggtgggtcatctgaggtcaggagttcaagaccagcctggccaacatggtgaaaccccgtctctactaaaaatacaaaaaattagctgggtgtggtggtgggcgcttgtaataccagctactcgggaggctgaagcaggagaatctcttgaacctgggaggcagaggttgcggtgagccgagatcacgccattgcactccagcctaggcaacaagagtgaaactccgtctcaaaaaaaaaaaaaaaaaaaaaagaaaagaaaaactagttgggtatggtgttgtgtacctgtggtcccagctactcaggaggctgaagtgggaggagcacctgagcccaggaggtagacgaggctacagtgagctgtgattgcaccactgcactccagcctgggtgatgggagtgagaccctgtttaaaacaaacagacaaaaaaacctgtggattgaagggtaaaggatggagtatttaaaaagtactgtgacagaacaaagtactgtaagtactagagttgagtgtggatggaaacacagaacctgtaaatcaagtgtttcatttacgtgctcaactcctactgaattttagcaattaaaacatgaaaactgaaatattggttaacaaatgaaaatagaatttaaagacctgaacttcttttatgatctttaatgattatttgttctaatctttgacttgaatagctgttagttgaggatcctctagaaca

SEQ ID NO: 406081 - DNA, 3733 bp, Homo sapiens
tgtaggtccgttttaatactgcattatacggatgccagtgtttaatggcagagtctcagaacttttctacaggagaggatttcttgagaagccatttattctgtggtaaccagattttcagctgggctacatgtattttaacttaattatttttatcttaactgggatcatcagatagcttgagaagcatcgatagccttatataagcaaattcagtgactcactctagaaaagtctctcttgcctagtttaggaagtaggcacagttggctataacaaagcctagaatgtgatgttagtagactattctaatgccacaaagaatactgcttcactttaattaaaagaaattttaattaaaatggaattgtcttagtttggatcataattgaccatttatgacccacctttgtttgtttaccatagagccctgtctagaaaccagattttcattaggtcaaatacaggtgatgagcatatttaatattagtgttaaattcatttgtgacttttgcccttagcaaaatgtaacctagatttacttttagctattcattttgaaattcgtggtttctttatatttgttcatttttttgcccatcagaataatatttcagttacaaaatctaccagaattatgactctgaattcatattttctgattttaggtcctctgaattctagtcatcctcacatcctacttttgcctcctcttttttttttttttttttttttctaaaaagagacagagtctccctttgtcgtccaggctaaagtacagtggcatgattatagttcactgcaacttcaaactcctgggctccagtgatcctcctgcctcagattcttgagtagccaggactataggcacataccaccatgcccaactaatttttaaaaatgttttgtagagatggggtcttgctgtgttacccaggctggtctcaaactcctgggctcaagcagtccttccaccttggcctcccagagcactgggtttacaggtgtgagccactgtgcagcctccttttatctaattgtccccacagcagacttgtctggtcttggctattttccggttgttaaggtgtttcaggatggaggaatcagttcctgagatagttattaagttctgcctgctagaaagggacagtaagtgggttgatatcattctagacttgttaagaaattgttcagaattttgattgtttttcatagcagcttgattaaaatacagattttaataatttccttactacttttataggtagtgctttcaaataaaaccagtgtttgctaaatccaaatgtctttctcccttgctaaattatagcaggagcatgctaaatatttcatcagactactggaatgatggttttacattttaatgtttgaaaacataattttggttcaattgcagtgtaaaactattctcagtaactttaaacttgaaaacttggcaccaaatttatttaggtagaaactctttaaaaatagtttcttcctattattaactgaagaatatatttaagaaagtcttcataattaaataagagtttggataccaaagggttaaaaatacacatgtatttcttttgctgaagatatcttagatgtttgctaatgttttatctttacaaatggacaatttagtaatgttttttatctttttttaatgattccatgtatttgcttatttccatctaggaatagttactaatgtatttgagatacagcataccaaattttaaagtaaccagaatcgtgagttgatggtttttagtccatactgttaaacttatgttgaaatattgacatatttaaattggcttcatgctaaaaaattaccaaaggtaatttaaaaggcagtgttttagagcagtagctcatggtcaaggtggtcacatgacaatggcttaagctcagtgtgcttctgcaccttatgttgtctatgtatttttaatccaaatgttgcctgcaaatatgtgatcccttattatttaagtttcctgtattatgaaccattgcccgttttaaatcacacagaagattctgaatctgtaaaaactacacatgtcaatgttttacagctacgtaattcgaattgacttgattttttcaagtaatcctagaaagggggagcattccatatagaaactgctgaaactgccacaggtgcttctccgaaaaccttacagttgtggcattgaatgttcagtatcgcttcctttctgcacacgaggcatactgttgaggtatttgttgcggtgattggttttaacgctaatctaggaattcagatagagatgctttagatttgcatgctttgcttacctaatttatgatatctacctttctatttgtaaactaacaatagctaagttgagatcagaattttaacagaaatattatttatataaaaattgttatcttttattgtcacatggcattaacaataagaaaacatcctgaaggtgatgtgacaactcggattctaaaaattatacttcaggtatttcctgatccgtggtttttcaaaattgaaacaaagtcgttctcatcagaatggcttctcctttgttctggaattgtggcactataagtggaaactggtgggaccctggctggcttcagagtggagcctaatttttaaagttctttaggggagaattcttagatataaattttagtgaaagttctttgggggagaattcttagatataaatttgagtgtttgaagagacggggtcttcctgtgttgcctaggctggtctcaaacttctggcctcaggtgatcctcctgcttctgcctcccaaagcgccaggattatagggttgagccactgtgcttggcttagaggtaataaattttaatattctattcagaataagaaaatatagcatataagcatttgtatctttagtaaagttactgccagtttgatttttttttttgcaagttacttagcagaacatgtaattcacagtaaagatgattctgtgttgtaccatattttaatattcctgttttgaaagaatagtagagagaaaatgggtggcctgctcagtgattgcttttcgtagtcttggtgaatgttacaggagattgaatttatagataaaagcacagtcatcatagtttccacagtacattgcagcacatttagcttgctagcctaaaaatctgatcatgctgagtttcttttaaagaaagttaattttagaacttcaaactagaaccagtttgaacctcaagttgaccgttgtctgagttttaaaaatctcttcccattttcaaagatttttcaaatggatgtaggagaggaccaaggaggtaggctatagctgtagaacaacacagtcctattttcagaaacgaacagacacacgttttaggtcaggcacagcccatgtatccaggtgcatcaaactggggatgctaagttcaaaagtgcgtctgttttgaagatttcatctgaaaataatgtgtacactttcattactaccagtttgcattcaaaatagtttttgagactctttaaactcttctggatactttaattttccctttggaatagtgtgtaaacacagtccggatgaactttactactgatacctcacttgaggttgacaggagtggccagcagttagtgcctatggtcatgtaatacactaagtcaatacctgtggagtgaaatccggtcaacttgtctggagtaggggatcctctaga

SEQ ID NO: 406082 - DNA, 4058 bp, Homo sapiens
tgtaggtccgttttaatactgcattatacggatgccagtgtttaatggcagagtctcagaacttttctacaggagaggatttcttgagaagccatttattctgtggtaaccagattttcagctgggctacatgtattttaacttaattatttttatcttaactgggatcatcagatagcttgagaagcatcgatagccttatataagcaaattcagtgactcactctagaaaagtctctcttgcctagtttaggaagtaggcacagttggctataacaaagcctagaatgtgatgttagtagactattctaatgccacaaagaatactgcttcactttaattaaaagaaattttaattaaaatggaattgtcttagtttggatcataattgaccatttatgacccacctttgtttgtttaccatagagccctgtctagaaaccagattttcattaggtcaaatacaggtgatgagcatatttaatattagtgttaaattcatttgtgacttttgcccttagcaaaatgtaacctagatttacttttagctattcattttgaaattcgtggtttctttatatttgttcatttttttgcccatcagaataatatttcagttacaaaatctaccagaattatgactctgaattcatattttctgattttaggtcctctgaattctagtcatcctcacatcctacttttgcctcctcttttttttttttttttttttttctaaaaagagacagagtctccctttgtcgtccaggctaaagtacagtggcatgattatagttcactgcaacttcaaactcctgggctccagtgatcctcctgcctcagattcttgagtagccaggactataggcacataccaccatgcccaactaatttttaaaaatgttttgtagagatggggtcttgctgtgttacccaggctggtctcaaactcctgggctcaagcagtccttccaccttggcctcccagagcactgggtttacaggtgtgagccactgtgcagcctccttttatctaattgtccccacagcagacttgtctggtcttggctattttccggttgttaaggtgtttcaggatggaggaatcagttcctgagatagttattaagttctgcctgctagaaagggacagtaagtgggttgatatcattctagacttgttaagaaattgttcagaattttgattgtttttcatagcagcttgattaaaatacagattttaataatttccttactacttttataggtagtgctttcaaataaaaccagtgtttgctaaatccaaatgtctttctcccttgctaaattatagcaggagcatgctaaatatttcatcagactactggaatgatggttttacattttaatgtttgaaaacataattttggttcaattgcagtgtaaaactattctcagtaactttaaacttgaaaacttggcaccaaatttatttaggtagaaactctttaaaaatagtttcttcctattattaactgaagaatatatttaagaaagtcttcataattaaataagagtttggataccaaagggttaaaaatacacatgtatttcttttgctgaagatatcttagatgtttgctaatgttttatctttacaaatggacaatttagtaatgttttttatctttttttaatgattccatgtatttgcttatttccatctaggaatagttactaatgtatttgagatacagcataccaaattttaaagtaaccagaatcgtgagttgatggtttttagtccatactgttaaacttatgttgaaatattgacatatttaaattggcttcatgctaaaaaattaccaaaggtaatttaaaaggcagtgttttagagcagtagctcatggtcaaggtggtcacatgacaatggcttaagctcagtgtgcttctgcaccttatgttgtctatgtatttttaatccaaatgttgcctgcaaatatgtgatcccttattatttaagtttcctgtattatgaaccattgcccgttttaaatcacacagaagattctgaatctgtaaaaactacacatgtcaatgttttacagctacgtaattcgaattgacttgattttttcaagtaatcctagaaagggggagcattccatatagaaactgctgaaactgccacaggtgcttctccgaaaaccttacagttgtggcattgaatgttcagtatcgcttcctttctgcacacgaggcatactgttgaggtatttgttgcggtgattggttttaacgctaatctaggaattcagatagagatgctttagatttgcatgctttgcttacctaatttatgatatctacctttctatttgtaaactaacaatagctaagttgagatcagaattttaacagaaatattatttatataaaaattgttatcttttattgtcacatggcattaacaataagaaaacatcctgaaggtgatgtgacaactcggattctaaaaattatacttcaggtatttcctgatccgtggtttttcaaaattgaaacaaagtcgttctcatcagaatggcttctcctttgttctggaattgtggcactataagtggaaactggtgggaccctggctggcttcagagtggagcctaatttttaaagttctttaggggagaattcttagatataaattttagtgaaagttctttgggggagaattcttagatataaatttgagtgtttgaagagacggggtcttcctgtgttgcctaggctggtctcaaacttctggcctcaggtgatcctcctgcttctgcctcccaaagcgccaggattatagggttgagccactgtgcttggcttagaggtaataaattttaatattctattcagaataagaaaatatagcatataagcatttgtatctttagtaaagttactgccagtttgatttttttttttgcaagttacttagcagaacatgtaattcacagtaaagatgattctgtgttgtaccatattttaatattcctgttttgaaagaatagtagagagaaaatgggtggcctgctcagtgattgcttttcgtagtcttggtgaatgttacaggagattgaatttatagataaaagcacagtcatcatagtttccacagtacattgcagcacatttagcttgctagcctaaaaatctgatcatgctgagtttcttttaaagaaagttaattttagaacttcaaactagaaccagtttgaacctcaagttgaccgttgtctgagttttaaaaatctcttcccattttcaaagatttttcaaatggatgtaggagaggaccaaggaggtaggctatagctgtagaacaacacagtcctattttcagaaacgaacagacacacgttttaggtcaggcacagcccatgtatccaggtgcatcaaactggggatgctaagttcaaaagtgcgtctgttttgaagatttcatctgaaaataatgtgtacactttcattactaccagtttgcattcaaaatagtttttgagactctttaaactcttctggatactttaattttccctttggaatagtgtgtaaacacagtccggatgaactttactactgatacctcacttgaggttgacaggagtggccagcagttagtgcctatggtcatgtaatacactaagtcaatacctgtggagtgaaatccggtctctataaaaaatacaaaaaaaatggcgtgagccaccgtgcccagcatggtatttatgattctaagtgccatttcaaaaatctgtttgctcttttttattctctggtccactaaagagtaatctttactgtgggctttatttcatatttttatttgtcctaatactaagtggtagcttctcatttctctgtttcttgattttggagagcaagtctatgcttatctatagaaataatcagtttgtaaacttatgttctccttgaagagtttttgaattttcatgtggcaacttatttttctgttcacattcttgacagaatagaccctcccaggtcatctgcacttctgatatctt

SEQ ID NO: 406083 - DNA, 2593 bp, Homo sapiens
tttttttttttgcattaacagtaaccccaagaaaggcatcagggttctggagtggttgtttgagtgacacagcacaaggccttgatttcatcatgcttttgctgtggatgtagtgtagcttgctgaacaggtatggaagctgtctttgctgttaagtacttctcccgtttgtttatcaacctgcagctaacaggatgtctgcttttttacaggtttatttcacagagcagtgtacattcttgtcttccaggggaacttcaacatggagttacttttgatccctcagttttaattcagtgtctaaaggtttacaagttcaacttactctattttattcagctctttcacttactctgccatcacttcctacttgaatctgagttttagctactgtagaggtctcagacctttcctttttagtactattagccaggtaaaactttggttcttgtgagtggtagggatgagtttttaggacagtattcaaagcctttttaaaggaaccaactactcaaatgctctacaatgccaaaaatacaatactcctgcaggttttcccaagcaaggccaaaacaatcaaaatctgacagaaaaacacagctgttcagctctggaatctgatgataggctactttttaatgtcaggacatccttctaaacttccacttacagtgtcacatgtaagcatgaaggctggctcgttggtgagccattgctttgtttttaggaagacagttatgaatgccatggacaatctcagtacatgttgtttgttatgattttattcacgctaaaggaatgggtattaaaattaagtgcatataatatagaattcagtttcaagtctgaagttagcgtaaatttagattcttcagactaacataaaacatgattttgagaagttaaataggaagatgccttttttagaagtttagcatatttagtttatctcccaaatcttgcttagaaatcaaatgtatataagagaagttagttacagagctagattgattaactacttctttaatgaagatttgctatgaatttgtttactctttcataccaccttcagatagctagtcagttcagcaggagcagagaccaggttagcacgcggatggggtgtaattcagtgtttttgtgttgtacagcctgagaaatgccagtggcctgacagcagcagacattgcacaaacccagggtttccaagagtgtgcccagtttctcttgaacctccagaattgtcatctgaaccatttctataacaatggcatcttaaatgggggtcatcagaatgtatttcctaatcatattagtgtgggaacaaatcgaaagagatgcttggaagactcagaagactttggagtaaagaaagctagaactgaagctcaaagcttggattctgccgtgccactcacgaatggcgacacagaagacgatgctgacaaaatgcacgttgatagggagtttgctgttgtaacagatatgaaaaacagtagctccgtatcgaatacattgacaaatggatgtgtcatcaatggacatttggacttcccctccacgaccccgctcagtgggatggaaagcaggaatggccagtgcttgacaggaactaacggaattagcagtggattagccccaggacagccgtttccgagtagccagggttctctctgcattagtgggactgaggagccagagaagaccctgagagctaaccctgagttgtgcggttctctgcacctgaacgggagtccaagtagctgcatagccagtaggccttcctgggtggaagacattggggataacctgtactatggacactaccacgggtttggggacactgctgaaagcatcccagaactgaacagtgtggtcgagcattccaagtccgtgaaggtgcaggagcggtacgacagtgccgtgctgggcaccatgcacctgcaccacggctcctagagacgctgacctggctctcggaaacgcaggagtccttcctggtagccagctcagaatacccatgtagcagcaacttgaacgaatgtcacaacttgtactttttttatatacttcaactttctgaaaaagtaaacttcgacaagttcccagcaactgcttgtttgtgcatgagtagggcttactaagtgcatagatgtttctacagtgaggtgtcctttttataaggtgcacttttggagtttttctgatgccaatctcaacattgtctttttaatactgtcaccagatattgccatttttctttttgttaaaagattatatgatcaagataaattggggtggtaaatcaggtgcctggtaatttatctctttgcacatgggcatcattttaaaaagcttgcttccactcttttctgtagaatttgacggaacacagctatttccctatgcaaggtacagccttacaaagatttctgcagtgatttgtgtgaagaagagaatgtttgtctttttcaatgaagctttgcagatcaccatgtggttgaaggttttagttgtggacacagtggtccctccttaatgatgaagatcactgccttgggcttcagttggttgggacctctagatcaccgcc

SEQ ID NO: 406084 - DNA, 1826 bp, Homo sapiens
tttttttttttgcattaacagtaaccccaagaaaggcatcagggttctggagtggttgtttgagtgacacagcacaaggccttgatttcatcatgcttttgctgtggatgtagtgtagcttgctgaacaggtatggaagctgtctttgctgttaagtacttctcccgtttgtttatcaacctgcagctaacaggatgtctgcttttttacaggtttatttcacagagcagtgtacattcttgtcttccaggggaacttcaacatggagttacttttgatccctcagttttaattcagtgtctaaaggtttacaagttcaacttactctattttattcagctctttcacttactctgccatcacttcctacttgaatctgagttttagctactgtagaggtctcagacctttcctttttagtactattagccaggtaaaactttggttcttgtgagtggtagggatgagtttttaggacagtattcaaagcctttttaaaggaaccaactactcaaatgctctacaatgccaaaaatacaatactcctgcaggttttcccaagcaaggccaaaacaatcaaaatctgacagaaaaacacagctgttcagctctggaatctgatgataggctactttttaatgtcaggacatccttctaaacttccacttacagtgtcacatgtaagcatgaaggctggctcgttggtgagccattgctttgtttttaggaagacagttatgaatgccatggacaatctcagtacatgttgtttgttatgattttattcacgctaaaggaatgggtattaaaattaagtgcatataatatagaattcagtttcaagtctgaagttagcgtaaatttagattcttcagactaacataaaacatgattttgagaagttaaataggaagatgccttttttagaagtttagcatatttagtttatctcccaaatcttgcttagaaatcaaatgtatataagagaagttagttacagagctagattgattaactacttctttaatgaagatttgctatgaatttgtttactctttcataccaccttcagatagctagtcagttcagcaggagcagagaccaggttagcacgcggatggggtgtaattcagtgtttttgtgttgtacagcctgagaaatgccagtggcctgacagcagcagacattgcacaaacccagggtttccaagagtgtgcccagtttctcttgaacctccagaattgtcatctgaaccatttctataacaatggcatcttaaatgggggtcatcagaatgtatttcctaatcatattagtgtgggaacaaatcgaaagagatgcttggaagactcagaagactttggagtaaagaaagctagaactgaaggtgagaccgctttgcgggtgggaagagcacacttatttttcctttctgtaatatgttttctttttatggctgagcgcaccttcgagatgagaccttcacttcaggtggtaatgcgcctggtggattgtgcggtgacggtggagatttctcctgtactgccactgcgaagatgggacacttaacaaaagggaatgtgagggaaatactgatggcccaagtgtaaatgtctatgtggaactttttgagcacccatgtttacctgccgtgaattagattttttaatttgttgtatctgtttgaaatatatctatttacaaaacaacaaaaaaaaaaaaaaaactttttgggcgccctgggcccccgaaaaaagttttttaaaacccttgtgtttggggggcgcggggcccccttggttttttgacaccggcgcccaaagggg

SEQ ID NO: 406085 - DNA, 1686 bp, Homo sapiens
tttttttttttgcattaacagtaaccccaagaaaggcatcagggttctggagtggttgtttgagtgacacagcacaaggccttgatttcatcatgcttttgctgtggatgtagtgtagcttgctgaacaggtatggaagctgtctttgctgttaagtacttctcccgtttgtttatcaacctgcagctaacaggatgtctgcttttttacaggtttatttcacagagcagtgtacattcttgtcttccaggggaacttcaacatggagttacttttgatccctcagttttaattcagtgtctaaaggtttacaagttcaacttactctattttattcagctctttcacttactctgccatcacttcctacttgaatctgagttttagctactgtagaggtctcagacctttcctttttagtactattagccaggtaaaactttggttcttgtgagtggtagggatgagtttttaggacagtattcaaagcctttttaaaggaaccaactactcaaatgctctacaatgccaaaaatacaatactcctgcaggttttcccaagcaaggccaaaacaatcaaaatctgacagaaaaacacagctgttcagctctggaatctgatgataggctactttttaatgtcaggacatccttctaaacttccacttacagtgtcacatgtaagcatgaaggctggctcgttggtgagccattgctttgtttttaggaagacagttatgaatgccatggacaatctcagtacatgttgtttgttatgattttattcacgctaaaggaatgggtattaaaattaagtgcatataatatagaattcagtttcaagtctgaagttagcgtaaatttagattcttcagactaacataaaacatgattttgagaagttaaataggaagatgccttttttagaagtttagcatatttagtttatctcccaaatcttgcttagaaatcaaatgtatataagagaagttagttacagagctagattgattaactacttctttaatgaagatttgctatgaatttgtttactctttcataccaccttcagatagctagtcagttcagcaggagcagagaccaggttagcacgcggatggggtgtaattcagtgtttttgtgttgtacagcctgagaaatgccagtggcctgacagcagcagacattgcacaaacccagggtttccaagagtgtgcccagtttctcttgaacctccagaattgtcatctgaaccatttctataacaatggcatcttaaatgggggtcatcagaatgtatttcctaatcatattagtgtgggaacaaatcgaaagagatgcttggaagactcagaagactttggagtaaagaaagctagaactgaaggtgagaccgctttgcgggtgggaagagcacacttatttttcctttctgtaatatgttttctttttatggctgagcgcaccttcgagatgagaccttcacttcaggtggtaatgcgcctggtggattgtgcggtgacggtggagatttctcctgtactgccactgcgaagatgggacacttaacaaaagggaatgtgagggaaatactgatggcccaagtgtaaatgtctatgtggaactttttgagcacccatgtttacctgccgagtccgctgcattggggatcctgtagggtcgacg

SEQ ID NO: 406086 - DNA, 2025 bp, Homo sapiens
tttttttttttgcattaacagtaaccccaagaaaggcatcagggttctggagtggttgtttgagtgacacagcacaaggccttgatttcatcatgcttttgctgtggatgtagtgtagcttgctgaacaggtatggaagctgtctttgctgttaagtacttctcccgtttgtttatcaacctgcagctaacaggatgtctgcttttttacaggtttatttcacagagcagtgtacattcttgtcttccaggggaacttcaacatggagttacttttgatccctcagttttaattcagtgtctaaaggtttacaagttcaacttactctattttattcagctctttcacttactctgccatcacttcctacttgaatctgagttttagctactgtagaggtctcagacctttcctttttagtactattagccaggtaaaactttggttcttgtgagtggtagggatgagtttttaggacagtattcaaagcctttttaaaggaaccaactactcaaatgctctacaatgccaaaaatacaatactcctgcaggttttcccaagcaaggccaaaacaatcaaaatctgacagaaaaacacagctgttcagctctggaatctgatgataggctactttttaatgtcaggacatccttctaaacttccacttacagtgtcacatgtaagcatgaaggctggctcgttggtgagccattgctttgtttttaggaagacagttatgaatgccatggacaatctcagtacatgttgtttgttatgattttattcacgctaaaggaatgggtattaaaattaagtgcatataatatagaattcagtttcaagtctgaagttagcgtaaatttagattcttcagactaacataaaacatgattttgagaagttaaataggaagatgccttttttagaagtttagcatatttagtttatctcccaaatcttgcttagaaatcaaatgtatataagagaagttagttacagagctagattgattaactacttctttaatgaagatttgctatgaatttgtttactctttcataccaccttcagatagctagtcagttcagcaggagcagagaccaggttagcacgcggatggggtgtaattcagtgtttttgtgttgtacagcctgagaaatgccagtggcctgacagcagcagacattgcacaaacccagggtttccaagagtgtgcccagtttctcttgaacctccagaattgtcatctgaaccatttctataacaatggcatcttaaatgggggtcatcagaatgtatttcctaatcatattagtgtgggaacaaatcgaaagagatgcttggaagactcagaagactttggagtaaagaaagctagaactgaagctcaaagcttggattctgccgtgccactcacgaatggcgacacagaagacgatgctgacaaaatgcacgttgatagggagtttgctgttgtaacaggggagtggacagtttcctgttagctgcaacaacaatccaatggttgaagacaccaaacagcaggagagtggttctgttggaccaaaagaaatagaaatatatactgtgtcagcaatgcagaccccctgtcgttgcaggaatcagtatgcatattatttctaacataagtttttctcagatgttttgcactttgttgtccagtgtctttttaaaaatgttatactataatttgcatatcttgggcaagtttgtagatacaagaagtgttttgggtatattctgtggacatgaaaaatgtaagtgcaatctttattctgatttgaagctactgtttttcatatcattttaacagactcagaatgaagaccacagaaaccagagcaaccaagtcctgggtaaaagattccatgctggagtgactgggctgagtcagaaccacatttactagtttctcagtgtttactgctagtcgtcctctttgtggtatatggggttgaaaatattactgtagcatgtcggattatcaccaaggcatattcagc

SEQ ID NO: 406087 - DNA, 1281 bp, Homo sapiens
tttttttttttgcattaacagtaaccccaagaaaggcatcagggttctggagtggttgtttgagtgacacagcacaaggccttgatttcatcatgcttttgctgtggatgtagtgtagcttgctgaacaggtatggaagctgtctttgctgttaagtacttctcccgtttgtttatcaacctgcagctaacaggatgtctgcttttttacaggtttatttcacagagcagtgtacattcttgtcttccaggggaacttcaacatggagttacttttgatccctcagttttaattcagtgtctaaaggtttacaagttcaacttactctattttattcagctctttcacttactctgccatcacttcctacttgaatctgagttttagctactgtagaggtctcagacctttcctttttagtactattagccaggtaaaactttggttcttgtgagtggtagggatgagtttttaggacagtattcaaagcctttttaaaggaaccaactactcaaatgctctacaatgccaaaaatacaatactcctgcaggttttcccaagcaaggccaaaacaatcaaaatctgacagaaaaacacagctgttcagctctggaatctgatgataggctactttttaatgtcaggacatccttctaaacttccacttacagtgtcacatgtaagcatgaaggctggctcgttggtgagccattgctttgtttttaggaagacagttatgaatgccatggacaatctcagtacatgttgtttgttatgattttattcacgctaaaggaatgggtattaaaattaagtgcatataatatagaattcagtttcaagtctgaagttagcgtaaatttagattcttcagactaacataaaacatgattttgagaagttaaataggaagatgccttttttagaagtttagcatatttagtttatctcccaaatcttgcttagaaatcaaatgtatataagagaagttagttacagagctagattgattaactacttctttaatgaagatttgctatgaatttgtttactctttcataccaccttcagatagctagtcagttcagcaggagcagagaccaggttagcacgcggatggggtgtaattcagtgtttttgtgttgtacagcctgagaaatgccagtggcctgacagcagcagaacacggtctctcatgagagaccgtgttgcactgaccatcacctccgtccactgattatttggtgtggatcctgtagcagggtctgaactctgtaggt

SEQ ID NO: 406088 - DNA, 927 bp, Homo sapiens
tttttttttttgcattaacagtaaccccaagaaaggcatcagggttctggagtggttgtttgagtgacacagcacaaggccttgatttcatcatgcttttgctgtggatgtagtgtagcttgctgaacaggtatggaagctgtctttgctgttaagtacttctcccgtttgtttatcaacctgcagctaacaggatgtctgcttttttacaggtttatttcacagagcagtgtacattcttgtcttccaggggaacttcaacatggagttacttttgatccctcagttttaattcagtgtctaaaggtttacaagttcaacttactctattttattcagctctttcacttactctgccatcacttcctacttgaatctgagttttagctactgtagaggtctcagacctttcctttttagtactattagccaggtaaaactttggttcttgtgagtggtagggatgagtttttaggacagtattcaaagcctttttaaaggaaccaactactcaaatgctctacaatgccaaaaatacaatactcctgcaggttttcccaagcaaggccaaaacaatcaaaatctgacagaaaaacacagctgttcagctctggaatctgatgataggctactttttaatgtcaggacatccttctaaacttccacttacagtgtcacatgtaagcatgaaggctggctcgttggtgagccattgctttgtttttaggaagacagttatgaatgccatggacaatctcagtacatgttgtttgttatgattttattcacgctaaaggaatgggtattaaaattaagtgcatataatatagaattcagtttcaagtctgaagttagcgtaaatttagattcttcagactaacataaaacatgattttgagaccagcctgagcaacatctctcaaaatt

SEQ ID NO: 406089 - DNA, 491 bp, Homo sapiens
cttagaggacccctctctccacactggtacactgcctctctccacactgggtctctctccacattggtctctggaagttttaccacatgtaacagattcctttatatgtagtgaaaatcactatttgtagaaactgtcaggtcaaaatatttaactgactgttgacatgtattttcttttttccttgtttttgttttttggggttttctgctttaagatatataccactatgtatatccagttaactgagagaattttgactctcttaataaaactgcattaagtttttgattttgtagaaattagcttttgtctaggcaactagtggttatactctgcaaatattgtaatgaatttttacttttttgatttttgtaataaaaattggtgcagataaaatgtcaaatgaacaaaccagtgttctaagagtgttactaacattttgttctaaaactgtccttcacaaattgaataaaaaactctcacactca

SEQ ID NO: 406090 - DNA, 3342 bp, Homo sapiens
tgtaggtccgttttaatactgcattatacggatgccagtgtttaatggcagagtctcagaacttttctacaggagaggatttcttgagaagccatttattctgtggtaaccagattttcagctgggctacatgtattttaacttaattatttttatcttaactgggatcatcagatagcttgagaagcatcgatagccttatataagcaaattcagtgactcactctagaaaagtctctcttgcctagtttaggaagtaggcacagttggctataacaaagcctagaatgtgatgttagtagactattctaatgccacaaagaatactgcttcactttaattaaaagaaattttaattaaaatggaattgtcttagtttggatcataattgaccatttatgacccacctttgtttgtttaccatagagccctgtctagaaaccagattttcattaggtcaaatacaggtgatgagcatatttaatattagtgttaaattcatttgtgacttttgcccttagcaaaatgtaacctagatttacttttagctattcattttgaaattcgtggtttctttatatttgttcatttttttgcccatcagaataatatttcagttacaaaatctaccagaattatgactctgaattcatattttctgattttaggtcctctgaattctagtcatcctcacatcctacttttgcctcctcttttttttttttttttttttttctaaaaagagacagagtctccctttgtcgtccaggctaaagtacagtggcatgattatagttcactgcaacttcaaactcctgggctccagtgatcctcctgcctcagattcttgagtagccaggactataggcacataccaccatgcccaactaatttttaaaaatgttttgtagagatggggtcttgctgtgttacccaggctggtctcaaactcctgggctcaagcagtccttccaccttggcctcccagagcactgggtttacaggtgtgagccactgtgcagcctccttttatctaattgtccccacagcagacttgtctggtcttggctattttccggttgttaaggtgtttcaggatggaggaatcagttcctgagatagttattaagttctgcctgctagaaagggacagtaagtgggttgatatcattctagacttgttaagaaattgttcagaattttgattgtttttcatagcagcttgattaaaatacagattttaataatttccttactacttttataggtagtgctttcaaataaaaccagtgtttgctaaatccaaatgtctttctcccttgctaaattatagcaggagcatgctaaatatttcatcagactactggaatgatggttttacattttaatgtttgaaaacataattttggttcaattgcagtgtaaaactattctcagtaactttaaacttgaaaacttggcaccaaatttatttaggtagaaactctttaaaaatagtttcttcctattattaactgaagaatatatttaagaaagtcttcataattaaataagagtttggataccaaagggttaaaaatacacatgtatttcttttgctgaagatatcttagatgtttgctaatgttttatctttacaaatggacaatttagtaatgttttttatctttttttaatgattccatgtatttgcttatttccatctaggaatagttactaatgtatttgagatacagcataccaaattttaaagtaaccagaatcgtgagttgatggtttttagtccatactgttaaacttatgttgaaatattgacatatttaaattggcttcatgctaaaaaattaccaaaggtaatttaaaaggcagtgttttagagcagtagctcatggtcaaggtggtcacatgacaatggcttaagctcagtgtgcttctgcaccttatgttgtctatgtatttttaatccaaatgttgcctgcaaatatgtgatcccttattatttaagtttcctgtattatgaaccattgcccgttttaaatcacacagaagattctgaatctgtaaaaactacacatgtcaatgttttacagctacgtaattcgaattgacttgattttttcaagtaatcctagaaagggggagcattccatatagaaactgctgaaactgccacaggtgcttctccgaaaaccttacagttgtggcattgaatgttcagtatcgcttcctttctgcacacgaggcatactgttgaggtatttgttgcggtgattggttttaacgctaatctaggaattcagatagagatgctttagatttgcatgctttgcttacctaatttatgatatctacctttctatttgtaaactaacaatagctaagttgagatcagaattttaacagaaatattatttatataaaaattgttatcttttattgtcacatggcattaacaataagaaaacatcctgaaggtgatgtgacaactcggattctaaaaattatacttcaggtatttcctgatccgtggtttttcaaaattgaaacaaagtcgttctcatcagaatggcttctcctttgttctggaattgtggcactataagtggaaactggtgggaccctggctggcttcagagtggagcctaatttttaaagttctttaggggaggatcacttgaggcctggagtttgagaccagcctgagcaacatctctcaaaattataaaaaaaaaaaaaaaaaagtagccaggcatggtagcacatgcctgtatacctagctacttgggaggctgaggctaaggaggatcccttagcccaggagttccagggtgtggtgaactatgattgtgccactgcactccagctggggcaacagggagatactctgtctctttaaaaaacagtggttactagatggaaagataaattctagtgttaccttgcactgtagggtgactaacagtaattttttattttttttgtatggctaattcagtacaaatggaaagtgtttgaggtgatgcatatgcaattatgctggttttttttaatccctatacattgtattggaatttacaatgtaccccataataaaggatagaggaatatttacagtatcatctatttggttaaatgttattcagcagttctggcctgctgcctttttttgtataacctatggcccaagaatggtttctacattttttaatagttgagcaaaaatcaatagaataatattttctaatacataaaattagatgaaatttcagtttcagtgttcataaataaagctttatgagagccatgctcaattgccttgaggctgctttcagcctacaacaa

SEQ ID NO: 406091 - DNA, 1537 bp, Homo sapiens
ttttaatgtgagcagggatagtagagatgatgaatgtaggtaaggagaggaaatgagaatgaggactttcaggggcaagagatggtggtgtcattttgtgttgtgttcctgagtcaggtaccaacagatttcctctgagtagaatataaatgctaacaaattaaactgtatgttgtatacattcagcccttggtaacaaggaaaatgatagaattgaaatgttcttgtacctcactagaagcagagaaagggtgctggatatttctgtttccgataatgctgcatagatagtgccacttaaatgtagagcaaaattacagtctcctctaagtaattcctccagttaccatgtgtcctagattccgatacctgtccaatacaatttctagaactttttcacctccccatcatgtctgccttctagtgccccaaaattatgtgagatgctagaagttgtttgacctgtgattgttcttgcttccttggtccttacgtacgagtacatagcatgattgggccagaatccgtcttttgagctcttctagtaaagtaagttttgagataatacctaagaccacatggaaatttggttggtctaagtagaggacaagcacgtatttaactacctttggcaggggaaaaagtgaagtgggagagcttaccagtgctacctatgtgtaggctgacactctgaaacttcagtctccaggaatctccatatgttggcactattttgttgattatttttctataaggttatatttctttggaagatcagtaaacttgctgttctaacccaaattcagtgtagtcttcagcttctgaataaggaataaaggaatcgaatgtgctttggatgttcttttaacaatttcagaatgttggcatgccctttgagcatctaaacttccctcagcgaattggtatttatttatttatttagagatagaatcttgctctgttgcccaggctggagtgcagtggtgtgatctcggctcactgcagcctctgcctcccaggttcaagcgattctcctgcctcagcctcccaagtagcagggactataggcatgtgccaccaccacactccgctaattttttgtatttttagtagagccagggtttcatcatgtaagccaagctggtctcaaagctcctgacctcaggtgatccacccgctttggcctcccaaagtgctgggattacaggcgtgagccaccgtgcccagcatggtatttatgattctaagtgccatttcaaaaatctgtttgctcttttttattctctggtccactaaagagtaatctttactgtgggctttatttcatatttttatttgtcctaatactaagtggtagcttctcatttctctgtttcttgattttggagagcaagtctatgcttatctatagaaataatcagtttgtaaacttatgttctccttgaagagtttttgaattttcatgtggcaacttatttttctgttcacattcttgacagaatagaccctcccaggtcatctgcacttctgatatctt

SEQ ID NO: 406092 - DNA, 1243 bp, Homo sapiens
agcgggcgcgctccgctcggcagcctgtgggacgcgaccgcggcgctagtctcgttcctttgtgctgcggcggcggcttctcgagtcctccccgacgcgtcctctaggccagcgagccccgcgctctccggtgacggaccatgtcggcggcgggagcgggcgcgggcgtagaggcgggcttctccagcgaggagctgctctcgctccgtttcccgctgcaccgcgcctgccgcgacggggacctggccacgctctgctcgctgctgcagcagacaccccacgcccacctggcctctgaggactccttctatggctggacgcccgtgcactgggccgcgcatttcggcaagttggagtgcttagtgcagttggtgagagcgggagccacactcaacgtctccaccacacggtacgcgcagacgccagcccacattgcagcctttgggggacatcctcagtgcctggtctggctgattcaagcaggagccaacattaacaaaccggattgtgagggtgaaactcccattcacaaggcagctcgctctgggagcctagaatgcatcagtgcccttgtggcgaatggggctcacgtcgaggccctcaagtgtctcttttccaccaggtgtggctgagatgggctcaggtgccagtctgtttttccttctcagtataagagccaccactcaagaccctgcattatggtgacttccctggactgagctttcatattttttttagaagaagtatttagcctgagctacctagccaaaaacaattataagcctttggcctggagatagagcacaagtaatcattattcattgctattgtatatgtggttatttagttttaacatcgagataaaatgtcagttttgtcagtaagttaatttgtaagttgcttcttgatttctgcacattttaataatttaccccatttagtccaccaacgtgtaacagtttgaatctccaaaataatggtactaggtctattttattccctgtaacgctgctcatatggtaaagtgtagtcctagcaaatcataaccgtttcttttttttaagacgttcaaggagcatagaattaacttatttaaagttagtttttttcattcagaatggacgagattattaactcttcatattacatgctataatatttaggagataatataaatttttccttttcctgtgaatagattaaaagctgccttatatcagtattattaaattcatttgctctt

SEQ ID NO: 406093 - DNA, 967 bp, Homo sapiens
agcgggcgcgctccgctcggcagcctgtgggacgcgaccgcggcgctagtctcgttcctttgtgctgcggcggcggcttctcgagtcctccccgacgcgtcctctaggccagcgagccccgcgctctccggtgacggaccatgtcggcggcgggagcgggcgcgggcgtagaggcgggcttctccagcgaggagctgctctcgctccgtttcccgctgcaccgcgcctgccgcgacggggacctggccacgctctgctcgctgctgcagcagacaccccacgcccacctggcctctgaggactccttctatggctggacgcccgtgcactgggccgcgcatttcggcaagttggagtgcttagtgcagttggtgagagcgggagccacactcaacgtctccaccacacggtacgcgcagacgccagcccacattgcagcctttgggggacatcctcagtgcctggtctggctgattcaagcaggagccaacattaacaaaccggattgtgagggtgaaactcccattcacaaggcagctcgctctgggagcctagaatgcatcagtgcccttgtggcgaatggggctcacgtcgagttgcatctgtaagataacgcatttcagctgctgtgcatcgtattaaattttctagcaccacacgtgagtatgttaatggactttctttttcttttcttattttaaatcttgagttttggtgccaagttttctgtgtgtgaggctctgtttctggcttatatgttggtcattattatttgccattgtttacatctaaaaattaaaacgcacaggattaaatctaacttgtgaccaaactaaatgtttgtgtactttaaaggacctaaatctctgtgtatggagttttcagcaagcacgtgaagttgtcaccatccttaatcttgcttatatggtagttccatttttccactgcccccaatatttgagtgctg

SEQ ID NO: 406094 - DNA, 815 bp, Homo sapiens
agcgggcgcgctccgctcggcagcctgtgggacgcgaccgcggcgctagtctcgttcctttgtgctgcggcggcggcttctcgagtcctccccgacgcgtcctctaggccagcgagccccgcgctctccggtgacggaccatgtcggcggcgggagcgggcgcgggcgtagaggcgggcttctccagcgaggagctgctctcgctccgtttcccgctgcaccgcgcctgccgcgacggggacctggccacgctctgctcgctgctgcagcagacaccccacgcccacctggcctctgaggactccttctatggctggacgcccgtgcactgggccgcgcatttcggcaagttggagtgcttagtgcagttggtgagagcgggagccacactcaacgtctccaccacacggtacgcgcagacgccagcccacattgcagcctttgggggacatcctcagtgcctggtctggctgattcaagcaggagccaacattaacaaaccggattgtgagggtgaaactcccattcacaaggcagctcgctctgggagcctagaatgcatcagtgcccttgtggcgaatggggctcacgtcgattcacagcattaacaaaatggatgcggttttcacccttaaatgttgagtgtaagctatagagctataataaccaaaataaccaatatcagcttttttgttttaccttaagtgttatgaataattcatgaaaattaattataaaccacattattctaatcagaaatgtgaacatttagacttcggaggaaataaaacccacaaaactagtttaaacctttg

SEQ ID NO: 406095 - DNA, 2557 bp, Homo sapiens
agcgggcgcgctccgctcggcagcctgtgggacgcgaccgcggcgctagtctcgttcctttgtgctgcggcggcggcttctcgagtcctccccgacgcgtcctctaggccagcgagccccgcgctctccggtgacggaccatgtcggcggcgggagcgggcgcgggcgtagaggcgggcttctccagcgaggagctgctctcgctccgtttcccgctgcaccgcgcctgccgcgacggggacctggccacgctctgctcgctgctgcagcagacaccccacgcccacctggcctctgaggactccttctatggctggacgcccgtgcactgggccgcgcatttcggcaagttggagtgcttagtgcagttggtgagagcgggagccacactcaacgtctccaccacacggtacgcgcagacgccagcccacattgcagcctttgggggacatcctcagtgcctggtctggctgattcaagcaggagccaacattaacaaaccggattgtgagggtgaaactcccattcacaaggcagctcgctctgggagcctagaatgcatcagtgcccttgtggcgaatggggctcacgtcgagaatagttactaatgtatttgagatacagcataccaaattttaaagtaaccagaatccctgagaaatgccagtggcctgacagcagcagacattgcacaaacccagggtttccaagagtgtgcccagtttctcttgaacctccagaattgtcatctgaaccatttctataacaatggcatcttaaatgggggtcatcagaatgtatttcctaatcatattagtgtgggaacaaatcgaaagagatgcttggaagactcagaagactttggagtaaagaaagctagaactgaagctcaaagcttggattctgccgtgccactcacgaatggcgacacagaagacgatgctgacaaaatgcacgttgatagggagtttgctgttgtaacagatatgaaaaacagtagctccgtatcgaatacattgacaaatggatgtgtcatcaatggacatttggacttcccctccacgaccccgctcagtgggatggaaagcaggaatggccagtgcttgacaggaactaacggaattagcagtggattagccccaggacagccgtttccgagtagccagggttctctctgcattagtgggactgaggagccagagaagaccctgagagctaaccctgagttgtgcggttctctgcacctgaacgggagtccaagtagctgcatagccagtaggccttcctgggtggaagacattggggataacctgtactatggacactaccacgggtttggggacactgctgaaagcatcccagaactgaacagtgtggtcgagcattccaagtccgtgaaggtgcaggagcggtacgacagtgccgtgctgggcaccatgcacctgcaccacggctcctagagacgctgacctggctctcggaaacgcaggagtccttcctggtagccagctcagaatacccatgtagcagcaacttgaacgaatgtcacaacttgtactttttttatatacttcaactttctgaaaaagtaaacttcgacaagttcccagcaactgcttgtttgtgcatgagtagggcttactaagtgcatagatgtttctacagtgaggtgtcctttttataaggtgcacttttggagtttttctgatgccaatctcaacattgtctttttaatactgtcaccagatattgccatttttctttttgttaaaagattatatgatcaagataaattggggtggtaaatcaggtgcctggtaatttatctctttgcacatgggcatcattttaaaaagcttgcttccactcttttctgtagaatttgacggaacacagctatttccctatgcaaggtacagccttacaaagatttctgcagtgatttgtgtgaagaagagaatgtttgtctttttcaatgaagctttgcagatcaccatgtggttgaaggttttagttgtggacacagtggtccctccttaatgatgaagatcactgccttgggcttcatggaaaacaggcccagcctggggctgcgtttggatttattgtttttattccacacttcctacttggtctctggaagttttaccacatgtaacagattcctttatatgtagtgaaaatcactatttgtagaaactgtcaggtcaaaatatttaactgactgttgacatgtattttcttttttccttgtttttgttttttggggttttctgctttaagatatataccactatgtatatccagttaactgagagaattttgactctcttaataaaactgcattaagtttttgattttgtagaaattagcttttgtctaggcaactagtggttatactctgcaaatattgtaatgaatttttacttttttgatttttgtaataaaaattggtgcagataaaatgtcaaatgaacaaaccagtgttctaagagtgttactaacattttgttctaaaactgtccttcacaaattgaataaaaaactctcacactca

SEQ ID NO: 406096 - DNA, 2547 bp, Homo sapiens
ggcggaagcgggatcgacggcgcctgtgccccgaggggcctagggcgcctgtgcggcagcgctcgcggcccggagtcgcggcggggcagccggggggcgcggggcggaagcgagggtcttgctctgttgcccacgctggagtgcagcggcgtgatctctgctcactgcaacctccacctcctaggttcaagtgattctcctgtctcagccttctgagtagctgggattctagttggagtgcttagtgcagttggtgagagcgggagccacactcaacgtctccaccacacggtacgcgcagacgccagcccacattgcagcctttgggggacatcctcagtgcctggtctggctgattcaagcaggagccaacattaacaaaccggattgtgagggtgaaactcccattcacaaggcagctcgctctgggagcctagaatgcatcagtgcccttgtggcgaatggggctcacgtcgactacgtaattcgaattgacttgattttttcaagtaatcctagaaagggggagcattccatatagaaactgctgaaactgccacaggtgcttctccgaaaaccttacagttgtggcattgaatgttcagtatcgcttcctttctgcacacgaggcatactgttgagcctgagaaatgccagtggcctgacagcagcagacattgcacaaacccagggtttccaagagtgtgcccagtttctcttgaacctccagaattgtcatctgaaccatttctataacaatggcatcttaaatgggggtcatcagaatgtatttcctaatcatattagtgtgggaacaaatcgaaagagatgcttggaagactcagaagactttggagtaaagaaagctagaactgaagctcaaagcttggattctgccgtgccactcacgaatggcgacacagaagacgatgctgacaaaatgcacgttgatagggagtttgctgttgtaacagatatgaaaaacagtagctccgtatcgaatacattgacaaatggatgtgtcatcaatggacatttggacttcccctccacgaccccgctcagtgggatggaaagcaggaatggccagtgcttgacaggaactaacggaattagcagtggattagccccaggacagccgtttccgagtagccagggttctctctgcattagtgggactgaggagccagagaagaccctgagagctaaccctgagttgtgcggttctctgcacctgaacgggagtccaagtagctgcatagccagtaggccttcctgggtggaagacattggggataacctgtactatggacactaccacgggtttggggacactgctgaaagcatcccagaactgaacagtgtggtcgagcattccaagtccgtgaaggtgcaggagcggtacgacagtgccgtgctgggcaccatgcacctgcaccacggctcctagagacgctgacctggctctcggaaacgcaggagtccttcctggtagccagctcagaatacccatgtagcagcaacttgaacgaatgtcacaacttgtactttttttatatacttcaactttctgaaaaagtaaacttcgacaagttcccagcaactgcttgtttgtgcatgagtagggcttactaagtgcatagatgtttctacagtgaggtgtcctttttataaggtgcacttttggagtttttctgatgccaatctcaacattgtctttttaatactgtcaccagatattgccatttttctttttgttaaaagattatatgatcaagataaattggggtggtaaatcaggtgcctggtaatttatctctttgcacatgggcatcattttaaaaagcttgcttccactcttttctgtagaatttgacggaacacagctatttccctatgcaaggtacagccttacaaagatttctgcagtgatttgtgtgaagaagagaatgtttgtctttttcaatgaagctttgcagatcaccatgtggttgaaggttttagttgtggacacagtggtccctccttaatgatgaagatcactgccttgggcttcatggaaaacaggcccagcctggggctgcgtttggatttattgtttttattccacacttcctacttggtctctggaagttttaccacatgtaacagattcctttatatgtagtgaaaatcactatttgtagaaactgtcaggtcaaaatatttaactgactgttgacatgtattttcttttttccttgtttttgttttttggggttttctgctttaagatatataccactatgtatatccagttaactgagagaattttgactctcttaataaaactgcattaagtttttgattttgtagaaattagcttttgtctaggcaactagtggttatactctgcaaatattgtaatgaatttttacttttttgatttttgtaataaaaattggtgcagataaaatgtcaaatgaacaaaccagtgttctaagagtgttactaacattttgttctaaaactgtccttcacaaattgaataaaaaactctcacactca

SEQ ID NO: 406097 - DNA, 2737 bp, Homo sapiens
agcgggcgcgctccgctcggcagcctgtgggacgcgaccgcggcgctagtctcgttcctttgtgctgcggcggcggcttctcgagtcctccccgacgcgtcctctaggccagcgagccccgcgctctccggtgacggaccatgtcggcggcgggagcgggcgcgggcgtagaggcgggcttctccagcgaggagctgctctcgctccgtttcccgctgcaccgcgcctgccgcgacggggacctggccacgctctgctcgctgctgcagcagacaccccacgcccacctggcctctgaggactccttctatggctggacgcccgtgcactgggccgcgcatttcggcaagttggagtgcttagtgcagttggtgagagcgggagccacactcaacgtctccaccacacggtacgcgcagacgccagcccacattgcagcctttgggggacatcctcagtgcctggtctggctgattcaagcaggagccaacattaacaaaccggattgtgagggtgaaactcccattcacaaggcagctcgctctgggagcctagaatgcatcagtgcccttgtggcgaatggggctcacgtcgagtttatttcacagagcagtgtacattcttgtcttccaggggaacttcaacatggagttacttttgatccctcagttttaattcagtgtctaaagcctgagaaatgccagtggcctgacagcagcagacattgcacaaacccagggtttccaagagtgtgcccagtttctcttgaacctccagaattgtcatctgaaccatttctataacaatggcatcttaaatgggggtcatcagaatgtatttcctaatcatattagtgtgggaacaaatcgaaagagatgcttggaagactcagaagactttggagtaaagaaagctagaactgaagctcaaagcttggattctgccgtgccactcacgaatggcgacacagaagacgatgctgacaaaatgcacgttgatagggagtttgctgttgtaacaggggagtggacagtttcctgttagctgcaacaacaatccaatggttgaagacaccaaacagcaggagagtggttctgttggaccaaaagaaatagaaatatatactgtgtcagcaatgcagaccccctgtcgttgcaggaatcaatatgaaaaacagtagctccgtatcgaatacattgacaaatggatgtgtcatcaatggacatttggacttcccctccacgaccccgctcagtgggatggaaagcaggaatggccagtgcttgacaggaactaacggaattagcagtggattagccccaggacagccgtttccgagtagccagggttctctctgcattagtgggactgaggagccagagaagaccctgagagctaaccctgagttgtgcggttctctgcacctgaacgggagtccaagtagctgcatagccagtaggccttcctgggtggaagacattggggataacctgtactatggacactaccacgggtttggggacactgctgaaagcatcccagaactgaacagtgtggtcgagcattccaagtccgtgaaggtgcaggagcggtacgacagtgccgtgctgggcaccatgcacctgcaccacggctcctagagacgctgacctggctctcggaaacgcaggagtccttcctggtagccagctcagaatacccatgtagcagcaacttgaacgaatgtcacaacttgtactttttttatatacttcaactttctgaaaaagtaaacttcgacaagttcccagcaactgcttgtttgtgcatgagtagggcttactaagtgcatagatgtttctacagtgaggtgtcctttttataaggtgcacttttggagtttttctgatgccaatctcaacattgtctttttaatactgtcaccagatattgccatttttctttttgttaaaagattatatgatcaagataaattggggtggtaaatcaggtgcctggtaatttatctctttgcacatgggcatcattttaaaaagcttgcttccactcttttctgtagaatttgacggaacacagctatttccctatgcaaggtacagccttacaaagatttctgcagtgatttgtgtgaagaagagaatgtttgtctttttcaatgaagctttgcagatcaccatgtggttgaaggttttagttgtggacacagtggtccctccttaatgatgaagatcactgccttgggcttcatggaaaacaggcccagcctggggctgcgtttggatttattgtttttattccacacttcctacttggtctctggaagttttaccacatgtaacagattcctttatatgtagtgaaaatcactatttgtagaaactgtcaggtcaaaatatttaactgactgttgacatgtattttcttttttccttgtttttgttttttggggttttctgctttaagatatataccactatgtatatccagttaactgagagaattttgactctcttaataaaactgcattaagtttttgattttgtagaaattagcttttgtctaggcaactagtggttatactctgcaaatattgtaatgaatttttacttttttgatttttgtaataaaaattggtgcagataaaatgtcaaatgaacaaaccagtgttctaagagtgttactaacattttgttctaaaactgtccttcacaaattgaataaaaaactctcacactca

SEQ ID NO: 406098 - DNA, 1267 bp, Homo sapiens
agcgggcgcgctccgctcggcagcctgtgggacgcgaccgcggcgctagtctcgttcctttgtgctgcggcggcggcttctcgagtcctccccgacgcgtcctctaggccagcgagccccgcgctctccggtgacggaccatgtcggcggcgggagcgggcgcgggcgtagaggcgggcttctccagcgaggagctgctctcgctccgtttcccgctgcaccgcgcctgccgcgacggggacctggccacgctctgctcgctgctgcagcagacaccccacgcccacctggcctctgaggactccttctatggctggacgcccgtgcactgggccgcgcatttcggcaagttggagtgcttagtgcagttggtgagagcgggagccacactcaacgtctccaccacacggtacgcgcagacgccagcccacattgcagcctttgggggacatcctcagtgcctggtctggctgattcaagcaggagccaacattaacaaaccggattgtgagggtgaaactcccattcacaaggcagctcgctctgggagcctagaatgcatcagtgcccttgtggcgaatggggctcacgtcgagtaagtgtctttcgtttattctttccagctaaagatgtagttgaggatgttttgtttaaaggcagtacataagcaggcaaaagtcctaaaactttgttttcaaaattagtaatgtaattttgccttttagaacagttggtgttagtgaggaaaattgtgtggactagaataaaagagtttattgaataagaaaaaaaaaaaaaaaaaaaaaaaaaaaaaaaaaaaaaaaaaaaaaaaaaaaaaaaaaaaaaaaaaaaaaaataaaaaaaataaaaaataaaaaataaaaaaataataaaaataaaaaactcttaattttattttttcctcttttcttttcaaatttctttttacttctctattttttaatctcttctttttttattttcttttctcttctctcttcctacattatatcctccctctcttattccctttcctattaaccttccccctttttttatctaatcctttttcctctatcattatttttctcttattttcttctttcattttacttagtctttttctttcttctccttctttactatttctctcttccaactttttttccatatatatttattcattttcttttttcactctctatctttctcttccttctcctcttacatttttttctataaacttctttctacttctcaatatctc

SEQ ID NO: 406099 - DNA, 2102 bp, Homo sapiens
gggaaacacacaggggtgtttagagtttggcgaaaggcaggtgagctctgggcactgacccgtcaccagctatttttcaaggagtctgagaggtgttaacctgcggtctaccccgtgagattgctcagagtgtaggaggatatggtttactagctccggaaagcagctattataactgaggaggaaatgaagcttgactggctagaacagaagcaacaatggaggcccatggagggattttccaggcccctattcctgatctccatggtggcgctgcttcccttattctgcagtcttgctttgagaccagacaattctgtactctgtctgtgccttcttccttctcagcagccctgcctctgccacctgccccagaagggctctgggtcctctcatctcaggacagacaagggtttttgtaattatcttcttgggtaacctccctgtaaggaataggagaggttatctggtcctggtcttttgggagagcattgagaagaaaaagttaaaccagtgggcagcccaggctgcatacatcctgggaatattgcgattattctctccagtaatctacggaaatctactggttgttctgcagaaaaagaattaagagagacaaggagacctgttgtctaagactaaggcaggatgacgtttacctagtaactgatgatgctaggctgaggcactcagtgatttgtctctacatttgtccctgcctacctagccaatctgtccctgtttgggacactggactcccgtgagctggaaggaacagatttaatatctaggggctgggtatccccacatcactcatttggggggtcaagggacccgggcaatatagtattctgctcagtgtctggagatcatctacccaggctggggcttctgggacaggcgaggacccacggaccctggaagagctggtccaggggactgaactcccggcatctttacagagcagagcatgatcacattcctgccgctgctgctggggctcagcctgggctgcacaggagcaggtggcttcgtggcccatgtggaaagcacctgtctgttggatgatgctgggactccaaaggatttcacatactgcatctccttcaacaaggatctgctgacctgctgggatccagaggagaataagatggccccttgcgaatttggggtgctgaatagcttggcgaatgtcctctcacagcacctcaaccaaaaagacaccctgatgcagcgcttgcgcaatgggcttcagaattgtgccacacacacccagcccttctggggatcactgaccaacaggacacggccaccatctgtgcaagtagccaaaaccactccttttaacacgagggagcctgtgatgctggcctgctatgtgtggggcttctatccagcagaagtgactatcacgtggaggaagaacgggaagcttgtcatgcctcacagcagtgcgcacaagactgcccagcccaatggagactggacataccagaccctctcccatttagccttaaccccctcttacggggacacttacacctgtgtggtagagcacattggggctcctgagcccatccttcgggactggacacctgggctgtcccccatgcagaccctgaaggtttctgtgtctgcagtgactctgggcctgggcctcatcatcttctctcttggtgtgatcagctggcggagagctggccactctagttacactcctcttcctgggtccaattattcagaaggatggcacatttcctagaggcagaatcctacaacttccactccaagtgagaaggagattcaaactcaatgatgctaccatgcctctccaacatcttcaaccccctgacattatcttggatcctatggtttctccatccaattctttgaatttcccagtctcccctatgtaaaacttagcaacttgggggacctcattcctgggactatgctgtaaccaaattattgtccaaggctatatttctgggatgaatataatctgaggaagggagttaaagaccctcctggggctctcagtgtgccatagaggacagcaactggtgattgtttcagagaaataaactttggtggaaaatatt

SEQ ID NO: 406100 - DNA, 631 bp, Homo sapiens
gctagacccttggagctgggataaaggaccttttaacccactgagaggtggctgcaataaatggaattgccctgggggtgagcaacagaaactgggtcaagtaagtttctattttttgcagcacctgggctgtcccccatgcagaccctgaaggtttctgtgtctgcagtgactctgggcctgggcctcatcatcttctctcttggtgtgatcagctggcggagagctggccactctagttacactcctcttcctgggtccaattattcagaaggatggcacatttcctagaggcagaatcctacaacttccactccaagtgagaaggagattcaaactcaatgatgctaccatgcctctccaacatcttcaaccccctgacattatcttggatcctatggtttctccatccaattctttgaatttcccagtctcccctatgtaaaacttagcaacttgggggacctcattcctgggactatgctgtaaccaaattattgtccaaggctatatttctgggatgaatataatctgaggaagggagttaaagaccctcctggggctctcagtgtgccatagaggacagcaactggtgattgtttcagagaaataaactttggtggaaaatatt

SEQ ID NO: 406101 - DNA, 654 bp, Homo sapiens
ggggtcagtgttgggttcaactaatcttgattattatatgggtgagcttccatgaggatctaggcaagggcatgatttaagctgccattgctaggattaagagcaggaaggagcatcctcctcttctaccaagtgggatgtctgtggagaggaggctgaaggtgcttcctttgtattagttgttggtgccctggagttttcagtatcactgtattaaggcatgggatggttacagtgacaaacgatgggggcaagttgggttgaagcctcattatctcccttttatttattctgtaggatggcacatttcctagaggcagaatcctacaacttccactccaagtgagaaggagattcaaactcaatgatgctaccatgcctctccaacatcttcaaccccctgacattatcttggatcctatggtttctccatccaattctttgaatttcccagtctcccctatgtaaaacttagcaacttgggggacctcattcctgggactatgctgtaaccaaattattgtccaaggctatatttctgggatgaatataatctgaggaagggagttaaagaccctcctggggctctcagtgtgccatagaggacagcaactggtgattgtttcagagaaataaactttggtggaaaatatt

SEQ ID NO: 406102 - DNA, 1448 bp, Homo sapiens
  misc_feature (1126)..(1126): n is a, c, g, or t
  misc_feature (1138)..(1138): n is a, c, g, or t
  misc_feature (1145)..(1145): n is a, c, g, or t
  misc_feature (1163)..(1163): n is a, c, g, or t
  misc_feature (1174)..(1174): n is a, c, g, or t
  misc_feature (1176)..(1176): n is a, c, g, or t
  misc_feature (1181)..(1181): n is a, c, g, or t
  misc_feature (1189)..(1189): n is a, c, g, or t
  misc_feature (1195)..(1195): n is a, c, g, or t
  misc_feature (1221)..(1221): n is a, c, g, or t
  misc_feature (1243)..(1243): n is a, c, g, or t
  misc_feature (1254)..(1254): n is a, c, g, or t
  misc_feature (1274)..(1274): n is a, c, g, or t
  misc_feature (1290)..(1290): n is a, c, g, or t
  misc_feature (1300)..(1300): n is a, c, g, or t
  misc_feature (1306)..(1306): n is a, c, g, or t
  misc_feature (1318)..(1318): n is a, c, g, or t
  misc_feature (1345)..(1345): n is a, c, g, or t
  misc_feature (1347)..(1347): n is a, c, g, or t
  misc_feature (1350)..(1350): n is a, c, g, or t
  misc_feature (1368)..(1368): n is a, c, g, or t
  misc_feature (1386)..(1386): n is a, c, g, or t
  misc_feature (1439)..(1439): n is a, c, g, or t
gggaaacacacaggggtgtttagagtttggcgaaaggcaggtgagctctgggcactgacccgtcaccagctatttttcaaggagtctgagaggtgttaacctgcggtctaccccgtgagattgctcagagtgtaggaggatatggtttactagctccggaaagcagctattataactgaggaggaaatgaagcttgactggctagaacagaagcaacaatggaggcccatggagggattttccaggcccctattcctgatctccatggtggcgctgcttcccttattctgcagtcttgctttgagaccagacaattctgtactctgtctgtgccttcttccttctcagcagccctgcctctgccacctgccccagaagggctctgggtcctctcatctcaggacagacaagggtttttgtaattatcttcttgggtaacctccctgtaaggaataggagaggttatctggtcctggtcttttgggagagcattgagaagaaaaagttaaaccagtgggcagcccaggctgcatacatcctgggaatattgcgattattctctccagtaatctacggaaatctactggttgttctgcagaaaaagaattaagagagacaaggagacctgttgtctaagactaaggcaggatgacgtttacctagtaactgatgatgctaggctgaggcactcagtgatttgtctctacatttgtccctgcctacctagccaatctgtccctgtttgggacactggactcccgtgagctggaaggaacagatttaatatctaggggctgggtatccccacatcactcatttggggggtcaagggacccgggcaatatagtattctgctcagtgtctggagatcatctacccaggctggggcttctgggacaggcgaggacccacggaccctggaagagctggtccaggggactgaactcccggcatctttacagagcagagcatgatcacattcctgccgctgctgctggggctcagcctgggctgcacaggagcagagacaggtggttttcgtggacccatgtggaaatgcgcactgtctgttgcgcagtgaatgctgggactccaaagaggattttcaccatatctgtattcttcncttacaaacaangggttcntgcgtgtaccctggctgngggattccagnanggagnaataaagnatgggnccccctttgacgcaattttggggggnggctggaaataaactttgggcngaaatggtccntcatcaacaggcacacgtcnaaccaaaaaaaaaaanaacccctganatggcnggcggctctggnggcaaatggggggctattcagaaaatntngtngcccaacaacaacaaccncagggcccctattctggngggaatgcaactggaaccaaaacaaggaacaaccgggcccacccaatccttgntgcagaagg

SEQ ID NO: 406103 - DNA, 283 bp, Homo sapiens
cggaccggcatactggacttctacatctagatgtagaaggtacacaagtagtaggataactcacaggatggatccactggaggttaagacatgtggtaagacagtgtaataggaagctgctcagttggagaaagtaaggaagcaaacattgttaccgtgggggcaatggagaggacagtgaggagccctttatcctgataagggtggctttgaggtaaaggaaggaaagaggatgccttgagaggccccactgtattagagaggacctggaagtccaggatgc

SEQ ID NO: 406104 - DNA, 1251 bp, Homo sapiens
gatctaaggccaccctctcggggagggagttggggaagctgggttggctgggttggtagctcctacctactgtgtggcaagaaggtatgggtcatgaacagaaccaaggagctgcgctgctacagatgttaccacttctgtggctgctaccccactcctgggccgtccctgaaggtggcttcgtggcccatgtggaaagcacctgtctgttggatgatgctgggactccaaaggatttcacatactgcatctccttcaacaaggatctgctgacctgctgggatccagaggagaataagatggccccttgcgaatttggggtgctgaatagcttggcgaatgtcctctcacagcacctcaaccaaaaagacaccctgatgcagcgcttgcgcaatgggcttcagaattgtgccacacacacccagcccttctggggatcactgaccaacaggacacggccaccatctgtgcaagtagccaaaaccactccttttaacacgagggagcctgtgatgctggcctgctatgtgtggggcttctatccagcagaagtgactatcacgtggaggaagaacgggaagcttgtcatgcctcacagcagtgcgcacaagactgcccagcccaatggagactggacataccagaccctctcccatttagccttaaccccctcttacggggacacttacacctgtgtggtagagcacattggggctcctgagcccatccttcgggactggacacctgggctgtcccccatgcagaccctgaaggtttctgtgtctgcagtgactctgggcctgggcctcatcatcttctctcttggtgtgatcagctggcggagagctggccactctagttacactcctcttcctgggtccaattattcagaaggatggcacatttcctagaggcagaatcctacaacttccactccaagtgagaaggagattcaaactcaatgatgctaccatgcctctccaacatcttcaaccccctgacattatcttggatcctatggtttctccatccaattctttgaatttcccagtctcccctatgtaaaacttagcaacttgggggacctcattcctgggactatgctgtaaccaaattattgtccaaggctatatttctgggatgaatataatctgaggaagggagttaaagaccctcctggggctctcagtgtgccatagaggacagcaactggtgattgtttcagagaaataaactttggtggaaaatatt

SEQ ID NO: 406105 - DNA, 1150 bp, Homo sapiens
tcgaatcgagctcgtaccggtgtttatcgatgccagctgctgctggggctcagcctgggctgcacaggagcaggtggcttcgtggcccatgtggaaagcacctgtctgttggatgatgctgggactccaaaggatttcacatactgcatctccttcaacaaggatctgctgacctgctgggatccagaggagaataagatggccccttgcgaatttggggtgctgaatagcttggcgaatgtcctctcacagcacctcaaccaaaaagacaccctgatgcagcgcttgcgcaatgggcttcagaattgtgccacacacacccagcccttctggggatcactgaccaacaggacacggccaccatctgtgcaagtagccaaaaccactccttttaacacgagggagcctgtgatgctggcctgctatgtgtggggcttctatccagcagaagtgactatcacgtggaggaagaacgggaagcttgtcatgcctcacagcagtgcgcacaagactgcccagcccaatggagactggacataccagaccctctcccatttagccttaaccccctcttacggggacacttacacctgtgtggtagagcacattggggctcctgagcccatccttcgggactggacacctgggctgtcccccatgcagaccctgaaggtttctgtgtctgcagtgactctgggcctgggcctcatcatcttctctcttggtgtgatcagctggcggagagctggccactctagttacactcctcttcctgggtccaattattcagaaggatggcacatttcctagaggcagaatcctacaacttccactccaagtgagaaggagattcaaactcaatgatgctaccatgcctctccaacatcttcaaccccctgacattatcttggatcctatggtttctccatccaattctttgaatttcccagtctcccctatgtaaaacttagcaacttgggggacctcattcctgggactatgctgtaaccaaattattgtccaaggctatatttctgggatgaatataatctgaggaagggagttaaagaccctcctggggctctcagtgtgccatagaggacagcaactggtgattgtttcagagaaataaactttggtggaaaatatt

SEQ ID NO: 406106 - DNA, 2048 bp, Homo sapiens
gggaaacacacaggggtgtttagagtttggcgaaaggcaggtgagctctgggcactgacccgtcaccagctatttttcaaggagtctgagaggtgttaacctgcggtctaccccgtgagattgctcagagtgtaggaggatatggtttactagctccggaaagcagctattataactgaggaggaaatgaagcttgactggctagaacagaagcaacaatggaggcccatggagggattttccaggcccctattcctgatctccatggtggcgctgcttcccttattctgcagtcttgctttgagaccagacaattctgtactctgtctgtgccttcttccttctcagcagccctgcctctgccacctgccccagaagggctctgggtcctctcatctcaggacagacaagggtttttgtaattatcttcttgggtaacctccctgtaaggaataggagaggttatctggtcctggtcttttgggagagcattgagaagaaaaagttaaaccagtgggcagcccaggctgcatacatcctgggaatattgcgattattctctccagtaatctacggaaatctactggttgttctgcagaaaaagaattaagagagacaaggagacctgttgtctaagactaaggcaggatgacgtttacctagtaactgatgatgctaggctgaggcactcagtgatttgtctctacatttgtccctgcctacctagccaatctgtccctgtttgggacactggactcccgtgagctggaaggaacagatttaatatctaggggctgggtatccccacatcactcatttggggggtcaagggacccgggcaatatagtattctgctcagtgtctggagatcatctacccaggctggggcttctgggacaggcgaggacccacggaccctggaagagctggtccaggggactgaactcccggcatctttacagagcagagcatgatcacattcctgccgctgctgctggggctcagcctgggctgcacaggagcaggtggcttcgtggcccatgtggaaagcacctgtctgttggatgatgctgggactccaaaggatttcacatactgcatctccttcaacaaggatctgctgacctgctgggatccagaggagaataagatggccccttgcgaatttggggtgctgaatagcttggcgaatgtcctctcacagcacctcaaccaaaaagacaccctgatgcagcgcttgcgcaatgggcttcagaattgtgccacacacacccagcccttctggggatcactgaccaacaggacacggccaccatctgtgcaagtagccggcttctatccagcagaagtgactatcacgtggaggaagaacgggaagcttgtcatgcctcacagcagtgcgcacaagactgcccagcccaatggagactggacataccagaccctctcccatttagccttaaccccctcttacggggacacttacacctgtgtggtagagcacattggggctcctgagcccatccttcgggactggacacctgggctgtcccccatgcagaccctgaaggtttctgtgtctgcagtgactctgggcctgggcctcatcatcttctctcttggtgtgatcagctggcggagagctggccactctagttacactcctcttcctgggtccaattattcagaaggatggcacatttcctagaggcagaatcctacaacttccactccaagtgagaaggagattcaaactcaatgatgctaccatgcctctccaacatcttcaaccccctgacattatcttggatcctatggtttctccatccaattctttgaatttcccagtctcccctatgtaaaacttagcaacttgggggacctcattcctgggactatgctgtaaccaaattattgtccaaggctatatttctgggatgaatataatctgaggaagggagttaaagaccctcctggggctctcagtgtgccatagaggacagcaactggtgattgtttcagagaaataaactttggtggaaaatatt

SEQ ID NO: 406107 - DNA, 1985 bp, Homo sapiens
gggaaacacacaggggtgtttagagtttggcgaaaggcaggtgagctctgggcactgacccgtcaccagctatttttcaaggagtctgagaggtgttaacctgcggtctaccccgtgagattgctcagagtgtaggaggatatggtttactagctccggaaagcagctattataactgaggaggaaatgaagcttgactggctagaacagaagcaacaatggaggcccatggagggattttccaggcccctattcctgatctccatggtggcgctgcttcccttattctgcagtcttgctttgagaccagacaattctgtactctgtctgtgccttcttccttctcagcagccctgcctctgccacctgccccagaagggctctgggtcctctcatctcaggacagacaagggtttttgtaattatcttcttgggtaacctccctgtaaggaataggagaggttatctggtcctggtcttttgggagagcattgagaagaaaaagttaaaccagtgggcagcccaggctgcatacatcctgggaatattgcgattattctctccagtaatctacggaaatctactggttgttctgcagaaaaagaattaagagagacaaggagacctgttgtctaagactaaggcaggatgacgtttacctagtaactgatgatgctaggctgaggcactcagtgatttgtctctacatttgtccctgcctacctagccaatctgtccctgtttgggacactggactcccgtgagctggaaggaacagatttaatatctaggggctgggtatccccacatcactcatttggggggtcaagggacccgggcaatatagtattctgctcagtgtctggagatcatctacccaggctggggcttctgggacaggcgaggacccacggaccctggaagagctggtccaggggactgaactcccggcatctttacagagcagagcatgatcacattcctgccgctgctgctggggctcagcctgggctgcacaggagcaggtggcttcgtggcccatgtggaaagcacctgtctgttggatgatgctgggactccaaaggatttcacatactgcatctccttcaacaaggatctgctgacctgctgggatccagaggagaataagatggccccttgcgaatttggggtgctgaatagcttggcgaatgtcctctcacagcacctcaaccaaaaagacaccctgatgcagcgcttgcgcaatgggcttcagaattgtgccacacacacccagcccttctggggatcactgaccaacaggacacggccaccatctgtgcaagtagccaaaaccactccttttaacacgagggagcctgtgatgctggcctgctatgtgtggggcttctatccagcagaagtgactatcacgtggaggaagaacgggaagcttgtcatgcctcacagcagtgcgcacaagactgcccagcccaatggagactggacataccagaccctctcccatttagccttaaccccctcttacggggacacttacacctgtgtggtagagcacattggggctcctgagcccatccttcgggactggagttacactcctcttcctgggtccaattattcagaaggatggcacatttcctagaggcagaatcctacaacttccactccaagtgagaaggagattcaaactcaatgatgctaccatgcctctccaacatcttcaaccccctgacattatcttggatcctatggtttctccatccaattctttgaatttcccagtctcccctatgtaaaacttagcaacttgggggacctcattcctgggactatgctgtaaccaaattattgtccaaggctatatttctgggatgaatataatctgaggaagggagttaaagaccctcctggggctctcagtgtgccatagaggacagcaactggtgattgtttcagagaaataaactttggtggaaaatatt

SEQ ID NO: 406108 - DNA, 1392 bp, Homo sapiens
gggaaacacacaggggtgtttagagtttggcgaaaggcaggtgagctctgggcactgacccgtcaccagctatttttcaaggagtctgagaggtgttaacctgcggtctaccccgtgagattgctcagagtgtaggaggatatggtttactagctccggaaagcagctattataactgaggaggaaatgaagcttgactggctagaacagaagcaacaatggaggcccatggagggattttccaggcccctattcctgatctccatggtggcgctgcttcccttattctgcagtcttgctttgagaccagacaattctgtactctgtctgtgccttcttccttctcagcagccctgcctctgccacctgccccagaagggctctgggtcctctcatctcaggacagacaagggtttttgtaattatcttcttgggtaacctccctgtaaggaataggagaggttatctggtcctggtcttttgggagagcattgagaagaaaaagttaaaccagtgggcagcccaggctgcatacatcctgggaatattgcgattattctctccagtaatctacggaaatctactggttgttctgcagaaaaagaattaagagagacaaggagacctgttgtctaagactaaggcaggatgacgtttacctagtaactgatgatgctaggctgaggcactcagtgatttgtctctacatttgtccctgcctacctagccaatctgtccctgtttgggacactggactcccgtgagctggaaggaacagatttaatatctaggggctgggtatccccacatcactcatttggggggtcaagggacccgggcaatatagtattctgctcagtgtctggagatcatctacccaggctggggcttctgggacaggcgaggacccacggaccctggaagagctggtccaggggactgaactcccggcatctttacagagcagagcatgatcacattcctgccgctgctgctggggctcagcctgggctgcacaggagcaggtggcttcgtggcccatgtggaaagcacctgtctgttggatgatgctgggactccaaaggatttcacatactgcatctccttcaacaaggatctgctgacctgctgggatccagaggagaataagatggccccttgcgaatttggggtgctgaatagcttggcgaatgtcctctcacagcacctcaaccaaaaagacaccctgatgcagcgcttgcgcaatgggcttcagaattgtgccacacacacccagcccttctggggatcactgaccaacaggacacgtgaggagagaggggtgcagaggggctaccaggaagtgcagttaggagggcaggccagggaggatcccacagtggcccaggggtt

SEQ ID NO: 406109 - DNA, 1211 bp, Homo sapiens
ctctctccacactggccagcaagaaacaacacttcccacaaggggaaacctggttacagcagctgatctgagatcctgttctctggccctttgtagacacccttcctcttcctcatttcttcctctttcttttccaagagtccgcaattacttttgcaccagtttaatatttagtctgtgctattgctgctctggtggtgtggttgatgttgctgcgtctatgtttgagggtgagaggggagcgtgcttgctttgaaatgaggatgtaaatttggcaatcatattttcagaaccccaaattgtaatacactattctagcctccttagatttcaactattctggtgccagaagcagatgggagctgaaggaatgatgaaggttgaagaaggggggcttttcttggtgtggggcagtactgcatttggcctgctctaccaagcatacgggagtagtaaagccacggctggcagaccatttggcatgcatgctcaggggccagtggataaagaattacttacagttcaaacactgtttgaactcagtgtcgggagtagttaaaggtatcgtgagaagttgcacacagctttggggactcttggaaaagaaagaggaagaaatgaggaagaggaagggtgtctacaaagggccagagaacaggatctcagatcagctgctgtaaccaggtttccccttgtgggaagtgttgtttcttgctgggcagttgggaagggaatggagaacagagaagagagtggaaatcacatgctcacttgaactttcctggggaacgtctcctcacagcgtgcacaagagcctccctttagaaatggagtgttcattttatcatgggaaaagaatctgagtgggacatgattcagaacaggaccggcccaaggaagtgcaggggctgtggagtgggatggagacaagctctgaaaggacacatgggagatctagatgtagaaggtacacaagtagtaggataactcacaggatggatccactggaggttaagacatgtggtaagacagtgtaataggaagctgctcagttggagaaagtaaggaagcaaacattgttaccgtgggggcaatggagaggacagtgaggagccctttatcctgataagggtggctttgaggtaaaggaaggaaagaggatgccttgagaggccccactgtattagagaggacctggaagtccaggatgc

SEQ ID NO: 406110 - DNA, 475 bp, Homo sapiens
cagtgaggagccctttatcctgataagggtggctttgaggtaaaggaaggaaagaggatgccttgagaggccccactgtattagagaggacctggaagtccaggatgctaattctggggagatggattccccaggcttactctaggagtagaggtccatgggacgagggtttgatttgagaaagatcattttcttgggagtgggtggtgtgagctagacccttggagctgggataaaggaccttttaacccactgagaggtggctgcaataaatggaattgccctgggggtgagcaacagaaactgggtcaagtaagtttctattttttgcagcacctgggctgtcccccatgcagaccctgaaggtttctgtgtctgcagtgactctgggcctgggcctcatcatcttctctcttggtgtgatcagctggcggagagctggccactctagtgagtgactcgctgaactcccatc

SEQ ID NO: 406111 - DNA, 1949 bp, Homo sapiens
gggaaacacacaggggtgtttagagtttggcgaaaggcaggtgagctctgggcactgacccgtcaccagctatttttcaaggagtctgagaggtgttaacctgcggtctaccccgtgagattgctcagagtgtaggaggatatggtttactagctccggaaagcagctattataactgaggaggaaatgaagcttgactggctagaacagaagcaacaatggaggcccatggagggattttccaggcccctattcctgatctccatggtggcgctgcttcccttattctgcagtcttgctttgagaccagacaattctgtactctgtctgtgccttcttccttctcagcagccctgcctctgccacctgccccagaagggctctgggtcctctcatctcaggacagacaagggtttttgtaattatcttcttgggtaacctccctgtaaggaataggagaggttatctggtcctggtcttttgggagagcattgagaagaaaaagttaaaccagtgggcagcccaggctgcatacatcctgggaatattgcgattattctctccagtaatctacggaaatctactggttgttctgcagaaaaagaattaagagagacaaggagacctgttgtctaagactaaggcaggatgacgtttacctagtaactgatgatgctaggctgaggcactcagtgatttgtctctacatttgtccctgcctacctagccaatctgtccctgtttgggacactggactcccgtgagctggaaggaacagatttaatatctaggggctgggtatccccacatcactcatttggggggtcaagggacccgggcaatatagtattctgctcagtgtctggagatcatctacccaggctggggcttctgggacaggcgaggacccacggaccctggaagagctggtccaggggactgaactcccggcatctttacagagcagagcatgatcacattcctgccgctgctgctggggctcagcctgggctgcacaggagcaggtggcttcgtggcccatgtggaaagcacctgtctgttggatgatgctgggactccaaaggatttcacatactgcatctccttcaacaaggatctgctgacctgctgggatccagaggagaataagatggccccttgcgaatttggggtgctgaatagcttggcgaatgtcctctcacagcacctcaaccaaaaagacaccctgatgcagcgcttgcgcaatgggcttcagaattgtgccacacacacccagcccttctggggatcactgaccaacaggacacggccaccatctgtgcaagtagccaaaaccactccttttaacacgagggagcctgtgatgctggcctgctatgtgtggggcttctatccagcagaagtgactatcacgtggaggaagaacgggaagcttgtcatgcctcacagcagtgcgcacaagactgcccagcccaatggagactggacataccagaccctctcccatttagccttaaccccctcttacggggacacttacacctgtgtggtagagcacattggggctcctgagcccatccttcgggactggagatggcacatttcctagaggcagaatcctacaacttccactccaagtgagaaggagattcaaactcaatgatgctaccatgcctctccaacatcttcaaccccctgacattatcttggatcctatggtttctccatccaattctttgaatttcccagtctcccctatgtaaaacttagcaacttgggggacctcattcctgggactatgctgtaaccaaattattgtccaaggctatatttctgggatgaatataatctgaggaagggagttaaagaccctcctggggctctcagtgtgccatagaggacagcaactggtgattgtttcagagaaataaactttggtggaaaatatt

SEQ ID NO: 406112 - DNA, 1314 bp, Homo sapiens
gatctaaggccaccctctcggggagggagttggggaagctgggttggctgggttggtagctcctacctactgtgtggcaagaaggtatgggtcatgaacagaaccaaggagctgcgctgctacagatgttaccacttctgtggctgctaccccactcctgggccgtccctgaagagcagagcatgatcacattcctgccgctgctgctggggctcagcctgggctgcacaggagcaggtggcttcgtggcccatgtggaaagcacctgtctgttggatgatgctgggactccaaaggatttcacatactgcatctccttcaacaaggatctgctgacctgctgggatccagaggagaataagatggccccttgcgaatttggggtgctgaatagcttggcgaatgtcctctcacagcacctcaaccaaaaagacaccctgatgcagcgcttgcgcaatgggcttcagaattgtgccacacacacccagcccttctggggatcactgaccaacaggacacggccaccatctgtgcaagtagccaaaaccactccttttaacacgagggagcctgtgatgctggcctgctatgtgtggggcttctatccagcagaagtgactatcacgtggaggaagaacgggaagcttgtcatgcctcacagcagtgcgcacaagactgcccagcccaatggagactggacataccagaccctctcccatttagccttaaccccctcttacggggacacttacacctgtgtggtagagcacattggggctcctgagcccatccttcgggactggacacctgggctgtcccccatgcagaccctgaaggtttctgtgtctgcagtgactctgggcctgggcctcatcatcttctctcttggtgtgatcagctggcggagagctggccactctagttacactcctcttcctgggtccaattattcagaaggatggcacatttcctagaggcagaatcctacaacttccactccaagtgagaaggagattcaaactcaatgatgctaccatgcctctccaacatcttcaaccccctgacattatcttggatcctatggtttctccatccaattctttgaatttcccagtctcccctatgtaaaacttagcaacttgggggacctcattcctgggactatgctgtaaccaaattattgtccaaggctatatttctgggatgaatataatctgaggaagggagttaaagaccctcctggggctctcagtgtgccatagaggacagcaactggtgattgtttcagagaaataaactttggtggaaaatatt

SEQ ID NO: 406113 - DNA, 1035 bp, Homo sapiens
ggtgtagtacgtgccctgtgccggtcatgtaccgcagcatgacgaagaggagggagactaggatcgatggccacagcatcaatcgacacctgcaatgaatacaatgtccattatggtgggggtggaggtctccattctgccatccggccatccatacattcctggaacaggctctgcaatggtggtagtatgcattgtggtggaggggtgaacattcgtgtccactgaccaacacgacacggccaccatctgtgcaagtagccaaaaccactccttttaacacgagggagcctgtgatgctggcctgctatgtgtggggcttctatccagcagaagtgactatcacgtggaggaagaacgggaagcttgtcatgcctcacagcagtgcgcacaagactgcccagcccaatggagactggacataccagaccctctcccatttagccttaaccccctcttacggggacacttacacctgtgtggtagagcacattggggctcctgagcccatccttcgggactggacacctgggctgtcccccatgcagaccctgaaggtttctgtgtctgcagtgactctgggcctgggcctcatcatcttctctcttggtgtgatcagctggcggagagctggccactctagttacactcctcttcctgggtccaattattcagaaggatggcacatttcctagaggcagaatcctacaacttccactccaagtgagaaggagattcaaactcaatgatgctaccatgcctctccaacatcttcaaccccctgacattatcttggatcctatggtttctccatccaattctttgaatttcccagtctcccctatgtaaaacttagcaacttgggggacctcattcctgggactatgctgtaaccaaattattgtccaaggctatatttctgggatgaatataatctgaggaagggagttaaagaccctcctggggctctcagtgtgccatagaggacagcaactggtgattgtttcagagaaataaactttggtggaaaatatt

SEQ ID NO: 406114 - DNA, 2066 bp, Homo sapiens
gggaaacacacaggggtgtttagagtttggcgaaaggcaggtgagctctgggcactgacccgtcaccagctatttttcaaggagtctgagaggtgttaacctgcggtctaccccgtgagattgctcagagtgtaggaggatatggtttactagctccggaaagcagctattataactgaggaggaaatgaagcttgactggctagaacagaagcaacaatggaggcccatggagggattttccaggcccctattcctgatctccatggtggcgctgcttcccttattctgcagtcttgctttgagaccagacaattctgtactctgtctgtgccttcttccttctcagcagccctgcctctgccacctgccccagaagggctctgggtcctctcatctcaggacagacaagggtttttgtaattatcttcttgggtaacctccctgtaaggaataggagaggttatctggtcctggtcttttgggagagcattgagaagaaaaagttaaaccagtgggcagcccaggctgcatacatcctgggaatattgcgattattctctccagtaatctacggaaatctactggttgttctgcagaaaaagaattaagagagacaaggagacctgttgtctaagactaaggcaggatgacgtttacctagtaactgatgatgctaggctgaggcactcagtgatttgtctctacatttgtccctgcctacctagccaatctgtccctgtttgggacactggactcccgtgagctggaaggaacagatttaatatctaggggctgggtatccccacatcactcatttggggggtcaagggacccgggcaatatagtattctgctcagtgtctggagatcatctacccaggctggggcttctgggacaggcgaggacccacggaccctggaagagctggtccaggggactgaactcccggcatctttacagagcagagcatgatcacattcctgccgctgctgctggggctcagcctgggctgcacaggagcaggtggcttcgtggcccatgtggaaagcacctgtctgttggatgatgctgggactccaaaggatttcacatactgcatctccttcaacaaggatctgctgacctgctgggatccagaggagaataagatggccccttgcgaatttggggtgctgaatagcttggcgaatgtcctctcacagcacctcaaccaaaaagacaccctgatgcagcgcttgcgcaatgggcttcagaattgtgccacacacacccagcccttctggggatcactgaccaacaggacacggccaccatctgtgcaagtagccaaaaccactccttttaacacgagggagcctgtgatgctggcctgctatgtgtggggcttctatccagcagaagtgactatcacgtggaggaagaacgggaagcttgtcatgcctcacagcagtgcgcacaagactgcccagcccaatggagactggacataccagaccctctcccatttagccttaaccccctcttacggggacacttacacctgtgtggtagagcacattggggctcctgagcccatccttcgggactggacacctgggctgtcccccatgcagaccctgaaggtttctgtgtctgcagtgactctgggcctgggcctcatcatcttctctcttggtgtgatcagctggcggagagctggccactctagatggcacatttcctagaggcagaatcctacaacttccactccaagtgagaaggagattcaaactcaatgatgctaccatgcctctccaacatcttcaaccccctgacattatcttggatcctatggtttctccatccaattctttgaatttcccagtctcccctatgtaaaacttagcaacttgggggacctcattcctgggactatgctgtaaccaaattattgtccaaggctatatttctgggatgaatataatctgaggaagggagttaaagaccctcctggggctctcagtgtgccatagaggacagcaactggtgattgtttcagagaaataaactttggtggaaaatatt

SEQ ID NO: 406115 - DNA, 2161 bp, Homo sapiens
ccgggccccgtcctagttcaatcaatcaagaaaatcaagagtacgaaggccttgtgcggtctggacggtctttccacgtctcaggtgcagttaagccagtcacactccatccacctacccgccatgaaaaattatttgttcagcaggaattgccaagtcaaatacagccatataaagccccccttcgacgtgccaggtgtgcctccggagagcagccaccaaaaccaccagcagcccgtccgcgccgggaaatgcgccctcgctggcttacggggccactcagacagttctaagtgcctttccctgtaacgcagaggcacacctgccttccctcgggaaacagcggcccgacgtgcgcccgcaacgcgtaaagcgtcaacagctgaaaccctcggaatcctccccgaacagaaacaaccaccgctgccagctgcgcgctcgggggaaaagacgttgcgcccccgccgactgccggtttcccgggcgcgagcccggatccaggtggtcagtcccggtacgcaaccacggcgagaacccggccctgctaagggagaagggaagccgtttcccgcgggcttcatacagacacggtgctaagacagcccgagtcgcggaccagtccaacaggcaggcagatcagtgggcagcccgcgtgcgcgaggaccccgatggcggcgccgggtggcgggaaggaggaagtttcaaagccagcttgacctggttgtggccgttgggcgagatgaagctacactgtgaggtggaggtgatcagccggcacttgcccgccttggggcttaggaaccggggcaagggcgtccgagccgtgttgagcctctgtcagcagacttccaggagtcagccgccggtccgagccttcctgctcatctccaccctgaaggacaagcgcgggacccgctatgagctaagggagaacattgagcaattcttcaccaaatttgtagatgaggggaaagccactgttcggttaaaggagcctcctgtggatatctgtctaagtaaggccatttccagcagtttaaaaggtttcctttcagctatgagactggctcatagaggctgtaatgttgatacaccagtttcaacgctcacaccagtgaagacttcagaatttgaaaactttaaaactaaaatggttatcacatccaaaaaagactatcctctaagtaagaattttccatattccttggaacatcttcagacttcttactgtgggcttgtccgagttgatatgcgtatgctttgcttaaaaagccttaggaaattagacttgagtcacaaccatataaaaaagcttccagctacaattggagacctcatacaccttcaagaacttaacctgaatgacaatcacttggagtcatttagtgtagccttgtgtcattctacactccagaagtcacttcggagtttggacctcagcaagaacaaaatcaaggcactccctgtgcagttttgccagctccaggaacttaagaatttaaaacttgacgataatgaattgattcaatttccttgcaagataggacaactaataaaccttcgctttttgtcagcagctcgaaataagcttccatttttgcctagtgaatttagaaatttatcccttgaatacttggatctttttggaaatacttttgaacaaccaaaagtccttccagtaataaagctgcaagcaccattaactttattggaatcttctgcacgaaccatattacataataggattccatatggctctcatatcattccattccatctctgccaagatttggataccgcaaaaatttgtgtttgtggaagattctgtctgaactctttcattcaaggaactactaccatgaatctgcattctgttgcccacactgtggtcttagtagataatttgggtggtactgaagcacctattatctcttatttctgttctctaggctgttatgttaattcctctgatatgttaaagtaatgggtgagaccagaaaaagaaatttcaataacagatcagtttggggtgcatgtatgattttgcagcgtcaaattggagtaagggaagatttctgtatacttgctggagaggaggaatgtgtatagttactcatttagatgactccaaaacttttattaaaaccaattttagttttac

SEQ ID NO: 406116 - DNA, 1599 bp, Homo sapiens
  misc_feature (1459)..(1459): n is a, c, g, or t
  misc_feature (1464)..(1464): n is a, c, g, or t
  misc_feature (1468)..(1468): n is a, c, g, or t
  misc_feature (1472)..(1472): n is a, c, g, or t
ccgggccccgtcctagttcaatcaatcaagaaaatcaagagtacgaaggccttgtgcggtctggacggtctttccacgtctcaggtgcagttaagccagtcacactccatccacctacccgccatgaaaaattatttgttcagcaggaattgccaagtcaaatacagccatataaagccccccttcgacgtgccaggtgtgcctccggagagcagccaccaaaaccaccagcagcccgtccgcgccgggaaatgcgccctcgctggcttacggggccactcagacagttctaagtgcctttccctgtaacgcagaggcacacctgccttccctcgggaaacagcggcccgacgtgcgcccgcaacgcgtaaagcgtcaacagctgaaaccctcggaatcctccccgaacagaaacaaccaccgctgccagctgcgcgctcgggggaaaagacgttgcgcccccgccgactgccggtttcccgggcgcgagcccggatccaggtggtcagtcccggtacgcaaccacggcgagaacccggccctgctaagggagaagggaagccgtttcccgcgggcttcatacagacacggtgctaagacagcccgagtcgcggaccagtccaacaggcaggcagatcagtgggcagcccgcgtgcgcgaggaccccgatggcggcgccgggtggcgggaaggaggaagtttcaaagccagcttgacctggttgtggccgttgggcgagatgaagctacactgtgaggtggaggtgatcagccggcacttgcccgccttggggcttaggaaccggggcaagggcgtccgagccgtgttgagcctctgtcagcagacttccaggagtcagccgccggtccgagccttcctgctcatctccaccctgaaggacaagcgcgggacccgctatgagctaagggagaacattgagcaattcttcaccaaatttgtagatgaggggaaagccactgttcggttaaaggagcctcctgtggatatctgtctaagtaaggattccatatggctctcatatcattccattccatctctgccaagatttggataccgcaaaaatttgtgtttgtggaagattctgtctgaactctttcattcaaggaactactaccatgaatctgcattctgttgcccacactgtggtcttagtagataatttgggtggtactgaagcacctattatctcttatttctgttctctaggctgttatgttaattcctctgatatgttaaagtaatgggtgagaccagaaaaagaaatttcaataacagatcagtttggggtgcatgtatgattttgcagcgtcaaattggagtaagggaagatttctgtatacttgctggagaggaggaatgtgtatagttactcatttagatgactccaaaacttttattaaaaccaattttagttttacaaaaaaaaaaaggggggggntaaanaatnctgngggccaagttagcgtacccggtttggaaaaggggcctataggggggataaagaggcagggggcgttaacggggggggaaggctggatttggagacctttggggcaatggacccacagataatccgaa

SEQ ID NO: 406117 - DNA, 958 bp, Homo sapiens
tgaggcagaagaattgcttgaacccaggaggcagagattgcagtgagagcgcgcaccactgcactctagcctgggtgtcaaagcgagactctgtctcaaaaagtaaaaatcaaaagtttgacttgggcaccactgaagggttttaagtgtgagagtgaaatgccttaagcaaggtaaggttagccttacttgcccagccactaaagtaaaactcatgtcccaagtgacatgtattttaaatttgtcttagagagtttaagtttcccttttgaacaattgatccctggaagagcctatttaaaggacaggtgactttttcattccatttagggagttatgctattaagtggttgtgctggaagatattttatggtgtggtatctgaagtttacaatatgtcatatattgttttttagtatattttaaatatactaatcgcttaataattttacttttcattgttaaaattccatgtcctaataattcatgtcctgaatctagtaacatgttataaaatatttttatcattctttccaataggattccatatggctctcatatcattccattccatctctgccaagatttggataccgcaaaaatttgtgtttgtggaagattctgtctgaactctttcattcaaggaactactaccatgaatctgcattctgttgcccacactgtggtcttagtagataatttgggtggtactgaagcacctattatctcttatttctgttctctaggctgttatgttaattcctctgatatgttaaagtaatgggtgagaccagaaaaagaaatttcaataacagatcagtttggggtgcatgtatgattttgcagcgtcaaattggagtaagggaagatttctgtatacttgctggagaggaggaatgtgtatagttactcatttagatgactccaaaacttttattaaaaccaattttagttttac

SEQ ID NO: 406118 - DNA, 2228 bp, Homo sapiens
ccgggccccgtcctagttcaatcaatcaagaaaatcaagagtacgaaggccttgtgcggtctggacggtctttccacgtctcaggtgcagttaagccagtcacactccatccacctacccgccatgaaaaattatttgttcagcaggaattgccaagtcaaatacagccatataaagccccccttcgacgtgccaggtgtgcctccggagagcagccaccaaaaccaccagcagcccgtccgcgccgggaaatgcgccctcgctggcttacggggccactcagacagttctaagtgcctttccctgtaacgcagaggcacacctgccttccctcgggaaacagcggcccgacgtgcgcccgcaacgcgtaaagcgtcaacagctgaaaccctcggaatcctccccgaacagaaacaaccaccgctgccagctgcgcgctcgggggaaaagacgttgcgcccccgccgactgccggtttcccgggcgcgagcccggatccaggtggtcagtcccggtacgcaaccacggcgagaacccggccctgctaagggagaagggaagccgtttcccgcgggcttcatacagacacggtgctaagacagcccgagtcgcggaccagtccaacaggcaggcagatcagtgggcagcccgcgtgcgcgaggaccccgatggcggcgccgggtggcgggaaggaggaagtttcaaagccagcttgacctggttgtggccgttgggcgagatgaagctacactgtgaggtggaggtgatcagccggcacttgcccgccttggggcttaggaaccggggcaagggcgtccgagccgtgttgagcctctgtcagcagacttccaggagtcagccgccggtccgagccttcctgctcatctccaccctgaaggacaagcgcgggacccgctatgagctaagggagaacattgagcaattcttcaccaaatttgtagatgaggggaaagccactgttcggttaaaggagcctcctgtggatatctgtctaagtaagatggagtctcattctgtcagccaggttggagtgcagtgggaagagcttggttcactgcaacccacaggccatttccagcagtttaaaaggtttcctttcagctatgagactggctcatagaggctgtaatgttgatacaccagtttcaacgctcacaccagtgaagacttcagaatttgaaaactttaaaactaaaatggttatcacatccaaaaaagactatcctctaagtaagaattttccatattccttggaacatcttcagacttcttactgtgggcttgtccgagttgatatgcgtatgctttgcttaaaaagccttaggaaattagacttgagtcacaaccatataaaaaagcttccagctacaattggagacctcatacaccttcaagaacttaacctgaatgacaatcacttggagtcatttagtgtagccttgtgtcattctacactccagaagtcacttcggagtttggacctcagcaagaacaaaatcaaggcactccctgtgcagttttgccagctccaggaacttaagaatttaaaacttgacgataatgaattgattcaatttccttgcaagataggacaactaataaaccttcgctttttgtcagcagctcgaaataagcttccatttttgcctagtgaatttagaaatttatcccttgaatacttggatctttttggaaatacttttgaacaaccaaaagtccttccagtaataaagctgcaagcaccattaactttattggaatcttctgcacgaaccatattacataataggattccatatggctctcatatcattccattccatctctgccaagatttggataccgcaaaaatttgtgtttgtggaagattctgtctgaactctttcattcaaggaactactaccatgaatctgcattctgttgcccacactgtggtcttagtagataatttgggtggtactgaagcacctattatctcttatttctgttctctaggctgttatgttaattcctctgatatgttaaagtaatgggtgagaccagaaaaagaaatttcaataacagatcagtttggggtgcatgtatgattttgcagcgtcaaattggagtaagggaagatttctgtatacttgctggagaggaggaatgtgtatagttactcatttagatgactccaaaacttttattaaaaccaattttagttttac

SEQ ID NO: 406119 - DNA, 1426 bp, Homo sapiens
aaaaacctatatgtgtggaacaaggacagaaactagcaaaagagataggagcatgctgctatgtggaatgttcagctttaacccagaagggattgaagactgtttttgatgaggctatcatagccattttaactccaaagaaacacactgtaaaaaaaaaagaataggatcaagatgtataaactgttgtttaattacgtgagaaacatcttcagtggccaaggaaactgtccatttctctcagaaagcaaatgaaatgctgcagctatacccagaccttttataggccatttccagcagtttaaaaggtttcctttcagctatgagactggctcatagaggctgtaatgttgatacaccagtttcaacgctcacaccagtgaagacttcagaatttgaaaactttaaaactaaaatggttatcacatccaaaaaagactatcctctaagtaagaattttccatattccttggaacatcttcagacttcttactgtgggcttgtccgagttgatatgcgtatgctttgcttaaaaagccttaggaaattagacttgagtcacaaccatataaaaaagcttccagctacaattggagacctcatacaccttcaagaacttaacctgaatgacaatcacttggagtcatttagtgtagccttgtgtcattctacactccagaagtcacttcggagtttggacctcagcaagaacaaaatcaaggcactccctgtgcagttttgccagctccaggaacttaagaatttaaaacttgacgataatgaattgattcaatttccttgcaagataggacaactaataaaccttcgctttttgtcagcagctcgaaataagcttccatttttgcctagtgaatttagaaatttatcccttgaatacttggatctttttggaaatacttttgaacaaccaaaagtccttccagtaataaagctgcaagcaccattaactttattggaatcttctgcacgaaccatattacataataggattccatatggctctcatatcattccattccatctctgccaagatttggataccgcaaaaatttgtgtttgtggaagattctgtctgaactctttcattcaaggaactactaccatgaatctgcattctgttgcccacactgtggtcttagtagataatttgggtggtactgaagcacctattatctcttatttctgttctctaggctgttatgttaattcctctgatatgttaaagtaatgggtgagaccagaaaaagaaatttcaataacagatcagtttggggtgcatgtatgattttgcagcgtcaaattggagtaagggaagatttctgtatacttgctggagaggaggaatgtgtatagttactcatttagatgactccaaaacttttattaaaaccaattttagttttac

SEQ ID NO: 406120 - DNA, 218 bp, Homo sapiens
ctggcacattctagttgtaataaatgttactgagtaacaataattagttttcttcttttttttctattggttttatgcagctaagggagaacattgagcaattcttcaccaaatttgtagatgaggggaaagccactgttcggttaaaggagcctcctgtggatatctgtctaagtaaggtatggtattaaaaacattaatgattaatatttggctgt

SEQ ID NO: 406121 - DNA, 1439 bp, Homo sapiens
ccgggccccgtcctagttcaatcaatcaagaaaatcaagagtacgaaggccttgtgcggtctggacggtctttccacgtctcaggtgcagttaagccagtcacactccatccacctacccgccatgaaaaattatttgttcagcaggaattgccaagtcaaatacagccatataaagccccccttcgacgtgccaggtgtgcctccggagagcagccaccaaaaccaccagcagcccgtccgcgccgggaaatgcgccctcgctggcttacggggccactcagacagttctaagtgcctttccctgtaacgcagaggcacacctgccttccctcgggaaacagcggcccgacgtgcgcccgcaacgcgtaaagcgtcaacagctgaaaccctcggaatcctccccgaacagaaacaaccaccgctgccagctgcgcgctcgggggaaaagacgttgcgcccccgccgactgccggtttcccgggcgcgagcccggatccaggtggtcagtcccggtacgcaaccacggcgagaacccggccctgctaagggagaagggaagccgtttcccgcgggcttcatacagacacggtgctaagacagcccgagtcgcggaccagtccaacaggcaggcagatcagtgggcagcccgcgtgcgcgaggaccccgatggcggcgccgggtggcgggaaggaggaagtttcaaagccagcttgacctggttgtggccgttgggcgagatgaagctacactgtgaggtggaggtgatcagccggcacttgcccgccttggggcttaggaaccggggcaagggcgtccgagccgtgttgagcctctgtcagcagacttccaggagtcagccgccggtccgagccttcctgctcatctccaccctgaaggacaagcgcgggacccgctatgagctaagggagaacattgagcaattcttcaccaaatttgtagatgaggggaaagccactgttcggttaaaggagcctcctgtggatatctgtctaagtaaggattccatatggctctcatatcattccattccatctctgccaagatttggataccgcaaaaatttgtgtttgtggaagattctgtctgaactctttcattcaaggaactactaccatgaatctgcattctgttgcccacactgtggtcttagtagataatttgggtggtactgaagcacctattatctcttatttctgttctctaggctgttatgttaattcctctgatatgttaaagtaatgggtgagaccagaaaaagaaatttcaataacagatcagtttggggtgcatgtatgattttgcagcgtcaaattggagtaagggaagatttctgtatacttgctggagaggaggaatgtgtatagttactcatttagatgactccaaaacttttattaaaaccaattttagttttac

SEQ ID NO: 406122 - DNA, 1314 bp, Homo sapiens
ccgggccccgtcctagttcaatcaatcaagaaaatcaagagtacgaaggccttgtgcggtctggacggtctttccacgtctcaggtgcagttaagccagtcacactccatccacctacccgccatgaaaaattatttgttcagcaggaattgccaagtcaaatacagccatataaagccccccttcgacgtgccaggtgtgcctccggagagcagccaccaaaaccaccagcagcccgtccgcgccgggaaatgcgccctcgctggcttacggggccactcagacagttctaagtgcctttccctgtaacgcagaggcacacctgccttccctcgggaaacagcggcccgacgtgcgcccgcaacgcgtaaagcgtcaacagctgaaaccctcggaatcctccccgaacagaaacaaccaccgctgccagctgcgcgctcgggggaaaagacgttgcgcccccgccgactgccggtttcccgggcgcgagcccggatccaggtggtcagtcccggtacgcaaccacggcgagaacccggccctgctaagggagaagggaagccgtttcccgcgggcttcatacagacacggtgctaagacagcccgagtcgcggaccagtccaacaggcaggcagatcagtgggcagcccgcgtgcgcgaggaccccgatggcggcgccgggtggcgggaaggaggaagtttcaaagccagcttgacctggttgtggccgttgggcgagatgaagctacactgtgaggtggaggtgatcagccggcacttgcccgccttggggcttaggaaccggggcaagggcgtccgagccgtgttgagcctctgtcagcagacttccaggagtcagccgccggtccgagccttcctgctcatctccaccctgaaggacaagcgcgggacccgctatgaggtgcgtgaagtgggcaggccctgtcagtctcgcgttcttcttggaagccgagacgcgggccaccctcggtcctcatgctcccggctgctccctaggcgaaagcccgccttgggggttcctgaactcccagccttgagacctaccatcagcccgaccccagggtcctgtgcgtcttcctacggacccgaaagaagaaagctttgagagtgtaccttttcgctatttttcctccccacttttacgactttgaatttacagtgttgctatttagtagtggatggcaatcccgcctgtttcaagtttctgaaattttgcgtgaaacaagcgcaaatgaagcagctgtccagttggggaacagtaaaataactgcagttctgttcagtgaaaaaaaa

SEQ ID NO: 406123 - DNA, 1883 bp, Homo sapiens
ccgggccccgtcctagttcaatcaatcaagaaaatcaagagtacgaaggccttgtgcggtctggacggtctttccacgtctcaggtgcagttaagccagtcacactccatccacctacccgccatgaaaaattatttgttcagcaggaattgccaagtcaaatacagccatataaagccccccttcgacgtgccaggtgtgcctccggagagcagccaccaaaaccaccagcagcccgtccgcgccgggaaatgcgccctcgctggcttacggggccactcagacagttctaagtgcctttccctgtaacgcagaggcacacctgccttccctcgggaaacagcggcccgacgtgcgcccgcaacgcgtaaagcgtcaacagctgaaaccctcggaatcctccccgaacagaaacaaccaccgctgccagctgcgcgctcgggggaaaagacgttgcgcccccgccgactgccggtttcccgggcgcgagcccggatccaggtggtcagtcccggtacgcaaccacggcgagaacccggccctgctaagggagaagggaagccgtttcccgcgggcttcatacagacacggtgctaagacagcccgagtcgcggaccagtccaacaggcaggcagatcagtgggcagcccgcgtgcgcgaggaccccgatggcggcgccgggtggcgggaaggaggaagtttcaaagccagcttgacctggttgtggccgttgggcgagatgaagctacactgtgaggtggaggtgatcagccggcacttgcccgccttggggcttaggaaccggggcaagggcgtccgagccgtgttgagcctctgtcagcagacttccaggagtcagccgccggtccgagccttcctgctcatctccaccctgaaggacaagcgcgggacccgctatgagctaagggagaacattgagcaattcttcaccaaatttgtagatgaggggaaagccactgttcggttaaaggagcctcctgtggatatctgtctaagtaaggccatttccagcagtttaaaaggtttcctttcagctatgagactggctcatagaggctgtaatgttgatacaccagtttcaacgctcacaccagtgaagacttcagaatttgaaaactttaaaactaaaatggttatcacatccaaaaaagactatcctctaagtaagaattttccatattccttggaacatcttcagacttcttactgtgggcttgtccgagttgatatgcgtatgctttgcttaaaaagccttaggaaattagacttgagtcacaaccatataaaaaagcttccagctacaattggagacctcatacaccttcaagaacttaacctgaatgacaatcacttggagtcatttagtgtagccttgtgtcattctacactccagaagtcacttcggagtttggacctcagcaagaacaaaatcaaggcactccctgtgcagttttgccagctccaggaacttaagaatttaaaacttgacgataatgaattgattcaatttccttgcaagataggacaactaataaaccttcgctttttgtcagcagctcgaaataagcttccatttttgcctagtgaatttagaaatttatcccttgaatacttggatctttttggaaatacttttgaacaaccaaaagtccttccagtaataaagctgcaagcaccattaactttattggaatcttctgcacgaaccatattacataataggtaagattttaatagtcatgtaatgtggtgtctttgatagcattctaatattcctatcaaactcagagtaataaagtctaacattgcttacagtgctatgcacagtctgaccctttgctataatggtcttcttgttcctt

SEQ ID NO: 406124 - DNA, 1053 bp, Homo sapiens
gtcttgaactcctgaccttaggtgatccacccttctcagcctcccaaagtgctgggattacgggcgtgccaatgtgcccagtctagcttttttggtcttgtttttttgtttctgagacaggattttgtgttttttttctgtctcagacagctctgttgcccagactggagtgcagtggcatgatcacagctcactgcagccttgacttgttgggctcaagtgatcctcccacctcagtcttctgagtagctaggaccccaggcatgcaccaccatgcctagctaacattttcgaagagacgggggtctccctttgttgttcaggctggtctcagtcaaactcctgggctcaagcgatccctgtctttgcctcccagggtgttaggattacaggcatgagccacgtacctagtggtcttctgctgttcaaatggaatcccaaaccttacccttctgtgttatttccatgtttatatgagaaaggggatatagaagatatagtagtccctagacttaatgggtgtactgacttatgccatagactaaacttaagagaaactgttagtttgaaaatgttgaaggcagtaatgtattaacattggttctatttattgtcttttttttttaacttgtgattattagacattggttatatcattggtaagatggagctgtaccatcttaaaaatattctaataaactatattttcatagtagataattcatattgttatgcacaagtcatggaacagtgaactacatacttgttggaaataaaacgttcatattgaattgtgcagactatatgttaagagcaaacgtctttctacttacagaagtacgctcttcagggtcagaatttcaatcacgaggtcaggagatcgagacccatcctggttaacgcagtgaaatcctgtctctactaaaaaatacaaaaaattggcctggcatggtggcgggcacctgaggcaggagaatggcgtgaacctgggaggtggagcttgcagtgaccccagattgcgccactgcactgcagcctggagactccgtctca

SEQ ID NO: 406125 - DNA, 852 bp, Homo sapiens
ctctaccaaccaccggcataagcattcaggggcgttgctttcctggcagtggcccgccccagttcgagccggtgccttactgcgtctcgcgagaacttatgcattttggaggcggaaccccgtcaggaaaagcgcacaaaactgctcttaagtcattgcagagctaccgcttcggttagccagccacgaagttctcgcgagagtcgtctcctcgataccaagcgcctgtgtctggcagagctggtgtgagacgagacaatcctgccccgccgccgggataatcaagagttttggccggacctttgagcatacaccgagagagtgaggagccagacgacaagcacacactatggcgctgaaacggattaataaggaacttagtgatttggcccgtgaccctccagcacaatgttctgcaggtccagttggggatgatatgtttcattggcaagccacaattatgggacctaatgacagcccatatcaaggcggtgtattctttttgacaattcattttcctacagactaccccttcaaaccacctaaggttgcatttacaacaagaatttatcatccaaatattaacagtaatggcagcatttgtctcgatattctaagatcacagtggtcgcctgctttaacaatttctaaagttcttttatccatttgttcactgctatgtgatccaaacccagatgaccccctagtgccagagattgcacggatctataaaacagacagagataagtacaacagaatatctcgggaatggactcagaagtatgccatgtgatgctaccttaaagtcagaataacctgcattatagctggaataaactttaaattactgtt

SEQ ID NO: 406126 - DNA, 651 bp, Homo sapiens
tgccgaggcgcgggaactggcgggtagcgaggccctcctcggaatctcgtgtgaaggtggccctcctcttgggcctttaacgtctgtagatgctggagaccagcagaaaggatactgtgtgcgatgagataagcatgtgagaatgctttctaaccgaaagtgcctttcaaaagaacttagtgatttggcccgtgaccctccagcacaatgttctgcaggtccagttggggatgatatgtttcattggcaagccacaattatgggacctaatgacagcccatatcaaggcggtgtattctttttgacaattcattttcctacagactaccccttcaaaccacctaaggttgcatttacaacaagaatttatcatccaaatattaacagtaatggcagcatttgtctcgatattctaagatcacagtggtcgcctgctttaacaatttctaaagttcttttatccatttgttcactgctatgtgatccaaacccagatgaccccctagtgccagagattgcacggatctataaaacagacagagataagtacaacagaatatctcgggaatggactcagaagtatgccatgtgatgctaccttaaagtcagaataacctgcattatagctggaataaactttaaattactgtt

SEQ ID NO: 406127 - DNA, 393 bp, Homo sapiens
tcggtggtagagaaagaaagggtcttttgatttttgttagcctcccaattttcagtgctgctttcttagttgtttttaaaatactactttcagagcatcaggctctcatttcccacattgctttgagtaccagtgctatttctcccttgttggcttttattctaatcatagtcattagagatgacttcatgatgagtctggagatgataaaatggaaatctttcccttccatttaaagtattaggaattctttattttaacttttaaaaataacatctttatttacaggtacaacagaatatctcgggaatggactcagaagtatgccatgtgatgctaccttaaagtcagaataacctgcattatagctggaataaactttaaattactgtt

SEQ ID NO: 406128 - DNA, 4349 bp, Homo sapiens
ctctaccaaccaccggcataagcattcaggggcgttgctttcctggcagtggcccgccccagttcgagccggtgccttactgcgtctcgcgagaacttatgcattttggaggcggaaccccgtcaggaaaagcgcacaaaactgctcttaagtcattgcagagctaccgcttcggttagccagccacgaagttctcgcgagagtcgtctcctcgataccaagtgaggaaactgggggacgctgtggggaggggcgtggggctggatcgcgcagcggctgcttcctttaccttcctcccatggtctccttccggttctcgatgcttctctgagcctaagggtttccgccactcgttcaccctccccccagctcatgatcttcctccctcccccgccctcctggtccaatctccgatctgtttagtaagaaggtgctgttccgagaaggagaaggaaaagggcttgacacgtattcactcggccccggacgtgggaagcaagccgtctggcttcggcctcacatcggtcttgtgctcgggacggcggcgttggcggactgatccgcggcggtgaagaggcaggaggagggggaggggcggagcgtggcagctggcagtagttccgtcagagcggacatcttgtggctgtgtcgtgcgcgtgagccccgtagggccggggaggcaccagctgccgcgcggggaggaggccgaggccgcagcttgagggaggccccggcccctctgcgcctgtgtctggcagagctggtgtgagacgagacaatcctgccccgccgccgggataatcaagagttttggccggacctttgagcatacaccgagagagtgaggagccagacgacaagcacacactatggcgctgaaacggattaataaggaacttagtgatttggcccgtgaccctccagcacaatgttctgcaggtccagttggggatgatatgtttcattggcaagccacaattatgggacctaatgacagcccatatcaaggcggtgtattctttttgacaattcattttcctacagactaccccttcaaaccacctaaggttgcatttacaacaagaatttatcatccaaatattaacagtaatggcagcatttgtctcgatattctaagatcacagtggtcgcctgctttaacaatttctaaagttcttttatccatttgttcactgctatgtgatccaaacccagatgaccccctagtgccagagattgcacggatctataaaacagacagagataagtacaacagaatatctcgggaatggactcagaagtatgccatgtgatgctaccttaaagtcagaataacctgcattatagctggaataaactttaaattactgttccttttttgattttcttatccggctgctcccctatcagacctcatcttttttaattttattttttgtttacctccctccattcattcacatgctcatctgagaagacttaagttcttccagctttggacaataactgcttttagaaactgtaaagtagttacaagagaacagttgcccaagactcagaatttttaaaaaaaaaaatggagcatgtgtattatgtggccaatgtcttcactctaacttggttatgagactaaaaccattcctcactgctctaacatgctgaagaaatcatctgagggggagggagatggatgctcagttgtcacatcaaaggatacagcattattctagcagcatccattcttgtttaagccttccactgttagagatttgaggttacatgatatgctttatgctcataactgatgtggctggagaattggtattgaatttatagcatcagcagaacagaaaatgtgatgtattttatgcatgtcaataaaggaatgacctgttcttgttctacagagaatggaaattggaagtcaaacaccctttgtattccaaaatagggtctcaaacattttgtaattttcatttaaattgttaggaggcttggagctattagttaatctatcttccaatacactgtttaatatagcactgaataaatgatgcaagttgtcaatggatgagtgatcaactaatagctctgctagtaattgatttatttttcttcaataaagttgcataaaccaatgagttagctgcctggattaatcagtatgggaaacaatcttttgtaaatgcaaagctgttttttgtatatactgttgggatttgcttcattgtttgacatcaaatgatgatgtaaagttcgaaagagtgaatattttgccatgttcagttaaagtgcacagtctgttacaggttgacacattgcttgacctgatttatgcagaattaataagctatttggatagtgtagctttaatgtgctgcacatgatactggcagccctagagttcatagatggacttttgggacccagcagttttgaaatgtgtttatggagtttaagaaatttattttccaggtgcagcccctgtctaactgaaatttctcttcaccttgtacacttgacagctgaaaaaaaacaacatgggagtaataatgggtcaaaatttgcaaaataaagtactgttttggtgtgggagttgtcatgaggctgtgttgaagtgacttatctatgtgggatattgagtatccattgaaatggatttgttcagccatttacattaatgagcatttaaatgcaacagatatcatttcaggtgacttaacatgaatgaataaaagtcaatgctattggattgttttttgtttgacaagtgctatctgtgccactgatttaacttctgtagtaacaagggcattaccattcttcacctttcctaattctgatcccatagttttacatttttcctgtttattttgattttgttcactgctttatttcttaaagttctagcacatctgtgactcctccacttccacatttttgcactgcttacacttacgtgcaatcttattccttgtctgcacacacatgtggaaagctagaaataaatgttaaaacttactttttataaacattttaatatgtagtttggacatgatttattgacttaaggttcttctctaaactggaagtgaaatgcatgccttctgaagatgttctggctttgttaattctgtaatcatttcattggggaaaaaaccagctacgcagtttttccaatgagtgaattttttcattttgtgttttgcttaaaacggctccttcagggtagatgtcatactgcataacttttttggattcaaattatgaatgagaaattagttaacattctgctccacaaggtaagaaaaactgctctttggctctattttcaaaattacttctgagatgcatatagtctcaaaataacagctttagtaggcatatcacttcttgaaagccaaacatgagtgtaagacacttttatgaaacacggtggatccctaactggctttcaaattgacctttatagccttagacaacccttaggtatttacggagatgacttctttgattgtcataacaattagtggatgtgtccagttctctgtatctttgacttgatgctttatacatcatttcatttgttgcttctaagggaataagccatagaggcttctccaggtttaaaagaacagtaaagtacctggaaaaccaacatttttgaatgtatggacactggacatgagatatgtacaatgaaatcttaaaagaatctaagaatttgccctctttgccccactccacccagtaatttgacattactagtgccatgtataggacccaactgagtattagaatcagttttgactatgtctttgtatttcctaaatcttttaatgcataaaccgaattagggtccagttggcctgttaatggtaaatttacattttaaatgactcagtttgtttttcctgggcgagtttgcaatgtgataatcagattttttaaaactgattaatttgctttcttgtgtgggtgtactcacattttaaagtatgaaccacagttaactagtggtctcaggggtagtgaaacactcacttttttttttgtttgtttttttttgtttgtttgttgaaatggcttagttgaagtatacttaaggtactgatcatgctgtgttagtaatttgggcggggaggggggtaactcagccatgttttgtgttggcataacaaaactgttaatgattgttgattacacttttaagtgaatttgtcttttatgaggaacccagtgcaagtcactaaatattgtctaatagtgacatctgcataagacttgtaatagctgaagttaattgagcttaaaggaattgttaccattaaagtctgtgtttaaagaca

SEQ ID NO: 406129 - DNA, 3829 bp, Homo sapiens
ctctaccaaccaccggcataagcattcaggggcgttgctttcctggcagtggcccgccccagttcgagccggtgccttactgcgtctcgcgagaacttatgcattttggaggcggaaccccgtcaggaaaagcgcacaaaactgctcttaagtcattgcagagctaccgcttcggttagccagccacgaagttctcgcgagagtcgtctcctcgataccaagcgcctgtgtctggcagagctggtgtgagacgagacaatcctgccccgccgccgggataatcaagagttttggccggacctttgagcatacaccgagagagtgaggagccagacgacaagcacacactatggcgctgaaacggattaataaggaacttagtgatttggcccgtgaccctccagcacaatgttctgcaggtccagttggggatgatatgtttcattggcaagccacaattatgggacctaatgacagcccatatcaaggcggtgtattctttttgacaattcattttcctacagactaccccttcaaaccacctaaggttgcatttacaacaagaatttatcatccaaatattaacagtaatggcagcatttgtctcgatattctaagatcacagtggtcgcctgctttaacaatttctaaagttcttttatccatttgttcactgctatgtgatccaaacccagatgaccccctagtgccagagattgcacggatctataaaacagacagagataagtacaacagaatatctcgggaatggactcagaagtatgccatgtgatgctaccttaaagtcagaataacctgcattatagctggaataaactttaaattactgttccttttttgattttcttatccggctgctcccctatcagacctcatcttttttaattttattttttgtttacctccctccattcattcacatgctcatctgagaagacttaagttcttccagctttggacaataactgcttttagaaactgtaaagtagttacaagagaacagttgcccaagactcagaatttttaaaaaaaaaaatggagcatgtgtattatgtggccaatgtcttcactctaacttggttatgagactaaaaccattcctcactgctctaacatgctgaagaaatcatctgagggggagggagatggatgctcagttgtcacatcaaaggatacagcattattctagcagcatccattcttgtttaagccttccactgttagagatttgaggttacatgatatgctttatgctcataactgatgtggctggagaattggtattgaatttatagcatcagcagaacagaaaatgtgatgtattttatgcatgtcaataaaggaatgacctgttcttgttctacagagaatggaaattggaagtcaaacaccctttgtattccaaaatagggtctcaaacattttgtaattttcatttaaattgttaggaggcttggagctattagttaatctatcttccaatacactgtttaatatagcactgaataaatgatgcaagttgtcaatggatgagtgatcaactaatagctctgctagtaattgatttatttttcttcaataaagttgcataaaccaatgagttagctgcctggattaatcagtatgggaaacaatcttttgtaaatgcaaagctgttttttgtatatactgttgggatttgcttcattgtttgacatcaaatgatgatgtaaagttcgaaagagtgaatattttgccatgttcagttaaagtgcacagtctgttacaggttgacacattgcttgacctgatttatgcagaattaataagctatttggatagtgtagctttaatgtgctgcacatgatactggcagccctagagttcatagatggacttttgggacccagcagttttgaaatgtgtttatggagtttaagaaatttattttccaggtgcagcccctgtctaactgaaatttctcttcaccttgtacacttgacagctgaaaaaaaacaacatgggagtaataatgggtcaaaatttgcaaaataaagtactgttttggtgtgggagttgtcatgaggctgtgttgaagtgacttatctatgtgggatattgagtatccattgaaatggatttgttcagccatttacattaatgagcatttaaatgcaacagatatcatttcaggtgacttaacatgaatgaataaaagtcaatgctattggattgttttttgtttgacaagtgctatctgtgccactgatttaacttctgtagtaacaagggcattaccattcttcacctttcctaattctgatcccatagttttacatttttcctgtttattttgattttgttcactgctttatttcttaaagttctagcacatctgtgactcctccacttccacatttttgcactgcttacacttacgtgcaatcttattccttgtctgcacacacatgtggaaagctagaaataaatgttaaaacttactttttataaacattttaatatgtagtttggacatgatttattgacttaaggttcttctctaaactggaagtgaaatgcatgccttctgaagatgttctggctttgttaattctgtaatcatttcattggggaaaaaaccagctacgcagtttttccaatgagtgaattttttcattttgtgttttgcttaaaacggctccttcagggtagatgtcatactgcataacttttttggattcaaattatgaatgagaaattagttaacattctgctccacaaggtaagaaaaactgctctttggctctattttcaaaattacttctgagatgcatatagtctcaaaataacagctttagtaggcatatcacttcttgaaagccaaacatgagtgtaagacacttttatgaaacacggtggatccctaactggctttcaaattgacctttatagccttagacaacccttaggtatttacggagatgacttctttgattgtcataacaattagtggatgtgtccagttctctgtatctttgacttgatgctttatacatcatttcatttgttgcttctaagggaataagccatagaggcttctccaggtttaaaagaacagtaaagtacctggaaaaccaacatttttgaatgtatggacactggacatgagatatgtacaatgaaatcttaaaagaatctaagaatttgccctctttgccccactccacccagtaatttgacattactagtgccatgtataggacccaactgagtattagaatcagttttgactatgtctttgtatttcctaaatcttttaatgcataaaccgaattagggtccagttggcctgttaatggtaaatttacattttaaatgactcagtttgtttttcctgggcgagtttgcaatgtgataatcagattttttaaaactgattaatttgctttcttgtgtgggtgtactcacattttaaagtatgaaccacagttaactagtggtctcaggggtagtgaaacactcacttttttttttgtttgtttttttttgtttgtttgttgaaatggcttagttgaagtatacttaaggtactgatcatgctgtgttagtaatttgggcggggaggggggtaactcagccatgttttgtgttggcataacaaaactgttaatgattgttgattacacttttaagtgaatttgtcttttatgaggaacccagtgcaagtcactaaatattgtctaatagtgacatctgcataagacttgtaatagctgaagttaattgagcttaaaggaattgttaccattaaagtctgtgtttaaagaca

SEQ ID NO: 406130 - DNA, 2747 bp, Homo sapiens
ctctaccaaccaccggcataagcattcaggggcgttgctttcctggcagtggcccgccccagttcgagccggtgccttactgcgtctcgcgagaacttatgcattttggaggcggaaccccgtcaggaaaagcgcacaaaactgctcttaagtcattgcagagctaccgcttcggttagccagccacgaagttctcgcgagagtcgtctcctcgataccaagtgaggaaactgggggacgctgtggggaggggcgtggggctggatcgcgcagcggctgcttcctttaccttcctcccatggtctccttccggttctcgatgcttctctgagcctaagggtttccgccactcgttcaccctccccccagctcatgatcttcctccctcccccgccctcctggtccaatctccgatctgtttagtaagaaggtgctgttccgagaaggagaaggaaaagggcttgacacgtattcactcggccccggacgtgggaagcaagccgtctggcttcggcctcacatcggtcttgtgctcgggacggcggcgttggcggactgatccgcggcggtgaagaggcaggaggagggggaggggcggagcgtggcagctggcagtagttccgtcagagcggacatcttgtggctgtgtcgtgcgcgtgagccccgtagggccggggaggcaccagctgccgcgcggggaggaggccgaggccgcagcttgagggaggccccggcccctctgcgcctgtgtctggcagagctggtgtgagacgagacaatcctgccccgccgccgggataatcaagagttttggccggacctttgagcatacaccgagagagtgaggagccagacgacaagcacacactatggcgctgaaacggattaataaggaacttagtgatttggcccgtgaccctccagcacaatgttctgcaggtccagttggggatgatatgtttcattggcaagccacaattatgggacctaatgacagcccatatcaaggcggtgtattctttttgacaattcattttcctacagactaccccttcaaaccacctaaggttgcatttacaacaagaatttatcatccaaatattaacagtaatggcagcatttgtctcgatattctaagatcacagtggtcgcctgctttaacaatttctaaagttcttttatccatttgttcactgctatgtgatccaaacccagatgaccccctagtgccagagattgcacggatctataaaacagacagagataagtacaacagaatatctcgggaatggactcagaagtatgccatgtgatgctaccttaaagtcagaataacctgcattatagctggaataaactttaaattactgttccttttttgattttcttatccggctgctcccctatcagacctcatcttttttaattttattttttgtttacctccctccattcattcacatgctcatctgagaagacttaagttcttccagctttggacaataactgcttttagaaactgtaaagtagttacaagagaacagttgcccaagactcagaatttttaaaaaaaaaaatggagcatgtgtattatgtggccaatgtcttcactctaacttggttatgagactaaaaccattcctcactgctctaacatgctgaagaaatcatctgagggggagggagatggatgctcagttgtcacatcaaaggatacagcattattctagcagcatccattcttgtttaagccttccactgttagagatttgaggttacatgatatgctttatgctcataactgatgtggctggagaattggtattgaatttatagcatcagcagaacagaaaatgtgatgtattttatgcatgtcaataaaggaatgacctgttcttgttctacagagaatggaaattggaagtcaaacaccctttgtattccaaaatagggtctcaaacattttgtaattttcatttaaattgttaggaggcttggagctattagttaatctatcttccaatacactgtttaatatagcactgaataaatgatgcaagttgtcaatggatgagtgatcaactaatagctctgctagtaattgatttatttttcttcaataaagttgcataaaccaatgagttagctgcctggattaatcagtatgggaaacaatcttttgtaaatgcaaagctgttttttgtatatactgttgggatttgcttcattgtttgacatcaaatgatgatgtaaagttcgaaagagtgaatattttgccatgttcagttaaagtgcacagtctgttacaggttgacacattgcttgacctgatttatgcagaattaataagctatttggatagtgtagctttaatgtgctgcacatgatactggcagccctagagttcatagatggacttttgggacccagcagttttgaaatgtgtttatggagtttaagaaatttattttccaggtgcagcccctgtctaactgaaatttctcttcaccttgtacacttgacagctgaaaaaaaacaacatgggagtaataatgggtcaaaatttgcaaaataaagtactgttttggtgtgggagttgtcatgaggctgtgttgaagtgacttatctatgtgggatattgagtatccattgaaatggatttgttcagccatttacattaatgagcatttaaatgcaacagatatcatttcaggtgacttaacatgaatgaataaaagtcaatgcta

SEQ ID NO: 406131 - DNA, 4254 bp, Homo sapiens
cgcggcctctcctgctggaggaggagggggaatgggcgcgtctcgcgcctaagccggagcctcagggacagcgcgggcgcgtggtggaggtggctgggcgggcgcgcgcgggagcgcgctggaaggcggagtgagtgtacggtggcgtcaggggtgacacagaatagctcgctgcgaggatagcaatacacatcaagtctcccttcctttatttccttccttttcccggccgcacctttggacagaaaccgaaagcagcccggcgtccgtccggagtcttatgcttccccctccccccttgcctttctttgccctagtgacgccggtatagcgccgactaggccccggctcctcctctgctgggctccggaccctgccccgcacccacccctttctcctacgcctcttcctctcccacccgggtctcttcctttctagaggccgggaagttaaacttgtagccaccacctccgctcttcccgtcaccctcgcccccacttcgggccgaaagcacggtacagaggctgttggtggctttgccacgccaccccacccaccccggatcgcggctgtcttaagggacctggattcatcaggggctcttcggggcctgtgcgagtgctgatctgctccgtttttgcaaaaggcgcctgtgtctggcagagctggtgtgagacgagacaatcctgccccgccgccgggataatcaagagttttggccggacctttgagcatacaccgagagagtgaggagccagacgacaagcacacactatggcgctgaaacggattaataaggaacttagtgatttggcccgtgaccctccagcacaatgttctgcaggtccagttggggatgatatgtttcattggcaagccacaattatgggacctaatgacagcccatatcaaggcggtgtattctttttgacaattcattttcctacagactaccccttcaaaccacctaaggttgcatttacaacaagaatttatcatccaaatattaacagtaatggcagcatttgtctcgatattctaagatcacagtggtcgcctgctttaacaatttctaaagttcttttatccatttgttcactgctatgtgatccaaacccagatgaccccctagtgccagagattgcacggatctataaaacagacagagataagtacaacagaatatctcgggaatggactcagaagtatgccatgtgatgctaccttaaagtcagaataacctgcattatagctggaataaactttaaattactgttccttttttgattttcttatccggctgctcccctatcagacctcatcttttttaattttattttttgtttacctccctccattcattcacatgctcatctgagaagacttaagttcttccagctttggacaataactgcttttagaaactgtaaagtagttacaagagaacagttgcccaagactcagaatttttaaaaaaaaaaatggagcatgtgtattatgtggccaatgtcttcactctaacttggttatgagactaaaaccattcctcactgctctaacatgctgaagaaatcatctgagggggagggagatggatgctcagttgtcacatcaaaggatacagcattattctagcagcatccattcttgtttaagccttccactgttagagatttgaggttacatgatatgctttatgctcataactgatgtggctggagaattggtattgaatttatagcatcagcagaacagaaaatgtgatgtattttatgcatgtcaataaaggaatgacctgttcttgttctacagagaatggaaattggaagtcaaacaccctttgtattccaaaatagggtctcaaacattttgtaattttcatttaaattgttaggaggcttggagctattagttaatctatcttccaatacactgtttaatatagcactgaataaatgatgcaagttgtcaatggatgagtgatcaactaatagctctgctagtaattgatttatttttcttcaataaagttgcataaaccaatgagttagctgcctggattaatcagtatgggaaacaatcttttgtaaatgcaaagctgttttttgtatatactgttgggatttgcttcattgtttgacatcaaatgatgatgtaaagttcgaaagagtgaatattttgccatgttcagttaaagtgcacagtctgttacaggttgacacattgcttgacctgatttatgcagaattaataagctatttggatagtgtagctttaatgtgctgcacatgatactggcagccctagagttcatagatggacttttgggacccagcagttttgaaatgtgtttatggagtttaagaaatttattttccaggtgcagcccctgtctaactgaaatttctcttcaccttgtacacttgacagctgaaaaaaaacaacatgggagtaataatgggtcaaaatttgcaaaataaagtactgttttggtgtgggagttgtcatgaggctgtgttgaagtgacttatctatgtgggatattgagtatccattgaaatggatttgttcagccatttacattaatgagcatttaaatgcaacagatatcatttcaggtgacttaacatgaatgaataaaagtcaatgctattggattgttttttgtttgacaagtgctatctgtgccactgatttaacttctgtagtaacaagggcattaccattcttcacctttcctaattctgatcccatagttttacatttttcctgtttattttgattttgttcactgctttatttcttaaagttctagcacatctgtgactcctccacttccacatttttgcactgcttacacttacgtgcaatcttattccttgtctgcacacacatgtggaaagctagaaataaatgttaaaacttactttttataaacattttaatatgtagtttggacatgatttattgacttaaggttcttctctaaactggaagtgaaatgcatgccttctgaagatgttctggctttgttaattctgtaatcatttcattggggaaaaaaccagctacgcagtttttccaatgagtgaattttttcattttgtgttttgcttaaaacggctccttcagggtagatgtcatactgcataacttttttggattcaaattatgaatgagaaattagttaacattctgctccacaaggtaagaaaaactgctctttggctctattttcaaaattacttctgagatgcatatagtctcaaaataacagctttagtaggcatatcacttcttgaaagccaaacatgagtgtaagacacttttatgaaacacggtggatccctaactggctttcaaattgacctttatagccttagacaacccttaggtatttacggagatgacttctttgattgtcataacaattagtggatgtgtccagttctctgtatctttgacttgatgctttatacatcatttcatttgttgcttctaagggaataagccatagaggcttctccaggtttaaaagaacagtaaagtacctggaaaaccaacatttttgaatgtatggacactggacatgagatatgtacaatgaaatcttaaaagaatctaagaatttgccctctttgccccactccacccagtaatttgacattactagtgccatgtataggacccaactgagtattagaatcagttttgactatgtctttgtatttcctaaatcttttaatgcataaaccgaattagggtccagttggcctgttaatggtaaatttacattttaaatgactcagtttgtttttcctgggcgagtttgcaatgtgataatcagattttttaaaactgattaatttgctttcttgtgtgggtgtactcacattttaaagtatgaaccacagttaactagtggtctcaggggtagtgaaacactcacttttttttttgtttgtttttttttgtttgtttgttgaaatggcttagttgaagtatacttaaggtactgatcatgctgtgttagtaatttgggcggggaggggggtaactcagccatgttttgtgttggcataacaaaactgttaatgattgttgattacacttttaagtgaatttgtcttttatgaggaacccagtgcaagtcactaaatattgtctaatagtgacatctgcataagacttgtaatagctgaagttaattgagcttaaaggaattgttaccattaaagtctgtgtttaaagaca

SEQ ID NO: 406132 - DNA, 4392 bp, Homo sapiens
ctctaccaaccaccggcataagcattcaggggcgttgctttcctggcagtggcccgccccagttcgagccggtgccttactgcgtctcgcgagaacttatgcattttggaggcggaaccccgtcaggaaaagcgcacaaaactgctcttaagtcattgcagagctaccgcttcggttagccagccacgaagttctcgcgagagtcgtctcctcgataccaagtgaggaaactgggggacgctgtggggaggggcgtggggctggatcgcgcagcggctgcttcctttaccttcctcccatggtctccttccggttctcgatgcttctctgagcctaagggtttccgccactcgttcaccctccccccagctcatgatcttcctccctcccccgccctcctggtccaatctccgatctgtttagtaagaaggtgctgttccgagaaggagaaggaaaagggcttgacacgtattcactcggccccggacgtgggaagcaagccgtctggcttcggcctcacatcggtcttgtgctcgggacggcggcgttggcggactgatccgcggcggtgaagagaggccgggaagttaaacttgtagccaccacctccgctcttcccgtcaccctcgcccccacttcgggccgaaagcacggtacagaggctgttggtggctttgccacgccaccccacccaccccggatcgcggctgtcttaagggacctggattcatcaggggctcttcggggcctgtgcgagtgctgatctgctccgtttttgcaaaaggcgcctgtgtctggcagagctggtgtgagacgagacaatcctgccccgccgccgggataatcaagagttttggccggacctttgagcatacaccgagagagtgaggagccagacgacaagcacacactatggcgctgaaacggattaataaggaacttagtgatttggcccgtgaccctccagcacaatgttctgcaggtccagttggggatgatatgtttcattggcaagccacaattatgggacctaatgacagcccatatcaaggcggtgtattctttttgacaattcattttcctacagactaccccttcaaaccacctaaggttgcatttacaacaagaatttatcatccaaatattaacagtaatggcagcatttgtctcgatattctaagatcacagtggtcgcctgctttaacaatttctaaagttcttttatccatttgttcactgctatgtgatccaaacccagatgaccccctagtgccagagattgcacggatctataaaacagacagagataagtacaacagaatatctcgggaatggactcagaagtatgccatgtgatgctaccttaaagtcagaataacctgcattatagctggaataaactttaaattactgttccttttttgattttcttatccggctgctcccctatcagacctcatcttttttaattttattttttgtttacctccctccattcattcacatgctcatctgagaagacttaagttcttccagctttggacaataactgcttttagaaactgtaaagtagttacaagagaacagttgcccaagactcagaatttttaaaaaaaaaaatggagcatgtgtattatgtggccaatgtcttcactctaacttggttatgagactaaaaccattcctcactgctctaacatgctgaagaaatcatctgagggggagggagatggatgctcagttgtcacatcaaaggatacagcattattctagcagcatccattcttgtttaagccttccactgttagagatttgaggttacatgatatgctttatgctcataactgatgtggctggagaattggtattgaatttatagcatcagcagaacagaaaatgtgatgtattttatgcatgtcaataaaggaatgacctgttcttgttctacagagaatggaaattggaagtcaaacaccctttgtattccaaaatagggtctcaaacattttgtaattttcatttaaattgttaggaggcttggagctattagttaatctatcttccaatacactgtttaatatagcactgaataaatgatgcaagttgtcaatggatgagtgatcaactaatagctctgctagtaattgatttatttttcttcaataaagttgcataaaccaatgagttagctgcctggattaatcagtatgggaaacaatcttttgtaaatgcaaagctgttttttgtatatactgttgggatttgcttcattgtttgacatcaaatgatgatgtaaagttcgaaagagtgaatattttgccatgttcagttaaagtgcacagtctgttacaggttgacacattgcttgacctgatttatgcagaattaataagctatttggatagtgtagctttaatgtgctgcacatgatactggcagccctagagttcatagatggacttttgggacccagcagttttgaaatgtgtttatggagtttaagaaatttattttccaggtgcagcccctgtctaactgaaatttctcttcaccttgtacacttgacagctgaaaaaaaacaacatgggagtaataatgggtcaaaatttgcaaaataaagtactgttttggtgtgggagttgtcatgaggctgtgttgaagtgacttatctatgtgggatattgagtatccattgaaatggatttgttcagccatttacattaatgagcatttaaatgcaacagatatcatttcaggtgacttaacatgaatgaataaaagtcaatgctattggattgttttttgtttgacaagtgctatctgtgccactgatttaacttctgtagtaacaagggcattaccattcttcacctttcctaattctgatcccatagttttacatttttcctgtttattttgattttgttcactgctttatttcttaaagttctagcacatctgtgactcctccacttccacatttttgcactgcttacacttacgtgcaatcttattccttgtctgcacacacatgtggaaagctagaaataaatgttaaaacttactttttataaacattttaatatgtagtttggacatgatttattgacttaaggttcttctctaaactggaagtgaaatgcatgccttctgaagatgttctggctttgttaattctgtaatcatttcattggggaaaaaaccagctacgcagtttttccaatgagtgaattttttcattttgtgttttgcttaaaacggctccttcagggtagatgtcatactgcataacttttttggattcaaattatgaatgagaaattagttaacattctgctccacaaggtaagaaaaactgctctttggctctattttcaaaattacttctgagatgcatatagtctcaaaataacagctttagtaggcatatcacttcttgaaagccaaacatgagtgtaagacacttttatgaaacacggtggatccctaactggctttcaaattgacctttatagccttagacaacccttaggtatttacggagatgacttctttgattgtcataacaattagtggatgtgtccagttctctgtatctttgacttgatgctttatacatcatttcatttgttgcttctaagggaataagccatagaggcttctccaggtttaaaagaacagtaaagtacctggaaaaccaacatttttgaatgtatggacactggacatgagatatgtacaatgaaatcttaaaagaatctaagaatttgccctctttgccccactccacccagtaatttgacattactagtgccatgtataggacccaactgagtattagaatcagttttgactatgtctttgtatttcctaaatcttttaatgcataaaccgaattagggtccagttggcctgttaatggtaaatttacattttaaatgactcagtttgtttttcctgggcgagtttgcaatgtgataatcagattttttaaaactgattaatttgctttcttgtgtgggtgtactcacattttaaagtatgaaccacagttaactagtggtctcaggggtagtgaaacactcacttttttttttgtttgtttttttttgtttgtttgttgaaatggcttagttgaagtatacttaaggtactgatcatgctgtgttagtaatttgggcggggaggggggtaactcagccatgttttgtgttggcataacaaaactgttaatgattgttgattacacttttaagtgaatttgtcttttatgaggaacccagtgcaagtcactaaatattgtctaatagtgacatctgcataagacttgtaatagctgaagttaattgagcttaaaggaattgttaccattaaagtctgtgtttaaagaca

SEQ ID NO: 406133 - DNA, 3738 bp, Homo sapiens
cgcggcctctcctgctggaggaggagggggaatgggcgcgtctcgcgcctaagccggagcctcagggacagcgcgggcgcgtggtggaggtggctgggcgggcgcgcgcgggagcgcgctggaaggcggagcgcctgtgtctggcagagctggtgtgagacgagacaatcctgccccgccgccgggataatcaagagttttggccggacctttgagcatacaccgagagagtgaggagccagacgacaagcacacactatggcgctgaaacggattaataaggaacttagtgatttggcccgtgaccctccagcacaatgttctgcaggtccagttggggatgatatgtttcattggcaagccacaattatgggacctaatgacagcccatatcaaggcggtgtattctttttgacaattcattttcctacagactaccccttcaaaccacctaaggttgcatttacaacaagaatttatcatccaaatattaacagtaatggcagcatttgtctcgatattctaagatcacagtggtcgcctgctttaacaatttctaaagttcttttatccatttgttcactgctatgtgatccaaacccagatgaccccctagtgccagagattgcacggatctataaaacagacagagataagtacaacagaatatctcgggaatggactcagaagtatgccatgtgatgctaccttaaagtcagaataacctgcattatagctggaataaactttaaattactgttccttttttgattttcttatccggctgctcccctatcagacctcatcttttttaattttattttttgtttacctccctccattcattcacatgctcatctgagaagacttaagttcttccagctttggacaataactgcttttagaaactgtaaagtagttacaagagaacagttgcccaagactcagaatttttaaaaaaaaaaatggagcatgtgtattatgtggccaatgtcttcactctaacttggttatgagactaaaaccattcctcactgctctaacatgctgaagaaatcatctgagggggagggagatggatgctcagttgtcacatcaaaggatacagcattattctagcagcatccattcttgtttaagccttccactgttagagatttgaggttacatgatatgctttatgctcataactgatgtggctggagaattggtattgaatttatagcatcagcagaacagaaaatgtgatgtattttatgcatgtcaataaaggaatgacctgttcttgttctacagagaatggaaattggaagtcaaacaccctttgtattccaaaatagggtctcaaacattttgtaattttcatttaaattgttaggaggcttggagctattagttaatctatcttccaatacactgtttaatatagcactgaataaatgatgcaagttgtcaatggatgagtgatcaactaatagctctgctagtaattgatttatttttcttcaataaagttgcataaaccaatgagttagctgcctggattaatcagtatgggaaacaatcttttgtaaatgcaaagctgttttttgtatatactgttgggatttgcttcattgtttgacatcaaatgatgatgtaaagttcgaaagagtgaatattttgccatgttcagttaaagtgcacagtctgttacaggttgacacattgcttgacctgatttatgcagaattaataagctatttggatagtgtagctttaatgtgctgcacatgatactggcagccctagagttcatagatggacttttgggacccagcagttttgaaatgtgtttatggagtttaagaaatttattttccaggtgcagcccctgtctaactgaaatttctcttcaccttgtacacttgacagctgaaaaaaaacaacatgggagtaataatgggtcaaaatttgcaaaataaagtactgttttggtgtgggagttgtcatgaggctgtgttgaagtgacttatctatgtgggatattgagtatccattgaaatggatttgttcagccatttacattaatgagcatttaaatgcaacagatatcatttcaggtgacttaacatgaatgaataaaagtcaatgctattggattgttttttgtttgacaagtgctatctgtgccactgatttaacttctgtagtaacaagggcattaccattcttcacctttcctaattctgatcccatagttttacatttttcctgtttattttgattttgttcactgctttatttcttaaagttctagcacatctgtgactcctccacttccacatttttgcactgcttacacttacgtgcaatcttattccttgtctgcacacacatgtggaaagctagaaataaatgttaaaacttactttttataaacattttaatatgtagtttggacatgatttattgacttaaggttcttctctaaactggaagtgaaatgcatgccttctgaagatgttctggctttgttaattctgtaatcatttcattggggaaaaaaccagctacgcagtttttccaatgagtgaattttttcattttgtgttttgcttaaaacggctccttcagggtagatgtcatactgcataacttttttggattcaaattatgaatgagaaattagttaacattctgctccacaaggtaagaaaaactgctctttggctctattttcaaaattacttctgagatgcatatagtctcaaaataacagctttagtaggcatatcacttcttgaaagccaaacatgagtgtaagacacttttatgaaacacggtggatccctaactggctttcaaattgacctttatagccttagacaacccttaggtatttacggagatgacttctttgattgtcataacaattagtggatgtgtccagttctctgtatctttgacttgatgctttatacatcatttcatttgttgcttctaagggaataagccatagaggcttctccaggtttaaaagaacagtaaagtacctggaaaaccaacatttttgaatgtatggacactggacatgagatatgtacaatgaaatcttaaaagaatctaagaatttgccctctttgccccactccacccagtaatttgacattactagtgccatgtataggacccaactgagtattagaatcagttttgactatgtctttgtatttcctaaatcttttaatgcataaaccgaattagggtccagttggcctgttaatggtaaatttacattttaaatgactcagtttgtttttcctgggcgagtttgcaatgtgataatcagattttttaaaactgattaatttgctttcttgtgtgggtgtactcacattttaaagtatgaaccacagttaactagtggtctcaggggtagtgaaacactcacttttttttttgtttgtttttttttgtttgtttgttgaaatggcttagttgaagtatacttaaggtactgatcatgctgtgttagtaatttgggcggggaggggggtaactcagccatgttttgtgttggcataacaaaactgttaatgattgttgattacacttttaagtgaatttgtcttttatgaggaacccagtgcaagtcactaaatattgtctaatagtgacatctgcataagacttgtaatagctgaagttaattgagcttaaaggaattgttaccattaaagtctgtgtttaaagaca

SEQ ID NO: 406134 - DNA, 3780 bp, Homo sapiens
tgccgaggcgcgggaactggcgggtagcgaggccctcctcggaatctcgtgtgaaggtggccctcctcttgggcctttaacgtctgtagatgctggagaccagcagaaaggatactgtgtgcgatgagataagcatgtgagaatgctttctaaccgaaagtgcctttcaaaagcgcctgtgtctggcagagctggtgtgagacgagacaatcctgccccgccgccgggataatcaagagttttggccggacctttgagcatacaccgagagagtgaggagccagacgacaagcacacactatggcgctgaaacggattaataaggaacttagtgatttggcccgtgaccctccagcacaatgttctgcaggtccagttggggatgatatgtttcattggcaagccacaattatgggacctaatgacagcccatatcaaggcggtgtattctttttgacaattcattttcctacagactaccccttcaaaccacctaaggttgcatttacaacaagaatttatcatccaaatattaacagtaatggcagcatttgtctcgatattctaagatcacagtggtcgcctgctttaacaatttctaaagttcttttatccatttgttcactgctatgtgatccaaacccagatgaccccctagtgccagagattgcacggatctataaaacagacagagataagtacaacagaatatctcgggaatggactcagaagtatgccatgtgatgctaccttaaagtcagaataacctgcattatagctggaataaactttaaattactgttccttttttgattttcttatccggctgctcccctatcagacctcatcttttttaattttattttttgtttacctccctccattcattcacatgctcatctgagaagacttaagttcttccagctttggacaataactgcttttagaaactgtaaagtagttacaagagaacagttgcccaagactcagaatttttaaaaaaaaaaatggagcatgtgtattatgtggccaatgtcttcactctaacttggttatgagactaaaaccattcctcactgctctaacatgctgaagaaatcatctgagggggagggagatggatgctcagttgtcacatcaaaggatacagcattattctagcagcatccattcttgtttaagccttccactgttagagatttgaggttacatgatatgctttatgctcataactgatgtggctggagaattggtattgaatttatagcatcagcagaacagaaaatgtgatgtattttatgcatgtcaataaaggaatgacctgttcttgttctacagagaatggaaattggaagtcaaacaccctttgtattccaaaatagggtctcaaacattttgtaattttcatttaaattgttaggaggcttggagctattagttaatctatcttccaatacactgtttaatatagcactgaataaatgatgcaagttgtcaatggatgagtgatcaactaatagctctgctagtaattgatttatttttcttcaataaagttgcataaaccaatgagttagctgcctggattaatcagtatgggaaacaatcttttgtaaatgcaaagctgttttttgtatatactgttgggatttgcttcattgtttgacatcaaatgatgatgtaaagttcgaaagagtgaatattttgccatgttcagttaaagtgcacagtctgttacaggttgacacattgcttgacctgatttatgcagaattaataagctatttggatagtgtagctttaatgtgctgcacatgatactggcagccctagagttcatagatggacttttgggacccagcagttttgaaatgtgtttatggagtttaagaaatttattttccaggtgcagcccctgtctaactgaaatttctcttcaccttgtacacttgacagctgaaaaaaaacaacatgggagtaataatgggtcaaaatttgcaaaataaagtactgttttggtgtgggagttgtcatgaggctgtgttgaagtgacttatctatgtgggatattgagtatccattgaaatggatttgttcagccatttacattaatgagcatttaaatgcaacagatatcatttcaggtgacttaacatgaatgaataaaagtcaatgctattggattgttttttgtttgacaagtgctatctgtgccactgatttaacttctgtagtaacaagggcattaccattcttcacctttcctaattctgatcccatagttttacatttttcctgtttattttgattttgttcactgctttatttcttaaagttctagcacatctgtgactcctccacttccacatttttgcactgcttacacttacgtgcaatcttattccttgtctgcacacacatgtggaaagctagaaataaatgttaaaacttactttttataaacattttaatatgtagtttggacatgatttattgacttaaggttcttctctaaactggaagtgaaatgcatgccttctgaagatgttctggctttgttaattctgtaatcatttcattggggaaaaaaccagctacgcagtttttccaatgagtgaattttttcattttgtgttttgcttaaaacggctccttcagggtagatgtcatactgcataacttttttggattcaaattatgaatgagaaattagttaacattctgctccacaaggtaagaaaaactgctctttggctctattttcaaaattacttctgagatgcatatagtctcaaaataacagctttagtaggcatatcacttcttgaaagccaaacatgagtgtaagacacttttatgaaacacggtggatccctaactggctttcaaattgacctttatagccttagacaacccttaggtatttacggagatgacttctttgattgtcataacaattagtggatgtgtccagttctctgtatctttgacttgatgctttatacatcatttcatttgttgcttctaagggaataagccatagaggcttctccaggtttaaaagaacagtaaagtacctggaaaaccaacatttttgaatgtatggacactggacatgagatatgtacaatgaaatcttaaaagaatctaagaatttgccctctttgccccactccacccagtaatttgacattactagtgccatgtataggacccaactgagtattagaatcagttttgactatgtctttgtatttcctaaatcttttaatgcataaaccgaattagggtccagttggcctgttaatggtaaatttacattttaaatgactcagtttgtttttcctgggcgagtttgcaatgtgataatcagattttttaaaactgattaatttgctttcttgtgtgggtgtactcacattttaaagtatgaaccacagttaactagtggtctcaggggtagtgaaacactcacttttttttttgtttgtttttttttgtttgtttgttgaaatggcttagttgaagtatacttaaggtactgatcatgctgtgttagtaatttgggcggggaggggggtaactcagccatgttttgtgttggcataacaaaactgttaatgattgttgattacacttttaagtgaatttgtcttttatgaggaacccagtgcaagtcactaaatattgtctaatagtgacatctgcataagacttgtaatagctgaagttaattgagcttaaaggaattgttaccattaaagtctgtgtttaaagaca

SEQ ID NO: 406135 - DNA, 4304 bp, Homo sapiens
ctctaccaaccaccggcataagcattcaggggcgttgctttcctggcagtggcccgccccagttcgagccggtgccttactgcgtctcgcgagaacttatgcattttggaggcggaaccccgtcaggaaaagcgcacaaaactgctcttaagtcattgcagagctaccgcttcggttagccagccacgaagttctcgcgagagtcgtctcctcgataccaagtgaggaaactgggggacgctgtggggaggggcgtggggctggatcgcgcagcggctgcttcctttaccttcctcccatggtctccttccggttctcgatgcttctctgagcctaagggtttccgccactcgttcaccctccccccagctcatgatcttcctccctcccccgccctcctggtccaatctccgatctgtttagtaagaaggtgctgttccgagaaggagaaggaaaagggcttgacacgtattcactcggccccggacgtgggaagcaagccgtctggcttcggcctcacatcggtcttgtgctcgggacggcggcgttggcggactgatccgcggcggtgaagaggcaggaggagggggaggggcggagcgtggcagctggcagtagttccgtcagagcggacatcttgtggctgtgtcgtgcgcgtgagccccgtagggccggggaggcaccagctgccgcgcggcgcctgtgtctggcagagctggtgtgagacgagacaatcctgccccgccgccgggataatcaagagttttggccggacctttgagcatacaccgagagagtgaggagccagacgacaagcacacactatggcgctgaaacggattaataaggaacttagtgatttggcccgtgaccctccagcacaatgttctgcaggtccagttggggatgatatgtttcattggcaagccacaattatgggacctaatgacagcccatatcaaggcggtgtattctttttgacaattcattttcctacagactaccccttcaaaccacctaaggttgcatttacaacaagaatttatcatccaaatattaacagtaatggcagcatttgtctcgatattctaagatcacagtggtcgcctgctttaacaatttctaaagttcttttatccatttgttcactgctatgtgatccaaacccagatgaccccctagtgccagagattgcacggatctataaaacagacagagataagtacaacagaatatctcgggaatggactcagaagtatgccatgtgatgctaccttaaagtcagaataacctgcattatagctggaataaactttaaattactgttccttttttgattttcttatccggctgctcccctatcagacctcatcttttttaattttattttttgtttacctccctccattcattcacatgctcatctgagaagacttaagttcttccagctttggacaataactgcttttagaaactgtaaagtagttacaagagaacagttgcccaagactcagaatttttaaaaaaaaaaatggagcatgtgtattatgtggccaatgtcttcactctaacttggttatgagactaaaaccattcctcactgctctaacatgctgaagaaatcatctgagggggagggagatggatgctcagttgtcacatcaaaggatacagcattattctagcagcatccattcttgtttaagccttccactgttagagatttgaggttacatgatatgctttatgctcataactgatgtggctggagaattggtattgaatttatagcatcagcagaacagaaaatgtgatgtattttatgcatgtcaataaaggaatgacctgttcttgttctacagagaatggaaattggaagtcaaacaccctttgtattccaaaatagggtctcaaacattttgtaattttcatttaaattgttaggaggcttggagctattagttaatctatcttccaatacactgtttaatatagcactgaataaatgatgcaagttgtcaatggatgagtgatcaactaatagctctgctagtaattgatttatttttcttcaataaagttgcataaaccaatgagttagctgcctggattaatcagtatgggaaacaatcttttgtaaatgcaaagctgttttttgtatatactgttgggatttgcttcattgtttgacatcaaatgatgatgtaaagttcgaaagagtgaatattttgccatgttcagttaaagtgcacagtctgttacaggttgacacattgcttgacctgatttatgcagaattaataagctatttggatagtgtagctttaatgtgctgcacatgatactggcagccctagagttcatagatggacttttgggacccagcagttttgaaatgtgtttatggagtttaagaaatttattttccaggtgcagcccctgtctaactgaaatttctcttcaccttgtacacttgacagctgaaaaaaaacaacatgggagtaataatgggtcaaaatttgcaaaataaagtactgttttggtgtgggagttgtcatgaggctgtgttgaagtgacttatctatgtgggatattgagtatccattgaaatggatttgttcagccatttacattaatgagcatttaaatgcaacagatatcatttcaggtgacttaacatgaatgaataaaagtcaatgctattggattgttttttgtttgacaagtgctatctgtgccactgatttaacttctgtagtaacaagggcattaccattcttcacctttcctaattctgatcccatagttttacatttttcctgtttattttgattttgttcactgctttatttcttaaagttctagcacatctgtgactcctccacttccacatttttgcactgcttacacttacgtgcaatcttattccttgtctgcacacacatgtggaaagctagaaataaatgttaaaacttactttttataaacattttaatatgtagtttggacatgatttattgacttaaggttcttctctaaactggaagtgaaatgcatgccttctgaagatgttctggctttgttaattctgtaatcatttcattggggaaaaaaccagctacgcagtttttccaatgagtgaattttttcattttgtgttttgcttaaaacggctccttcagggtagatgtcatactgcataacttttttggattcaaattatgaatgagaaattagttaacattctgctccacaaggtaagaaaaactgctctttggctctattttcaaaattacttctgagatgcatatagtctcaaaataacagctttagtaggcatatcacttcttgaaagccaaacatgagtgtaagacacttttatgaaacacggtggatccctaactggctttcaaattgacctttatagccttagacaacccttaggtatttacggagatgacttctttgattgtcataacaattagtggatgtgtccagttctctgtatctttgacttgatgctttatacatcatttcatttgttgcttctaagggaataagccatagaggcttctccaggtttaaaagaacagtaaagtacctggaaaaccaacatttttgaatgtatggacactggacatgagatatgtacaatgaaatcttaaaagaatctaagaatttgccctctttgccccactccacccagtaatttgacattactagtgccatgtataggacccaactgagtattagaatcagttttgactatgtctttgtatttcctaaatcttttaatgcataaaccgaattagggtccagttggcctgttaatggtaaatttacattttaaatgactcagtttgtttttcctgggcgagtttgcaatgtgataatcagattttttaaaactgattaatttgctttcttgtgtgggtgtactcacattttaaagtatgaaccacagttaactagtggtctcaggggtagtgaaacactcacttttttttttgtttgtttttttttgtttgtttgttgaaatggcttagttgaagtatacttaaggtactgatcatgctgtgttagtaatttgggcggggaggggggtaactcagccatgttttgtgttggcataacaaaactgttaatgattgttgattacacttttaagtgaatttgtcttttatgaggaacccagtgcaagtcactaaatattgtctaatagtgacatctgcataagacttgtaatagctgaagttaattgagcttaaaggaattgttaccattaaagtctgtgtttaaagaca

SEQ ID NO: 406136 - DNA, 3138 bp, Homo sapiens
ctctaccaaccaccggcataagcattcaggggcgttgctttcctggcagtggcccgccccagttcgagccggtgccttactgcgtctcgcgagaacttatgcattttggaggcggaaccccgtcaggaaaagcgcacaaaactgctcttaagtcattgcagagctaccgcttcggttagccagccacgaagttctcgcgagagtcgtctcctcgataccaagtgaggaaactgggggacgctgtggggaggggcgtggggctggatcgcgcagcggctgcttcctttaccttcctcccatggtctccttccggttctcgatgcttctctgagcctaagggtttccgccactcgttcaccctccccccagctcatgatcttcctccctcccccgccctcctggtccaatctccgatctgtttagtaagaaggtgctgttccgagaaggagaaggaaaagggcttgacacgtattcactcggccccggacgtgggaagcaagccgtctggcttcggcctcacatcggtcttgtgctcgggacggcggcgttggcggactgatccgcggcggtgaagaggcaggaggagggggaggggcggagcgtggcagctggcagtagttccgtcagagcggacatcttgtggctgtgtcgtgcgcgtgagccccgtagggccggggaggcaccagctgccgcgcggggaggaggccgaggccgcagcttgagggaggccccggcccctctgcgcctgtgtctggcagagctggtgtgagacgagacaatcctgccccgccgccgggataatcaagagttttggccggacctttgagcatacaccgagagagtgaggagccagacgacaagcacacactatggcgctgaaacggattaataaggaacttagtgatttggcccgtgaccctccagcacaatgttctgcaggtccagttggggatgatatgtttcattggcaagccacaattatgggacctaatgacagcccatatcaaggcggtgtattctttttgacaattcattttcctacagactaccccttcaaaccacctaaggttgcatttacaacaagaatttatcatccaaatattaacagtaatggcagcatttgtctcgatattctaagatcacagtggtcgcctgctttaacaatttctaaagttcttttatccatttgttcactgctatgtgatccaaacccagatgaccccctagtgccagagattgcacggatctataaaacagacagagataagtacaacagaatatctcgggaatggactcagaagtatgccatgtgatgctaccttaaagtcagaataacctgcattatagctggaataaactttaaattactgttccttttttgattttcttatccggctgctcccctatcagacctcatcttttttaattttattttttgtttacctccctccattcattcacatgctcatctgagaagacttaagttcttccagctttggacaataactgcttttagaaactgtaaagtagttacaagagaacagttgcccaagactcagaatttttaaaaaaaaaaatggagcatgtgtattatgtggccaatgtcttcactctaacttggttatgagactaaaaccattcctcactgctctaacatgctgaagaaatcatctgagggggagggagatggatgctcagttgtcacatcaaaggatacagcattattctagcagcatccattcttgtttaagccttccactgttagagatttgaggttacatgatatgctttatgctcataactgatgtggctggagaattggtattgaatttatagcatcagcagaacagaaaatgtgatgtattttatgcatgtcaataaaggaatgacctgttcttgttctacagagaatggaaattggaagtcaaacaccctttgtattccaaaatagggtctcaaacattttgtaattttcatttaaattgttaggaggcttggagctattagttaatctatcttccaatacactgtttaatatagcactgaataaatgatgcaagttgtcaatggatgagtgatcaactaatagctctgctagtaattgatttatttttcttcaataaagttgcataaaccaatgagttagctgcctggattaatcagtatgggaaacaatcttttgtaaatgcaaagctgttttttgtatatactgttgggatttgcttcattgtttgacatcaaatgatgatgtaaagttcgaaagagtgaatattttgccatgttcagttaaagtgcacagtctgttacaggttgacacattgcttgacctgatttatgcagaattaataagctatttggatagtgtagctttaatgtgctgcacatgatactggcagccctagagttcatagatggacttttgggacccagcagttttgaaatgtgtttatggagtttaagaaatttattttccaggtgcagcccctgtctaactgaaatttctcttcaccttgtacacttgacagctgaaaaaaaacaacatgggagtaataatgggtcaaaatttgcaaaataaagtactgttttggtgtgggagttgtcatgaggctgtgttgaagtgacttatctatgtgggatattgagtatccattgaaatggatttgttcagccatttacattaatgagcatttaaatgcaacagatatcatttcaggtgacttaacatgaatgaataaaagtcaatgctaaaaaaaaaaaaaaaaaaaaaaaaaaaaaaaaaaaaaaaaaaaaaaaaaaaaaaaaaaaaaaaaaaaaaaaaaccttgtggcccgtttggcccaagtggtttttaaattgggcaaggtttatccttgggccccaatttggggttcattggcccaattccccttaaggggggccgtttcaacattaatgtgccgcggtttaaaaacgtgggatttggaaaaccttgggggttcccaaattaaatcgctttggagaaaatccctcttttcgccggttggcgaaaaatcgaaaggggccccaaccgtacgccctttccaaaaattggcccaacttgattgccaattggaaattgtagcccgttaatttttgttaaaaatcggggaaattttttgt

SEQ ID NO: 406137 - DNA, 3560 bp, Homo sapiens
gatctagaggatcccgacggcttcaacggaactttgagcatacaccgagagagtgaggagccagacgacaagcacacactatggcgctgaaacggattaataaggaacttagtgatttggcccgtgaccctccagcacaatgttctgcaggtccagttggggatgatatgtttcattggcaagccacaattatgggacctaatgacagcccatatcaaggcggtgtattctttttgacaattcattttcctacagactaccccttcaaaccacctaaggttgcatttacaacaagaatttatcatccaaatattaacagtaatggcagcatttgtctcgatattctaagatcacagtggtcgcctgctttaacaatttctaaagttcttttatccatttgttcactgctatgtgatccaaacccagatgaccccctagtgccagagattgcacggatctataaaacagacagagataagtacaacagaatatctcgggaatggactcagaagtatgccatgtgatgctaccttaaagtcagaataacctgcattatagctggaataaactttaaattactgttccttttttgattttcttatccggctgctcccctatcagacctcatcttttttaattttattttttgtttacctccctccattcattcacatgctcatctgagaagacttaagttcttccagctttggacaataactgcttttagaaactgtaaagtagttacaagagaacagttgcccaagactcagaatttttaaaaaaaaaaatggagcatgtgtattatgtggccaatgtcttcactctaacttggttatgagactaaaaccattcctcactgctctaacatgctgaagaaatcatctgagggggagggagatggatgctcagttgtcacatcaaaggatacagcattattctagcagcatccattcttgtttaagccttccactgttagagatttgaggttacatgatatgctttatgctcataactgatgtggctggagaattggtattgaatttatagcatcagcagaacagaaaatgtgatgtattttatgcatgtcaataaaggaatgacctgttcttgttctacagagaatggaaattggaagtcaaacaccctttgtattccaaaatagggtctcaaacattttgtaattttcatttaaattgttaggaggcttggagctattagttaatctatcttccaatacactgtttaatatagcactgaataaatgatgcaagttgtcaatggatgagtgatcaactaatagctctgctagtaattgatttatttttcttcaataaagttgcataaaccaatgagttagctgcctggattaatcagtatgggaaacaatcttttgtaaatgcaaagctgttttttgtatatactgttgggatttgcttcattgtttgacatcaaatgatgatgtaaagttcgaaagagtgaatattttgccatgttcagttaaagtgcacagtctgttacaggttgacacattgcttgacctgatttatgcagaattaataagctatttggatagtgtagctttaatgtgctgcacatgatactggcagccctagagttcatagatggacttttgggacccagcagttttgaaatgtgtttatggagtttaagaaatttattttccaggtgcagcccctgtctaactgaaatttctcttcaccttgtacacttgacagctgaaaaaaaacaacatgggagtaataatgggtcaaaatttgcaaaataaagtactgttttggtgtgggagttgtcatgaggctgtgttgaagtgacttatctatgtgggatattgagtatccattgaaatggatttgttcagccatttacattaatgagcatttaaatgcaacagatatcatttcaggtgacttaacatgaatgaataaaagtcaatgctattggattgttttttgtttgacaagtgctatctgtgccactgatttaacttctgtagtaacaagggcattaccattcttcacctttcctaattctgatcccatagttttacatttttcctgtttattttgattttgttcactgctttatttcttaaagttctagcacatctgtgactcctccacttccacatttttgcactgcttacacttacgtgcaatcttattccttgtctgcacacacatgtggaaagctagaaataaatgttaaaacttactttttataaacattttaatatgtagtttggacatgatttattgacttaaggttcttctctaaactggaagtgaaatgcatgccttctgaagatgttctggctttgttaattctgtaatcatttcattggggaaaaaaccagctacgcagtttttccaatgagtgaattttttcattttgtgttttgcttaaaacggctccttcagggtagatgtcatactgcataacttttttggattcaaattatgaatgagaaattagttaacattctgctccacaaggtaagaaaaactgctctttggctctattttcaaaattacttctgagatgcatatagtctcaaaataacagctttagtaggcatatcacttcttgaaagccaaacatgagtgtaagacacttttatgaaacacggtggatccctaactggctttcaaattgacctttatagccttagacaacccttaggtatttacggagatgacttctttgattgtcataacaattagtggatgtgtccagttctctgtatctttgacttgatgctttatacatcatttcatttgttgcttctaagggaataagccatagaggcttctccaggtttaaaagaacagtaaagtacctggaaaaccaacatttttgaatgtatggacactggacatgagatatgtacaatgaaatcttaaaagaatctaagaatttgccctctttgccccactccacccagtaatttgacattactagtgccatgtataggacccaactgagtattagaatcagttttgactatgtctttgtatttcctaaatcttttaatgcataaaccgaattagggtccagttggcctgttaatggtaaatttacattttaaatgactcagtttgtttttcctgggcgagtttgcaatgtgataatcagattttttaaaactgattaatttgctttcttgtgtgggtgtactcacattttaaagtatgaaccacagttaactagtggtctcaggggtagtgaaacactcacttttttttttgtttgtttttttttgtttgtttgttgaaatggcttagttgaagtatacttaaggtactgatcatgctgtgttagtaatttgggcggggaggggggtaactcagccatgttttgtgttggcataacaaaactgttaatgattgttgattacacttttaagtgaatttgtcttttatgaggaacccagtgcaagtcactaaatattgtctaatagtgacatctgcataagacttgtaatagctgaagttaattgagcttaaaggaattgttaccattaaagtctgtgtttaaagaca

SEQ ID NO: 406138 - DNA, 2592 bp, Homo sapiens
ctctaccaaccaccggcataagcattcaggggcgttgctttcctggcagtggcccgccccagttcgagccggtgccttactgcgtctcgcgagaacttatgcattttggaggcggaaccccgtcaggaaaagcgcacaaaactgctcttaagtcattgcagagctaccgcttcggttagccagccacgaagttctcgcgagagtcgtctcctcgataccaagtgaggaaactgggggacgctgtggggaggggcgtggggctggatcgcgcagcggctgcttcctttaccttcctcccatggtctccttccggttctcgatgcttctctgagcctaagggtttccgccactcgttcaccctccccccagctcatgatcttcctccctcccccgccctcctggtccaatctccgatctgtttagtaagaaggtgctgttccgagaaggagaaggaaaagggcttgacacgtattcactcggccccggacgtgggaagcaagccgtctggcttcggcctcacatcggtcttgtgctcgggacggcggcgttggcggactgatccgcggcggtgaagaggcaggaggagggggaggggcggagcgtggcagctggcagtagttccgtcagagcggacatcttgtggctgtgtcgtgcgcgtgagccccgtagggccggggaggcaccagctgccgcgcggggaggaggccgaggccgcagcttgagggaggccccggcccctctgcgcctgtgtctggcagagctggtgtgagacgagacaatcctgccccgccgccgggataatcaagagttttggccggacctttgagcatacaccgagagagtgaggagccagacgacaagcacacactatggcgctgaaacggattaataaggaacttagtgatttggcccgtgaccctccagcacaatgttctgcaggtccagttggggatgatatgtttcattggcaagccacaattatgggacctaatgacagcccatatcaaggcggtgtattctttttgacaattcattttcctacagactaccccttcaaaccacctaaggttgcatttacaacaagaatttatcatccaaatattaacagtaatggcagcatttgtctcgatattctaagatcacagtggtcgcctgctttaacaatttctaaagttcttttatccatttgttcactgctatgtgatccaaacccagatgaccccctagtgccagagattgcacggatctataaaacagacagagataagtacaacagaatatctcgggaatggactcagaagtatgccatgtgatgctaccttaaagtcagaataacctgcattatagctggaataaactttaaattactgttccttttttgattttcttatccggctgctcccctatcagacctcatcttttttaattttattttttgtttacctccctccattcattcacatgctcatctgagaagacttaagttcttccagctttggacaataactgcttttagaaactgtaaagtagttacaagagaacagttgcccaagactcagaatttttaaaaaaaaaaatggagcatgtgtattatgtggccaatgtcttcactctaacttggttatgagactaaaaccattcctcactgctctaacatgctgaagaaatcatctgagggggagggagatggatgctcagttgtcacatcaaaggatacagcattattctagcagcatccattcttgtttaagccttccactgttagagatttgaggttacatgatatgctttatgctcataactgatgtggctggagaattggtattgaatttatagcatcagcagaacagaaaatgtgatgtattttatgcatgtcaataaaggaatgacctgttcttgttctacagagaatggaaattggaagtcaaacaccctttgtattccaaaatagggtctcaaacattttgtaattttcatttaaattgttaggaggcttggagctattagttaatctatcttccaatacactgtttaatatagcactgaataaatgatgcaagttgtcaatggatgagtgatcaactaatagctctgctagtaattgatttatttttcttcaataaagttgcataaaccaatgagttagctgcctggattaatcagtatgggaaacaatcttttgtaaatgcaaagctgttttttgtatatactgttgggatttgcttcattgtttgacatcaaatgatgatgtaaagttcgaaagagtgaatattttgccatgttcagttaaagtgcacagtctgttacaggttgacacattgcttgacctgatttatgcagaattaataagctatttggatagtgtagctttaatgtgctgcacatgatactggcagccctagagttcatagatggacttttgggacccagcagttttgaaatgtgtttatggagtttaagaaatttattttccaggtgcagcccctgtctaactgaaatttctcttcaccttgtacacttgacagctgaaaaaaaacaacatgggagtaataatgggtcaaaatttgcaaaataaagtactgttttggtgtg

SEQ ID NO: 406139 - DNA, 3590 bp, Homo sapiens
tgtagttgcagcttttcacccgaagctatttatccgagggacaccgggaactgatgtaaaaggcattctggaagctcccttttccttttggctggagagtgggggtggataaggggtgcgatggcagtaagggagaacttagtgatttggcccgtgaccctccagcacaatgttctgcaggtccagttggggatgatatgtttcattggcaagccacaattatgggacctaatgacagcccatatcaaggcggtgtattctttttgacaattcattttcctacagactaccccttcaaaccacctaaggttgcatttacaacaagaatttatcatccaaatattaacagtaatggcagcatttgtctcgatattctaagatcacagtggtcgcctgctttaacaatttctaaagttcttttatccatttgttcactgctatgtgatccaaacccagatgaccccctagtgccagagattgcacggatctataaaacagacagagataagtacaacagaatatctcgggaatggactcagaagtatgccatgtgatgctaccttaaagtcagaataacctgcattatagctggaataaactttaaattactgttccttttttgattttcttatccggctgctcccctatcagacctcatcttttttaattttattttttgtttacctccctccattcattcacatgctcatctgagaagacttaagttcttccagctttggacaataactgcttttagaaactgtaaagtagttacaagagaacagttgcccaagactcagaatttttaaaaaaaaaaatggagcatgtgtattatgtggccaatgtcttcactctaacttggttatgagactaaaaccattcctcactgctctaacatgctgaagaaatcatctgagggggagggagatggatgctcagttgtcacatcaaaggatacagcattattctagcagcatccattcttgtttaagccttccactgttagagatttgaggttacatgatatgctttatgctcataactgatgtggctggagaattggtattgaatttatagcatcagcagaacagaaaatgtgatgtattttatgcatgtcaataaaggaatgacctgttcttgttctacagagaatggaaattggaagtcaaacaccctttgtattccaaaatagggtctcaaacattttgtaattttcatttaaattgttaggaggcttggagctattagttaatctatcttccaatacactgtttaatatagcactgaataaatgatgcaagttgtcaatggatgagtgatcaactaatagctctgctagtaattgatttatttttcttcaataaagttgcataaaccaatgagttagctgcctggattaatcagtatgggaaacaatcttttgtaaatgcaaagctgttttttgtatatactgttgggatttgcttcattgtttgacatcaaatgatgatgtaaagttcgaaagagtgaatattttgccatgttcagttaaagtgcacagtctgttacaggttgacacattgcttgacctgatttatgcagaattaataagctatttggatagtgtagctttaatgtgctgcacatgatactggcagccctagagttcatagatggacttttgggacccagcagttttgaaatgtgtttatggagtttaagaaatttattttccaggtgcagcccctgtctaactgaaatttctcttcaccttgtacacttgacagctgaaaaaaaacaacatgggagtaataatgggtcaaaatttgcaaaataaagtactgttttggtgtgggagttgtcatgaggctgtgttgaagtgacttatctatgtgggatattgagtatccattgaaatggatttgttcagccatttacattaatgagcatttaaatgcaacagatatcatttcaggtgacttaacatgaatgaataaaagtcaatgctattggattgttttttgtttgacaagtgctatctgtgccactgatttaacttctgtagtaacaagggcattaccattcttcacctttcctaattctgatcccatagttttacatttttcctgtttattttgattttgttcactgctttatttcttaaagttctagcacatctgtgactcctccacttccacatttttgcactgcttacacttacgtgcaatcttattccttgtctgcacacacatgtggaaagctagaaataaatgttaaaacttactttttataaacattttaatatgtagtttggacatgatttattgacttaaggttcttctctaaactggaagtgaaatgcatgccttctgaagatgttctggctttgttaattctgtaatcatttcattggggaaaaaaccagctacgcagtttttccaatgagtgaattttttcattttgtgttttgcttaaaacggctccttcagggtagatgtcatactgcataacttttttggattcaaattatgaatgagaaattagttaacattctgctccacaaggtaagaaaaactgctctttggctctattttcaaaattacttctgagatgcatatagtctcaaaataacagctttagtaggcatatcacttcttgaaagccaaacatgagtgtaagacacttttatgaaacacggtggatccctaactggctttcaaattgacctttatagccttagacaacccttaggtatttacggagatgacttctttgattgtcataacaattagtggatgtgtccagttctctgtatctttgacttgatgctttatacatcatttcatttgttgcttctaagggaataagccatagaggcttctccaggtttaaaagaacagtaaagtacctggaaaaccaacatttttgaatgtatggacactggacatgagatatgtacaatgaaatcttaaaagaatctaagaatttgccctctttgccccactccacccagtaatttgacattactagtgccatgtataggacccaactgagtattagaatcagttttgactatgtctttgtatttcctaaatcttttaatgcataaaccgaattagggtccagttggcctgttaatggtaaatttacattttaaatgactcagtttgtttttcctgggcgagtttgcaatgtgataatcagattttttaaaactgattaatttgctttcttgtgtgggtgtactcacattttaaagtatgaaccacagttaactagtggtctcaggggtagtgaaacactcacttttttttttgtttgtttttttttgtttgtttgttgaaatggcttagttgaagtatacttaaggtactgatcatgctgtgttagtaatttgggcggggaggggggtaactcagccatgttttgtgttggcataacaaaactgttaatgattgttgattacacttttaagtgaatttgtcttttatgaggaacccagtgcaagtcactaaatattgtctaatagtgacatctgcataagacttgtaatagctgaagttaattgagcttaaaggaattgttaccattaaagtctgtgtttaaagaca

SEQ ID NO: 406140 - DNA, 3967 bp, Homo sapiens
aaaaaaaaatttcaatagttaaaaatggatgctgagtttaaaaaaaaaaaaaaaaaaggttgagttgagagaataaggagattagaaaacaaaaaaggtacttagccccatgagagtttttttggtttgttttcaggtagaaaatagagttagtggattggggaggaaggatggttcaggaagaacaaagaatttaagacagttgagggcctctgaaagtggtcttggaagttcaacaaataacgtgaatgttgagctctctctggtctaagctcttaaactatgagaatatctaattatagctatttcggtttgtaagagattggcttttatgtaaagattgtctcagcatatgttcaggcatgttctctctcctaatggaatatattatttatgtgaattgtgatggagtgtgcctttaaaaatagggtgaaagtaactgaaagcagtggactcgcttgttttcttaaattaagcttatgtgactcacccattttctgtcttggtgtaggaacttagtgatttggcccgtgaccctccagcacaatgttctgcaggtccagttggggatgatatgtttcattggcaagccacaattatgggacctaatgacagcccatatcaaggcggtgtattctttttgacaattcattttcctacagactaccccttcaaaccacctaaggttgcatttacaacaagaatttatcatccaaatattaacagtaatggcagcatttgtctcgatattctaagatcacagtggtcgcctgctttaacaatttctaaagttcttttatccatttgttcactgctatgtgatccaaacccagatgaccccctagtgccagagattgcacggatctataaaacagacagagataagtacaacagaatatctcgggaatggactcagaagtatgccatgtgatgctaccttaaagtcagaataacctgcattatagctggaataaactttaaattactgttccttttttgattttcttatccggctgctcccctatcagacctcatcttttttaattttattttttgtttacctccctccattcattcacatgctcatctgagaagacttaagttcttccagctttggacaataactgcttttagaaactgtaaagtagttacaagagaacagttgcccaagactcagaatttttaaaaaaaaaaatggagcatgtgtattatgtggccaatgtcttcactctaacttggttatgagactaaaaccattcctcactgctctaacatgctgaagaaatcatctgagggggagggagatggatgctcagttgtcacatcaaaggatacagcattattctagcagcatccattcttgtttaagccttccactgttagagatttgaggttacatgatatgctttatgctcataactgatgtggctggagaattggtattgaatttatagcatcagcagaacagaaaatgtgatgtattttatgcatgtcaataaaggaatgacctgttcttgttctacagagaatggaaattggaagtcaaacaccctttgtattccaaaatagggtctcaaacattttgtaattttcatttaaattgttaggaggcttggagctattagttaatctatcttccaatacactgtttaatatagcactgaataaatgatgcaagttgtcaatggatgagtgatcaactaatagctctgctagtaattgatttatttttcttcaataaagttgcataaaccaatgagttagctgcctggattaatcagtatgggaaacaatcttttgtaaatgcaaagctgttttttgtatatactgttgggatttgcttcattgtttgacatcaaatgatgatgtaaagttcgaaagagtgaatattttgccatgttcagttaaagtgcacagtctgttacaggttgacacattgcttgacctgatttatgcagaattaataagctatttggatagtgtagctttaatgtgctgcacatgatactggcagccctagagttcatagatggacttttgggacccagcagttttgaaatgtgtttatggagtttaagaaatttattttccaggtgcagcccctgtctaactgaaatttctcttcaccttgtacacttgacagctgaaaaaaaacaacatgggagtaataatgggtcaaaatttgcaaaataaagtactgttttggtgtgggagttgtcatgaggctgtgttgaagtgacttatctatgtgggatattgagtatccattgaaatggatttgttcagccatttacattaatgagcatttaaatgcaacagatatcatttcaggtgacttaacatgaatgaataaaagtcaatgctattggattgttttttgtttgacaagtgctatctgtgccactgatttaacttctgtagtaacaagggcattaccattcttcacctttcctaattctgatcccatagttttacatttttcctgtttattttgattttgttcactgctttatttcttaaagttctagcacatctgtgactcctccacttccacatttttgcactgcttacacttacgtgcaatcttattccttgtctgcacacacatgtggaaagctagaaataaatgttaaaacttactttttataaacattttaatatgtagtttggacatgatttattgacttaaggttcttctctaaactggaagtgaaatgcatgccttctgaagatgttctggctttgttaattctgtaatcatttcattggggaaaaaaccagctacgcagtttttccaatgagtgaattttttcattttgtgttttgcttaaaacggctccttcagggtagatgtcatactgcataacttttttggattcaaattatgaatgagaaattagttaacattctgctccacaaggtaagaaaaactgctctttggctctattttcaaaattacttctgagatgcatatagtctcaaaataacagctttagtaggcatatcacttcttgaaagccaaacatgagtgtaagacacttttatgaaacacggtggatccctaactggctttcaaattgacctttatagccttagacaacccttaggtatttacggagatgacttctttgattgtcataacaattagtggatgtgtccagttctctgtatctttgacttgatgctttatacatcatttcatttgttgcttctaagggaataagccatagaggcttctccaggtttaaaagaacagtaaagtacctggaaaaccaacatttttgaatgtatggacactggacatgagatatgtacaatgaaatcttaaaagaatctaagaatttgccctctttgccccactccacccagtaatttgacattactagtgccatgtataggacccaactgagtattagaatcagttttgactatgtctttgtatttcctaaatcttttaatgcataaaccgaattagggtccagttggcctgttaatggtaaatttacattttaaatgactcagtttgtttttcctgggcgagtttgcaatgtgataatcagattttttaaaactgattaatttgctttcttgtgtgggtgtactcacattttaaagtatgaaccacagttaactagtggtctcaggggtagtgaaacactcacttttttttttgtttgtttttttttgtttgtttgttgaaatggcttagttgaagtatacttaaggtactgatcatgctgtgttagtaatttgggcggggaggggggtaactcagccatgttttgtgttggcataacaaaactgttaatgattgttgattacacttttaagtgaatttgtcttttatgaggaacccagtgcaagtcactaaatattgtctaatagtgacatctgcataagacttgtaatagctgaagttaattgagcttaaaggaattgttaccattaaagtctgtgtttaaagaca

SEQ ID NO: 406141 - DNA, 4190 bp, Homo sapiens
cgcggcctctcctgctggaggaggagggggaatgggcgcgtctcgcgcctaagccggagcctcagggacagcgcgggcgcgtggtggaggtggctgggcgggcgcgcgcgggagcgcgctggaaggcggagtgagtgtacggtggcgtcaggggtgacacagaatagctcgctgcgaggatagcaatacacatcaagtctcccttcctttatttccttccttttcccggccgcacctttggacagaaaccgaaagcagcccggcgtccgtccggagtcttatgcttccccctccccccttgcctttctttgccctagtgacgccggtatagcgccgactaggccccggctcctcctctgctgggctccggaccctgccccgcacccacccctttctcctacgcctcttcctctcccacccgggtctcttcctttctagaggccgggaagttaaacttgtagccaccacctccgctcttcccgtcaccctcgcccccacttcgggccgaaagcacggtacagaggctgttggtggctttgccacgccaccccacccaccccggatcgcggctgtcttaagggacctggattcatcaggggctcttcggggcctgtgcgagtgctgatctgctccgtttttgcaaaaggcgcctgtgtctggcagagctggtgtgagacgagacaatcctgccccgccgccgggataatcaagagttttggccggacctttgagcatacaccgagagagtgaggagccagacgacaagcacacactatggcgctgaaacggattaataagtgtttcattggcaagccacaattatgggacctaatgacagcccatatcaaggcggtgtattctttttgacaattcattttcctacagactaccccttcaaaccacctaaggttgcatttacaacaagaatttatcatccaaatattaacagtaatggcagcatttgtctcgatattctaagatcacagtggtcgcctgctttaacaatttctaaagttcttttatccatttgttcactgctatgtgatccaaacccagatgaccccctagtgccagagattgcacggatctataaaacagacagagataagtacaacagaatatctcgggaatggactcagaagtatgccatgtgatgctaccttaaagtcagaataacctgcattatagctggaataaactttaaattactgttccttttttgattttcttatccggctgctcccctatcagacctcatcttttttaattttattttttgtttacctccctccattcattcacatgctcatctgagaagacttaagttcttccagctttggacaataactgcttttagaaactgtaaagtagttacaagagaacagttgcccaagactcagaatttttaaaaaaaaaaatggagcatgtgtattatgtggccaatgtcttcactctaacttggttatgagactaaaaccattcctcactgctctaacatgctgaagaaatcatctgagggggagggagatggatgctcagttgtcacatcaaaggatacagcattattctagcagcatccattcttgtttaagccttccactgttagagatttgaggttacatgatatgctttatgctcataactgatgtggctggagaattggtattgaatttatagcatcagcagaacagaaaatgtgatgtattttatgcatgtcaataaaggaatgacctgttcttgttctacagagaatggaaattggaagtcaaacaccctttgtattccaaaatagggtctcaaacattttgtaattttcatttaaattgttaggaggcttggagctattagttaatctatcttccaatacactgtttaatatagcactgaataaatgatgcaagttgtcaatggatgagtgatcaactaatagctctgctagtaattgatttatttttcttcaataaagttgcataaaccaatgagttagctgcctggattaatcagtatgggaaacaatcttttgtaaatgcaaagctgttttttgtatatactgttgggatttgcttcattgtttgacatcaaatgatgatgtaaagttcgaaagagtgaatattttgccatgttcagttaaagtgcacagtctgttacaggttgacacattgcttgacctgatttatgcagaattaataagctatttggatagtgtagctttaatgtgctgcacatgatactggcagccctagagttcatagatggacttttgggacccagcagttttgaaatgtgtttatggagtttaagaaatttattttccaggtgcagcccctgtctaactgaaatttctcttcaccttgtacacttgacagctgaaaaaaaacaacatgggagtaataatgggtcaaaatttgcaaaataaagtactgttttggtgtgggagttgtcatgaggctgtgttgaagtgacttatctatgtgggatattgagtatccattgaaatggatttgttcagccatttacattaatgagcatttaaatgcaacagatatcatttcaggtgacttaacatgaatgaataaaagtcaatgctattggattgttttttgtttgacaagtgctatctgtgccactgatttaacttctgtagtaacaagggcattaccattcttcacctttcctaattctgatcccatagttttacatttttcctgtttattttgattttgttcactgctttatttcttaaagttctagcacatctgtgactcctccacttccacatttttgcactgcttacacttacgtgcaatcttattccttgtctgcacacacatgtggaaagctagaaataaatgttaaaacttactttttataaacattttaatatgtagtttggacatgatttattgacttaaggttcttctctaaactggaagtgaaatgcatgccttctgaagatgttctggctttgttaattctgtaatcatttcattggggaaaaaaccagctacgcagtttttccaatgagtgaattttttcattttgtgttttgcttaaaacggctccttcagggtagatgtcatactgcataacttttttggattcaaattatgaatgagaaattagttaacattctgctccacaaggtaagaaaaactgctctttggctctattttcaaaattacttctgagatgcatatagtctcaaaataacagctttagtaggcatatcacttcttgaaagccaaacatgagtgtaagacacttttatgaaacacggtggatccctaactggctttcaaattgacctttatagccttagacaacccttaggtatttacggagatgacttctttgattgtcataacaattagtggatgtgtccagttctctgtatctttgacttgatgctttatacatcatttcatttgttgcttctaagggaataagccatagaggcttctccaggtttaaaagaacagtaaagtacctggaaaaccaacatttttgaatgtatggacactggacatgagatatgtacaatgaaatcttaaaagaatctaagaatttgccctctttgccccactccacccagtaatttgacattactagtgccatgtataggacccaactgagtattagaatcagttttgactatgtctttgtatttcctaaatcttttaatgcataaaccgaattagggtccagttggcctgttaatggtaaatttacattttaaatgactcagtttgtttttcctgggcgagtttgcaatgtgataatcagattttttaaaactgattaatttgctttcttgtgtgggtgtactcacattttaaagtatgaaccacagttaactagtggtctcaggggtagtgaaacactcacttttttttttgtttgtttttttttgtttgtttgttgaaatggcttagttgaagtatacttaaggtactgatcatgctgtgttagtaatttgggcggggaggggggtaactcagccatgttttgtgttggcataacaaaactgttaatgattgttgattacacttttaagtgaatttgtcttttatgaggaacccagtgcaagtcactaaatattgtctaatagtgacatctgcataagacttgtaatagctgaagttaattgagcttaaaggaattgttaccattaaagtctgtgtttaaagaca

SEQ ID NO: 406142 - DNA, 3416 bp, Homo sapiens
ggaatatttagcaataatattttaaatttgagttaagcatacttttctttttacagaatgacagcccatatcaaggcggtgtattctttttgacaattcattttcctacagactaccccttcaaaccacctaaggttgcatttacaacaagaatttatcatccaaatattaacagtaatggcagcatttgtctcgatattctaagatcacagtggtcgcctgctttaacaatttctaaagttcttttatccatttgttcactgctatgtgatccaaacccagatgaccccctagtgccagagattgcacggatctataaaacagacagagataagtacaacagaatatctcgggaatggactcagaagtatgccatgtgatgctaccttaaagtcagaataacctgcattatagctggaataaactttaaattactgttccttttttgattttcttatccggctgctcccctatcagacctcatcttttttaattttattttttgtttacctccctccattcattcacatgctcatctgagaagacttaagttcttccagctttggacaataactgcttttagaaactgtaaagtagttacaagagaacagttgcccaagactcagaatttttaaaaaaaaaaatggagcatgtgtattatgtggccaatgtcttcactctaacttggttatgagactaaaaccattcctcactgctctaacatgctgaagaaatcatctgagggggagggagatggatgctcagttgtcacatcaaaggatacagcattattctagcagcatccattcttgtttaagccttccactgttagagatttgaggttacatgatatgctttatgctcataactgatgtggctggagaattggtattgaatttatagcatcagcagaacagaaaatgtgatgtattttatgcatgtcaataaaggaatgacctgttcttgttctacagagaatggaaattggaagtcaaacaccctttgtattccaaaatagggtctcaaacattttgtaattttcatttaaattgttaggaggcttggagctattagttaatctatcttccaatacactgtttaatatagcactgaataaatgatgcaagttgtcaatggatgagtgatcaactaatagctctgctagtaattgatttatttttcttcaataaagttgcataaaccaatgagttagctgcctggattaatcagtatgggaaacaatcttttgtaaatgcaaagctgttttttgtatatactgttgggatttgcttcattgtttgacatcaaatgatgatgtaaagttcgaaagagtgaatattttgccatgttcagttaaagtgcacagtctgttacaggttgacacattgcttgacctgatttatgcagaattaataagctatttggatagtgtagctttaatgtgctgcacatgatactggcagccctagagttcatagatggacttttgggacccagcagttttgaaatgtgtttatggagtttaagaaatttattttccaggtgcagcccctgtctaactgaaatttctcttcaccttgtacacttgacagctgaaaaaaaacaacatgggagtaataatgggtcaaaatttgcaaaataaagtactgttttggtgtgggagttgtcatgaggctgtgttgaagtgacttatctatgtgggatattgagtatccattgaaatggatttgttcagccatttacattaatgagcatttaaatgcaacagatatcatttcaggtgacttaacatgaatgaataaaagtcaatgctattggattgttttttgtttgacaagtgctatctgtgccactgatttaacttctgtagtaacaagggcattaccattcttcacctttcctaattctgatcccatagttttacatttttcctgtttattttgattttgttcactgctttatttcttaaagttctagcacatctgtgactcctccacttccacatttttgcactgcttacacttacgtgcaatcttattccttgtctgcacacacatgtggaaagctagaaataaatgttaaaacttactttttataaacattttaatatgtagtttggacatgatttattgacttaaggttcttctctaaactggaagtgaaatgcatgccttctgaagatgttctggctttgttaattctgtaatcatttcattggggaaaaaaccagctacgcagtttttccaatgagtgaattttttcattttgtgttttgcttaaaacggctccttcagggtagatgtcatactgcataacttttttggattcaaattatgaatgagaaattagttaacattctgctccacaaggtaagaaaaactgctctttggctctattttcaaaattacttctgagatgcatatagtctcaaaataacagctttagtaggcatatcacttcttgaaagccaaacatgagtgtaagacacttttatgaaacacggtggatccctaactggctttcaaattgacctttatagccttagacaacccttaggtatttacggagatgacttctttgattgtcataacaattagtggatgtgtccagttctctgtatctttgacttgatgctttatacatcatttcatttgttgcttctaagggaataagccatagaggcttctccaggtttaaaagaacagtaaagtacctggaaaaccaacatttttgaatgtatggacactggacatgagatatgtacaatgaaatcttaaaagaatctaagaatttgccctctttgccccactccacccagtaatttgacattactagtgccatgtataggacccaactgagtattagaatcagttttgactatgtctttgtatttcctaaatcttttaatgcataaaccgaattagggtccagttggcctgttaatggtaaatttacattttaaatgactcagtttgtttttcctgggcgagtttgcaatgtgataatcagattttttaaaactgattaatttgctttcttgtgtgggtgtactcacattttaaagtatgaaccacagttaactagtggtctcaggggtagtgaaacactcacttttttttttgtttgtttttttttgtttgtttgttgaaatggcttagttgaagtatacttaaggtactgatcatgctgtgttagtaatttgggcggggaggggggtaactcagccatgttttgtgttggcataacaaaactgttaatgattgttgattacacttttaagtgaatttgtcttttatgaggaacccagtgcaagtcactaaatattgtctaatagtgacatctgcataagacttgtaatagctgaagttaattgagcttaaaggaattgttaccattaaagtctgtgtttaaagaca

SEQ ID NO: 406143 - DNA, 2430 bp, Homo sapiens
ctctaccaaccaccggcataagcattcaggggcgttgctttcctggcagtggcccgccccagttcgagccggtgccttactgcgtctcgcgagaacttatgcattttggaggcggaaccccgtcaggaaaagcgcacaaaactgctcttaagtcattgcagagctaccgcttcggttagccagccacgaagttctcgcgagagtcgtctcctcgataccaagtgaggaaactgggggacgctgtggggaggggcgtggggctggatcgcgcagcggctgcttcctttaccttcctcccatggtctccttccggttctcgatgcttctctgagcctaagggtttccgccactcgttcaccctccccccagctcatgatcttcctccctcccccgccctcctggtccaatctccgatctgtttagtaagaaggtgctgttccgagaaggagaaggaaaagggcttgacacgtattcactcggccccggacgtgggaagcaagccgtctggcttcggcctcacatcggtcttgtgctcgggacggcggcgttggcggactgatccgcggcggtgaagaggcaggaggagggggaggggcggagcgtggcagctggcagtagttccgtcagagcggacatcttgtggctgtgtcgtgcgcgtgagccccgtagggccggggaggcaccagctgccgcgcggggaggaggccgaggccgcagcttgagggaggccccggcccctctgcgcctgtgtctggcagagctggtgtgagacgagacaatcctgccccgccgccgggataatcaagagttttggccggacctttgagcatacaccgagagagtgaggagccagacgacaagcacacactatggcgctgaaacggattaataaggaacttagtgatttggcccgtgaccctccagcacaatgttctgcaggtccagttggggatgatatgtttcattggcaagccacaattatgggacctaatgacagcccatatcaaggcggtgtattctttttgacaattcattttcctacagactaccccttcaaaccacctaaggttgcatttacaacaagaatttatcatccaaatattaacagtaatggcagcatttgtctcgatattctaagatcacagtggtcgcctgctttaacaatttctaaagttcttttatccatttgttcactgctatgtgatccaaacccagatgaccccctagtgccagagattgcacggatctataaaacagacagagataagtacaacagaatatctcgggaatggactcagaagtatgccatgtgatgctaccttaaagtcagaataacctgcattatagctggaataaactttaaattactgttccttttttgattttcttatccggctgctcccctatcagacctcatcttttttaattttattttttgtttacctccctccattcattcacatgctcatctgagaagacttaagttcttccagctttggacaataactgcttttagaaactgtaaagtagttacaagagaacagttgcccaagactcagaatttttaaaaaaaaaaatggagcatgtgtattatgtggccaatgtcttcactctaacttggttatgagactaaaaccattcctcactgctctaacatgctgaagaaatcatctgagggggagggagatggatgctcagttgtcacatcaaaggatacagcattattctagcagcatccattcttgtttaagccttccactgttagagatttgaggttacatgatatgctttatgctcataactgatgtggctggagaattggtattgaatttatagcatcagcagaacagaaaatgtgatgtattttatgcatgtcaataaaggaatgacctgttcttgttctacagagaatggaaattggaagtcaaacaccctttgtattccaaaatagggtctcaaacattttgtaattttcatttaaattgttaggaggcttggagctattagttaatctatcttccaatacactgtttaatatagcactgaataaatgatgcaagttgtcaatggatgagtgatcaactaatagctctgctagtaattgatttatttttcttcaataaagttgcataaaccaatgagttagctgcctggattaatcagtatgggaaacaatcttttgtaaatgcaaagctgttttttgtatatactgttgggatttgcttcattgtttgacatcaaatgatgatgtaaagttcgaaagagtgaatattttgccatgttcagttaaagtgcacagtctgttacaggttgacacattgcttgacctgatttatgcagaattaataagctatgaactctagggctgccagtatcatgtgcagcacattaaaggtacactatccaaatagcttattaattctgtcgacc

SEQ ID NO: 406144 - DNA, 3673 bp, Homo sapiens
tgacagactcagtgtactgttgtaactataatgaaactttaaatgagatggtctacaaatttgggttacatccaaaagttagggcttttataaatgaatgtgttaaatacctttaatttgccctttgattcatgatatggtagggccacagtaccctttgcaactttacatcatatgagtaatgaaatttttatccaaaagtttaggttcctgttgtaaaaagaggaggcagggggttgtggccagattgtaaaaatcagttcctataatatttagaacttctatgctaatagatgacatttttaacattgtggcttgattattttacgtttggctttagcaagatgttggttttgatttgaataaaatacttaaaagttctttgttttaggttgcatttacaacaagaatttatcatccaaatattaacagtaatggcagcatttgtctcgatattctaagatcacagtggtcgcctgctttaacaatttctaaagttcttttatccatttgttcactgctatgtgatccaaacccagatgaccccctagtgccagagattgcacggatctataaaacagacagagataagtacaacagaatatctcgggaatggactcagaagtatgccatgtgatgctaccttaaagtcagaataacctgcattatagctggaataaactttaaattactgttccttttttgattttcttatccggctgctcccctatcagacctcatcttttttaattttattttttgtttacctccctccattcattcacatgctcatctgagaagacttaagttcttccagctttggacaataactgcttttagaaactgtaaagtagttacaagagaacagttgcccaagactcagaatttttaaaaaaaaaaatggagcatgtgtattatgtggccaatgtcttcactctaacttggttatgagactaaaaccattcctcactgctctaacatgctgaagaaatcatctgagggggagggagatggatgctcagttgtcacatcaaaggatacagcattattctagcagcatccattcttgtttaagccttccactgttagagatttgaggttacatgatatgctttatgctcataactgatgtggctggagaattggtattgaatttatagcatcagcagaacagaaaatgtgatgtattttatgcatgtcaataaaggaatgacctgttcttgttctacagagaatggaaattggaagtcaaacaccctttgtattccaaaatagggtctcaaacattttgtaattttcatttaaattgttaggaggcttggagctattagttaatctatcttccaatacactgtttaatatagcactgaataaatgatgcaagttgtcaatggatgagtgatcaactaatagctctgctagtaattgatttatttttcttcaataaagttgcataaaccaatgagttagctgcctggattaatcagtatgggaaacaatcttttgtaaatgcaaagctgttttttgtatatactgttgggatttgcttcattgtttgacatcaaatgatgatgtaaagttcgaaagagtgaatattttgccatgttcagttaaagtgcacagtctgttacaggttgacacattgcttgacctgatttatgcagaattaataagctatttggatagtgtagctttaatgtgctgcacatgatactggcagccctagagttcatagatggacttttgggacccagcagttttgaaatgtgtttatggagtttaagaaatttattttccaggtgcagcccctgtctaactgaaatttctcttcaccttgtacacttgacagctgaaaaaaaacaacatgggagtaataatgggtcaaaatttgcaaaataaagtactgttttggtgtgggagttgtcatgaggctgtgttgaagtgacttatctatgtgggatattgagtatccattgaaatggatttgttcagccatttacattaatgagcatttaaatgcaacagatatcatttcaggtgacttaacatgaatgaataaaagtcaatgctattggattgttttttgtttgacaagtgctatctgtgccactgatttaacttctgtagtaacaagggcattaccattcttcacctttcctaattctgatcccatagttttacatttttcctgtttattttgattttgttcactgctttatttcttaaagttctagcacatctgtgactcctccacttccacatttttgcactgcttacacttacgtgcaatcttattccttgtctgcacacacatgtggaaagctagaaataaatgttaaaacttactttttataaacattttaatatgtagtttggacatgatttattgacttaaggttcttctctaaactggaagtgaaatgcatgccttctgaagatgttctggctttgttaattctgtaatcatttcattggggaaaaaaccagctacgcagtttttccaatgagtgaattttttcattttgtgttttgcttaaaacggctccttcagggtagatgtcatactgcataacttttttggattcaaattatgaatgagaaattagttaacattctgctccacaaggtaagaaaaactgctctttggctctattttcaaaattacttctgagatgcatatagtctcaaaataacagctttagtaggcatatcacttcttgaaagccaaacatgagtgtaagacacttttatgaaacacggtggatccctaactggctttcaaattgacctttatagccttagacaacccttaggtatttacggagatgacttctttgattgtcataacaattagtggatgtgtccagttctctgtatctttgacttgatgctttatacatcatttcatttgttgcttctaagggaataagccatagaggcttctccaggtttaaaagaacagtaaagtacctggaaaaccaacatttttgaatgtatggacactggacatgagatatgtacaatgaaatcttaaaagaatctaagaatttgccctctttgccccactccacccagtaatttgacattactagtgccatgtataggacccaactgagtattagaatcagttttgactatgtctttgtatttcctaaatcttttaatgcataaaccgaattagggtccagttggcctgttaatggtaaatttacattttaaatgactcagtttgtttttcctgggcgagtttgcaatgtgataatcagattttttaaaactgattaatttgctttcttgtgtgggtgtactcacattttaaagtatgaaccacagttaactagtggtctcaggggtagtgaaacactcacttttttttttgtttgtttttttttgtttgtttgttgaaatggcttagttgaagtatacttaaggtactgatcatgctgtgttagtaatttgggcggggaggggggtaactcagccatgttttgtgttggcataacaaaactgttaatgattgttgattacacttttaagtgaatttgtcttttatgaggaacccagtgcaagtcactaaatattgtctaatagtgacatctgcataagacttgtaatagctgaagttaattgagcttaaaggaattgttaccattaaagtctgtgtttaaagaca

SEQ ID NO: 406145 - DNA, 4284 bp, Homo sapiens
ctctaccaaccaccggcataagcattcaggggcgttgctttcctggcagtggcccgccccagttcgagccggtgccttactgcgtctcgcgagaacttatgcattttggaggcggaaccccgtcaggaaaagcgcacaaaactgctcttaagtcattgcagagctaccgcttcggttagccagccacgaagttctcgcgagagtcgtctcctcgataccaagtgaggaaactgggggacgctgtggggaggggcgtggggctggatcgcgcagcggctgcttcctttaccttcctcccatggtctccttccggttctcgatgcttctctgagcctaagggtttccgccactcgttcaccctccccccagctcatgatcttcctccctcccccgccctcctggtccaatctccgatctgtttagtaagaaggtgctgttccgagaaggagaaggaaaagggcttgacacgtattcactcggccccggacgtgggaagcaagccgtctggcttcggcctcacatcggtcttgtgctcgggacggcggcgttggcggactgatccgcggcggtgaagaggcaggaggagggggaggggcggagcgtggcagctggcagtagttccgtcagagcggacatcttgtggctgtgtcgtgcgcgtgagccccgtagggccggggaggcaccagctgccgcgcggggaggaggccgaggccgcagcttgagggaggccccggcccctctgcgcctgtgtctggcagagctggtgtgagacgagacaatcctgccccgccgccgggataatcaagagttttggccggacctttgagcatacaccgagagagtgaggagccagacgacaagcacacactatggcgctgaaacggattaataaggaacttagtgatttggcccgtgaccctccagcacaatgttctgcaggtccagttggggatgatatgtttcattggcaagccacaattatgggacctaatgacagcccatatcaaggcggtgtattctttttgacaattcattttcctacagactaccccttcaaaccacctaaggttgcatttacaacaagaatttatcatccaaatattaacagtaatggcagcatttgtctcgatattctaagatcacagtggtcgcctgctttaacaatttctaaagttcttttatccatttgttcactgctatgtgatccaaacccagatgaccccctagtgccagagattgcacggatctataaaacagacagagataagtacaacagaatatctcgggaatggactcagaagtatgccatgtgatgctaccttaaagtcagaataacctgcattatagctggaataaactttaaattactgttccttttttgattttcttatccggctgctcccctatcagacctcatcttttttaattttattttttgtttacctccctccattcattcacatgctcatctgagaagacttaagttcttccagctttggacaataactgcttttagaaactgtaaagtagttacaagagaacagttgcccaagactcagaatttttaaaaccattcctcactgctctaacatgctgaagaaatcatctgagggggagggagatggatgctcagttgtcacatcaaaggatacagcattattctagcagcatccattcttgtttaagccttccactgttagagatttgaggttacatgatatgctttatgctcataactgatgtggctggagaattggtattgaatttatagcatcagcagaacagaaaatgtgatgtattttatgcatgtcaataaaggaatgacctgttcttgttctacagagaatggaaattggaagtcaaacaccctttgtattccaaaatagggtctcaaacattttgtaattttcatttaaattgttaggaggcttggagctattagttaatctatcttccaatacactgtttaatatagcactgaataaatgatgcaagttgtcaatggatgagtgatcaactaatagctctgctagtaattgatttatttttcttcaataaagttgcataaaccaatgagttagctgcctggattaatcagtatgggaaacaatcttttgtaaatgcaaagctgttttttgtatatactgttgggatttgcttcattgtttgacatcaaatgatgatgtaaagttcgaaagagtgaatattttgccatgttcagttaaagtgcacagtctgttacaggttgacacattgcttgacctgatttatgcagaattaataagctatttggatagtgtagctttaatgtgctgcacatgatactggcagccctagagttcatagatggacttttgggacccagcagttttgaaatgtgtttatggagtttaagaaatttattttccaggtgcagcccctgtctaactgaaatttctcttcaccttgtacacttgacagctgaaaaaaaacaacatgggagtaataatgggtcaaaatttgcaaaataaagtactgttttggtgtgggagttgtcatgaggctgtgttgaagtgacttatctatgtgggatattgagtatccattgaaatggatttgttcagccatttacattaatgagcatttaaatgcaacagatatcatttcaggtgacttaacatgaatgaataaaagtcaatgctattggattgttttttgtttgacaagtgctatctgtgccactgatttaacttctgtagtaacaagggcattaccattcttcacctttcctaattctgatcccatagttttacatttttcctgtttattttgattttgttcactgctttatttcttaaagttctagcacatctgtgactcctccacttccacatttttgcactgcttacacttacgtgcaatcttattccttgtctgcacacacatgtggaaagctagaaataaatgttaaaacttactttttataaacattttaatatgtagtttggacatgatttattgacttaaggttcttctctaaactggaagtgaaatgcatgccttctgaagatgttctggctttgttaattctgtaatcatttcattggggaaaaaaccagctacgcagtttttccaatgagtgaattttttcattttgtgttttgcttaaaacggctccttcagggtagatgtcatactgcataacttttttggattcaaattatgaatgagaaattagttaacattctgctccacaaggtaagaaaaactgctctttggctctattttcaaaattacttctgagatgcatatagtctcaaaataacagctttagtaggcatatcacttcttgaaagccaaacatgagtgtaagacacttttatgaaacacggtggatccctaactggctttcaaattgacctttatagccttagacaacccttaggtatttacggagatgacttctttgattgtcataacaattagtggatgtgtccagttctctgtatctttgacttgatgctttatacatcatttcatttgttgcttctaagggaataagccatagaggcttctccaggtttaaaagaacagtaaagtacctggaaaaccaacatttttgaatgtatggacactggacatgagatatgtacaatgaaatcttaaaagaatctaagaatttgccctctttgccccactccacccagtaatttgacattactagtgccatgtataggacccaactgagtattagaatcagttttgactatgtctttgtatttcctaaatcttttaatgcataaaccgaattagggtccagttggcctgttaatggtaaatttacattttaaatgactcagtttgtttttcctgggcgagtttgcaatgtgataatcagattttttaaaactgattaatttgctttcttgtgtgggtgtactcacattttaaagtatgaaccacagttaactagtggtctcaggggtagtgaaacactcacttttttttttgtttgtttttttttgtttgtttgttgaaatggcttagttgaagtatacttaaggtactgatcatgctgtgttagtaatttgggcggggaggggggtaactcagccatgttttgtgttggcataacaaaactgttaatgattgttgattacacttttaagtgaatttgtcttttatgaggaacccagtgcaagtcactaaatattgtctaatagtgacatctgcataagacttgtaatagctgaagttaattgagcttaaaggaattgttaccattaaagtctgtgtttaaagaca

SEQ ID NO: 406146 - DNA, 4089 bp, Homo sapiens
cgcggcctctcctgctggaggaggagggggaatgggcgcgtctcgcgcctaagccggagcctcagggacagcgcgggcgcgtggtggaggtggctgggcgggcgcgcgcgggagcgcgctggaaggcggagtgagtgtacggtggcgtcaggggtgacacagaatagctcgctgcgaggatagcaatacacatcaagtctcccttcctttatttccttccttttcccggccgcacctttggacagaaaccgaaagcagcccggcgtccgtccggagtcttatgcttccccctccccccttgcctttctttgccctagtgacgccggtatagcgccgactaggccccggctcctcctctgctgggctccggaccctgccccgcacccacccctttctcctacgcctcttcctctcccacccgggtctcttcctttctagaggccgggaagttaaacttgtagccaccacctccgctcttcccgtcaccctcgcccccacttcgggccgaaagcacggtacagaggctgttggtggctttgccacgccaccccacccaccccggatcgcggctgtcttaagggacctggattcatcaggggctcttcggggcctgtgcgagtgctgatctgctccgtttttgcaaaaggcgcctgtgtctggcagagctggtgtgagacgagacaatcctgccccgccgccgggataatcaagagttttggccggacctttgagcatacaccgagagagtgaggagccagacgacaagcacacactatggcgctgaaacggattaataaggaacttagtgatttggcccgtgaccctccagcacaatgttctgcaggtccagttggggatgatatgtttcattggcaagccacaattatgggacctaatgacagcccatatcaaggcggtgtattctttttgacaattcattttcctacagactaccccttcaaaccacctaaggagattgcacggatctataaaacagacagagataagtacaacagaatatctcgggaatggactcagaagtatgccatgtgatgctaccttaaagtcagaataacctgcattatagctggaataaactttaaattactgttccttttttgattttcttatccggctgctcccctatcagacctcatcttttttaattttattttttgtttacctccctccattcattcacatgctcatctgagaagacttaagttcttccagctttggacaataactgcttttagaaactgtaaagtagttacaagagaacagttgcccaagactcagaatttttaaaaaaaaaaatggagcatgtgtattatgtggccaatgtcttcactctaacttggttatgagactaaaaccattcctcactgctctaacatgctgaagaaatcatctgagggggagggagatggatgctcagttgtcacatcaaaggatacagcattattctagcagcatccattcttgtttaagccttccactgttagagatttgaggttacatgatatgctttatgctcataactgatgtggctggagaattggtattgaatttatagcatcagcagaacagaaaatgtgatgtattttatgcatgtcaataaaggaatgacctgttcttgttctacagagaatggaaattggaagtcaaacaccctttgtattccaaaatagggtctcaaacattttgtaattttcatttaaattgttaggaggcttggagctattagttaatctatcttccaatacactgtttaatatagcactgaataaatgatgcaagttgtcaatggatgagtgatcaactaatagctctgctagtaattgatttatttttcttcaataaagttgcataaaccaatgagttagctgcctggattaatcagtatgggaaacaatcttttgtaaatgcaaagctgttttttgtatatactgttgggatttgcttcattgtttgacatcaaatgatgatgtaaagttcgaaagagtgaatattttgccatgttcagttaaagtgcacagtctgttacaggttgacacattgcttgacctgatttatgcagaattaataagctatttggatagtgtagctttaatgtgctgcacatgatactggcagccctagagttcatagatggacttttgggacccagcagttttgaaatgtgtttatggagtttaagaaatttattttccaggtgcagcccctgtctaactgaaatttctcttcaccttgtacacttgacagctgaaaaaaaacaacatgggagtaataatgggtcaaaatttgcaaaataaagtactgttttggtgtgggagttgtcatgaggctgtgttgaagtgacttatctatgtgggatattgagtatccattgaaatggatttgttcagccatttacattaatgagcatttaaatgcaacagatatcatttcaggtgacttaacatgaatgaataaaagtcaatgctattggattgttttttgtttgacaagtgctatctgtgccactgatttaacttctgtagtaacaagggcattaccattcttcacctttcctaattctgatcccatagttttacatttttcctgtttattttgattttgttcactgctttatttcttaaagttctagcacatctgtgactcctccacttccacatttttgcactgcttacacttacgtgcaatcttattccttgtctgcacacacatgtggaaagctagaaataaatgttaaaacttactttttataaacattttaatatgtagtttggacatgatttattgacttaaggttcttctctaaactggaagtgaaatgcatgccttctgaagatgttctggctttgttaattctgtaatcatttcattggggaaaaaaccagctacgcagtttttccaatgagtgaattttttcattttgtgttttgcttaaaacggctccttcagggtagatgtcatactgcataacttttttggattcaaattatgaatgagaaattagttaacattctgctccacaaggtaagaaaaactgctctttggctctattttcaaaattacttctgagatgcatatagtctcaaaataacagctttagtaggcatatcacttcttgaaagccaaacatgagtgtaagacacttttatgaaacacggtggatccctaactggctttcaaattgacctttatagccttagacaacccttaggtatttacggagatgacttctttgattgtcataacaattagtggatgtgtccagttctctgtatctttgacttgatgctttatacatcatttcatttgttgcttctaagggaataagccatagaggcttctccaggtttaaaagaacagtaaagtacctggaaaaccaacatttttgaatgtatggacactggacatgagatatgtacaatgaaatcttaaaagaatctaagaatttgccctctttgccccactccacccagtaatttgacattactagtgccatgtataggacccaactgagtattagaatcagttttgactatgtctttgtatttcctaaatcttttaatgcataaaccgaattagggtccagttggcctgttaatggtaaatttacattttaaatgactcagtttgtttttcctgggcgagtttgcaatgtgataatcagattttttaaaactgattaatttgctttcttgtgtgggtgtactcacattttaaagtatgaaccacagttaactagtggtctcaggggtagtgaaacactcacttttttttttgtttgtttttttttgtttgtttgttgaaatggcttagttgaagtatacttaaggtactgatcatgctgtgttagtaatttgggcggggaggggggtaactcagccatgttttgtgttggcataacaaaactgttaatgattgttgattacacttttaagtgaatttgtcttttatgaggaacccagtgcaagtcactaaatattgtctaatagtgacatctgcataagacttgtaatagctgaagttaattgagcttaaaggaattgttaccattaaagtctgtgtttaaagaca

SEQ ID NO: 406147 - DNA, 4177 bp, Homo sapiens
cgcggcctctcctgctggaggaggagggggaatgggcgcgtctcgcgcctaagccggagcctcagggacagcgcgggcgcgtggtggaggtggctgggcgggcgcgcgcgggagcgcgctggaaggcggagtgagtgtacggtggcgtcaggggtgacacagaatagctcgctgcgaggatagcaatacacatcaagtctcccttcctttatttccttccttttcccggccgcacctttggacagaaaccgaaagcagcccggcgtccgtccggagtcttatgcttccccctccccccttgcctttctttgccctagtgacgccggtatagcgccgactaggccccggctcctcctctgctgggctccggaccctgccccgcacccacccctttctcctacgcctcttcctctcccacccgggtctcttcctttctagaggccgggaagttaaacttgtagccaccacctccgctcttcccgtcaccctcgcccccacttcgggccgaaagcacggtacagaggctgttggtggctttgccacgccaccccacccaccccggatcgcggctgtcttaagggacctggattcatcaggggctcttcggggcctgtgcgagtgctgatctgctccgtttttgcaaaaggcgcctgtgtctggcagagctggtgtgagacgagacaatcctgccccgccgccgggataatcaagagttttggccggacctttgagcatacaccgagagagtgaggagccagacgacaagcacacactatggcgctgaaacggattaataaggaacttagtgatttggcccgtgaccctccagcacaatgttctgcaggtccagttggggatgatatgtttcattggcaagccacaattatgggacctaatgacagcccatatcaaggcggtgtattctttttgacaattcattttcctacagactaccccttcaaaccacctaaggttgcatttacaacaagaatttatcatccaaatattaacagtaatggcagcatttgtctcgatattctaagatcacagtggtcgcctgctttaacaatttctaaagttcttttatccatttgttcactgctatgtgatccaaacccagatgaccccctagtgccagtgatgctaccttaaagtcagaataacctgcattatagctggaataaactttaaattactgttccttttttgattttcttatccggctgctcccctatcagacctcatcttttttaattttattttttgtttacctccctccattcattcacatgctcatctgagaagacttaagttcttccagctttggacaataactgcttttagaaactgtaaagtagttacaagagaacagttgcccaagactcagaatttttaaaaaaaaaaatggagcatgtgtattatgtggccaatgtcttcactctaacttggttatgagactaaaaccattcctcactgctctaacatgctgaagaaatcatctgagggggagggagatggatgctcagttgtcacatcaaaggatacagcattattctagcagcatccattcttgtttaagccttccactgttagagatttgaggttacatgatatgctttatgctcataactgatgtggctggagaattggtattgaatttatagcatcagcagaacagaaaatgtgatgtattttatgcatgtcaataaaggaatgacctgttcttgttctacagagaatggaaattggaagtcaaacaccctttgtattccaaaatagggtctcaaacattttgtaattttcatttaaattgttaggaggcttggagctattagttaatctatcttccaatacactgtttaatatagcactgaataaatgatgcaagttgtcaatggatgagtgatcaactaatagctctgctagtaattgatttatttttcttcaataaagttgcataaaccaatgagttagctgcctggattaatcagtatgggaaacaatcttttgtaaatgcaaagctgttttttgtatatactgttgggatttgcttcattgtttgacatcaaatgatgatgtaaagttcgaaagagtgaatattttgccatgttcagttaaagtgcacagtctgttacaggttgacacattgcttgacctgatttatgcagaattaataagctatttggatagtgtagctttaatgtgctgcacatgatactggcagccctagagttcatagatggacttttgggacccagcagttttgaaatgtgtttatggagtttaagaaatttattttccaggtgcagcccctgtctaactgaaatttctcttcaccttgtacacttgacagctgaaaaaaaacaacatgggagtaataatgggtcaaaatttgcaaaataaagtactgttttggtgtgggagttgtcatgaggctgtgttgaagtgacttatctatgtgggatattgagtatccattgaaatggatttgttcagccatttacattaatgagcatttaaatgcaacagatatcatttcaggtgacttaacatgaatgaataaaagtcaatgctattggattgttttttgtttgacaagtgctatctgtgccactgatttaacttctgtagtaacaagggcattaccattcttcacctttcctaattctgatcccatagttttacatttttcctgtttattttgattttgttcactgctttatttcttaaagttctagcacatctgtgactcctccacttccacatttttgcactgcttacacttacgtgcaatcttattccttgtctgcacacacatgtggaaagctagaaataaatgttaaaacttactttttataaacattttaatatgtagtttggacatgatttattgacttaaggttcttctctaaactggaagtgaaatgcatgccttctgaagatgttctggctttgttaattctgtaatcatttcattggggaaaaaaccagctacgcagtttttccaatgagtgaattttttcattttgtgttttgcttaaaacggctccttcagggtagatgtcatactgcataacttttttggattcaaattatgaatgagaaattagttaacattctgctccacaaggtaagaaaaactgctctttggctctattttcaaaattacttctgagatgcatatagtctcaaaataacagctttagtaggcatatcacttcttgaaagccaaacatgagtgtaagacacttttatgaaacacggtggatccctaactggctttcaaattgacctttatagccttagacaacccttaggtatttacggagatgacttctttgattgtcataacaattagtggatgtgtccagttctctgtatctttgacttgatgctttatacatcatttcatttgttgcttctaagggaataagccatagaggcttctccaggtttaaaagaacagtaaagtacctggaaaaccaacatttttgaatgtatggacactggacatgagatatgtacaatgaaatcttaaaagaatctaagaatttgccctctttgccccactccacccagtaatttgacattactagtgccatgtataggacccaactgagtattagaatcagttttgactatgtctttgtatttcctaaatcttttaatgcataaaccgaattagggtccagttggcctgttaatggtaaatttacattttaaatgactcagtttgtttttcctgggcgagtttgcaatgtgataatcagattttttaaaactgattaatttgctttcttgtgtgggtgtactcacattttaaagtatgaaccacagttaactagtggtctcaggggtagtgaaacactcacttttttttttgtttgtttttttttgtttgtttgttgaaatggcttagttgaagtatacttaaggtactgatcatgctgtgttagtaatttgggcggggaggggggtaactcagccatgttttgtgttggcataacaaaactgttaatgattgttgattacacttttaagtgaatttgtcttttatgaggaacccagtgcaagtcactaaatattgtctaatagtgacatctgcataagacttgtaatagctgaagttaattgagcttaaaggaattgttaccattaaagtctgtgtttaaagaca

SEQ ID NO: 406148 - DNA, 2185 bp, Homo sapiens
  misc_feature (2144)..(2144): n is a, c, g, or t
ctctaccaaccaccggcataagcattcaggggcgttgctttcctggcagtggcccgccccagttcgagccggtgccttactgcgtctcgcgagaacttatgcattttggaggcggaaccccgtcaggaaaagcgcacaaaactgctcttaagtcattgcagagctaccgcttcggttagccagccacgaagttctcgcgagagtcgtctcctcgataccaagtgaggaaactgggggacgctgtggggaggggcgtggggctggatcgcgcagcggctgcttcctttaccttcctcccatggtctccttccggttctcgatgcttctctgagcctaagggtttccgccactcgttcaccctccccccagctcatgatcttcctccctcccccgccctcctggtccaatctccgatctgtttagtaagaaggtgctgttccgagaaggagaaggaaaagggcttgacacgtattcactcggccccggacgtgggaagcaagccgtctggcttcggcctcacatcggtcttgtgctcgggacggcggcgttggcggactgatccgcggcggtgaagaggcaggaggagggggaggggcggagcgtggcagctggcagtagttccgtcagagcggacatcttgtggctgtgtcgtgcgcgtgagccccgtagggccggggaggcaccagctgccgcgcggggaggaggccgaggccgcagcttgagggaggccccggcccctctgcgcctgtgtctggcagagctggtgtgagacgagacaatcctgccccgccgccgggataatcaagagttttggccggacctttgagcatacaccgagagagtgaggagccagacgacaagcacacactatggcgctgaaacggattaataaggaacttagtgatttggcccgtgaccctccagcacaatgttctgcaggtccagttggggatgatatgtttcattggcaagccacaattatgggacctaatgacagcccatatcaaggcggtgtattctttttgacaattcattttcctacagactaccccttcaaaccacctaaggttgcatttacaacaagaatttatcatccaaatattaacagtaatggcagcatttgtctcgatattctaagatcacagtggtcgcctgctttaacaatttctaaagttcttttatccatttgttcactgctatgtgatccaaacccagatgaccccctagtgccagagattgcacggatctataaaacagacagagataagtacaacagaatatctcgggaatggactcagaagtatgccatgtgatgctaccttaaagtcagaataacctgcattatagctggaataaactttaaattactgttccttttttgattttcttatccggctgctcccctatcagacctcatcttttttaattttattttttgtttacctccctccattcattcacatgctcatctgagaagacttaagttcttccagctttggacaataactgcttttagaaactgtaaagtagttacaagagaacagttgcccaagactcagaatttttaaaaaaaaaaatggagcatgtgtattatgtggccaatgtcttcactctaacttggttatgagactaaaaccattcctcactgctctaacatgctgaagaaatcatctgagggggagggagatggatgctcagttgtcacatcaaaggatacagcattattctagcagcatccattcttgtttaagccttccactgttagagatttgaggttacatgatatgctttatgctcataactgatgtggctggagaattggtattgaatttatagcatcagcagaacagaaaatgtgatgtattttatgcatgtcaataaaggaatgacctgttcttgttctacagagaatggaaattggaagtcaaacaccctttgtattccaaaatagggtctcaaacattttgtaattttcatttaaattgttaggaggcttggagctattagttaatctatcttccaatacactgtttaatatagcactgaataaatgatgcaagttgtcaatggatgagtgatcaactaatagctctgctagtaattgatttatttttcttcaataaagttgcagatgccggccagcnccccttttccctattcaataaaacttacaacatggttttta

SEQ ID NO: 406149 - DNA, 3370 bp, Homo sapiens
tcggtggtagagaaagaaagggtcttttgatttttgttagcctcccaattttcagtgctgctttcttagttgtttttaaaatactactttcagagcatcaggctctcatttcccacattgctttgagtaccagtgctatttctcccttgttggcttttattctaatcatagtcattagagatgacttcatgatgagtctggagatgataaaatggaaatctttcccttccatttaaagtattaggaattctttattttaacttttaaaaataacatctttatttacaggtacaacagaatatctcgggaatggactcagaagtatgccatgtgatgctaccttaaagtcagaataacctgcattatagctggaataaactttaaattactgttccttttttgattttcttatccggctgctcccctatcagacctcatcttttttaattttattttttgtttacctccctccattcattcacatgctcatctgagaagacttaagttcttccagctttggacaataactgcttttagaaactgtaaagtagttacaagagaacagttgcccaagactcagaatttttaaaaaaaaaaatggagcatgtgtattatgtggccaatgtcttcactctaacttggttatgagactaaaaccattcctcactgctctaacatgctgaagaaatcatctgagggggagggagatggatgctcagttgtcacatcaaaggatacagcattattctagcagcatccattcttgtttaagccttccactgttagagatttgaggttacatgatatgctttatgctcataactgatgtggctggagaattggtattgaatttatagcatcagcagaacagaaaatgtgatgtattttatgcatgtcaataaaggaatgacctgttcttgttctacagagaatggaaattggaagtcaaacaccctttgtattccaaaatagggtctcaaacattttgtaattttcatttaaattgttaggaggcttggagctattagttaatctatcttccaatacactgtttaatatagcactgaataaatgatgcaagttgtcaatggatgagtgatcaactaatagctctgctagtaattgatttatttttcttcaataaagttgcataaaccaatgagttagctgcctggattaatcagtatgggaaacaatcttttgtaaatgcaaagctgttttttgtatatactgttgggatttgcttcattgtttgacatcaaatgatgatgtaaagttcgaaagagtgaatattttgccatgttcagttaaagtgcacagtctgttacaggttgacacattgcttgacctgatttatgcagaattaataagctatttggatagtgtagctttaatgtgctgcacatgatactggcagccctagagttcatagatggacttttgggacccagcagttttgaaatgtgtttatggagtttaagaaatttattttccaggtgcagcccctgtctaactgaaatttctcttcaccttgtacacttgacagctgaaaaaaaacaacatgggagtaataatgggtcaaaatttgcaaaataaagtactgttttggtgtgggagttgtcatgaggctgtgttgaagtgacttatctatgtgggatattgagtatccattgaaatggatttgttcagccatttacattaatgagcatttaaatgcaacagatatcatttcaggtgacttaacatgaatgaataaaagtcaatgctattggattgttttttgtttgacaagtgctatctgtgccactgatttaacttctgtagtaacaagggcattaccattcttcacctttcctaattctgatcccatagttttacatttttcctgtttattttgattttgttcactgctttatttcttaaagttctagcacatctgtgactcctccacttccacatttttgcactgcttacacttacgtgcaatcttattccttgtctgcacacacatgtggaaagctagaaataaatgttaaaacttactttttataaacattttaatatgtagtttggacatgatttattgacttaaggttcttctctaaactggaagtgaaatgcatgccttctgaagatgttctggctttgttaattctgtaatcatttcattggggaaaaaaccagctacgcagtttttccaatgagtgaattttttcattttgtgttttgcttaaaacggctccttcagggtagatgtcatactgcataacttttttggattcaaattatgaatgagaaattagttaacattctgctccacaaggtaagaaaaactgctctttggctctattttcaaaattacttctgagatgcatatagtctcaaaataacagctttagtaggcatatcacttcttgaaagccaaacatgagtgtaagacacttttatgaaacacggtggatccctaactggctttcaaattgacctttatagccttagacaacccttaggtatttacggagatgacttctttgattgtcataacaattagtggatgtgtccagttctctgtatctttgacttgatgctttatacatcatttcatttgttgcttctaagggaataagccatagaggcttctccaggtttaaaagaacagtaaagtacctggaaaaccaacatttttgaatgtatggacactggacatgagatatgtacaatgaaatcttaaaagaatctaagaatttgccctctttgccccactccacccagtaatttgacattactagtgccatgtataggacccaactgagtattagaatcagttttgactatgtctttgtatttcctaaatcttttaatgcataaaccgaattagggtccagttggcctgttaatggtaaatttacattttaaatgactcagtttgtttttcctgggcgagtttgcaatgtgataatcagattttttaaaactgattaatttgctttcttgtgtgggtgtactcacattttaaagtatgaaccacagttaactagtggtctcaggggtagtgaaacactcacttttttttttgtttgtttttttttgtttgtttgttgaaatggcttagttgaagtatacttaaggtactgatcatgctgtgttagtaatttgggcggggaggggggtaactcagccatgttttgtgttggcataacaaaactgttaatgattgttgattacacttttaagtgaatttgtcttttatgaggaacccagtgcaagtcactaaatattgtctaatagtgacatctgcataagacttgtaatagctgaagttaattgagcttaaaggaattgttaccattaaagtctgtgtttaaagaca

SEQ ID NO: 406150 - DNA, 2966 bp, Homo sapiens
agagagagagagagagagagagagagagagagagagagagagagagagagagagagagagagacctccattcattcacatgctcatctgagaagacttaagttcttccagctttggacaataactgcttttagaaactgtaaagtagttacaagagaacagttgcccaagactcagaatttttaaaaaaaaaaatggagcatgtgtattatgtggccaatgtcttcactctaacttggttatgagactaaaaccattcctcactgctctaacatgctgaagaaatcatctgagggggagggagatggatgctcagttgtcacatcaaaggatacagcattattctagcagcatccattcttgtttaagccttccactgttagagatttgaggttacatgatatgctttatgctcataactgatgtggctggagaattggtattgaatttatagcatcagcagaacagaaaatgtgatgtattttatgcatgtcaataaaggaatgacctgttcttgttctacagagaatggaaattggaagtcaaacaccctttgtattccaaaatagggtctcaaacattttgtaattttcatttaaattgttaggaggcttggagctattagttaatctatcttccaatacactgtttaatatagcactgaataaatgatgcaagttgtcaatggatgagtgatcaactaatagctctgctagtaattgatttatttttcttcaataaagttgcataaaccaatgagttagctgcctggattaatcagtatgggaaacaatcttttgtaaatgcaaagctgttttttgtatatactgttgggatttgcttcattgtttgacatcaaatgatgatgtaaagttcgaaagagtgaatattttgccatgttcagttaaagtgcacagtctgttacaggttgacacattgcttgacctgatttatgcagaattaataagctatttggatagtgtagctttaatgtgctgcacatgatactggcagccctagagttcatagatggacttttgggacccagcagttttgaaatgtgtttatggagtttaagaaatttattttccaggtgcagcccctgtctaactgaaatttctcttcaccttgtacacttgacagctgaaaaaaaacaacatgggagtaataatgggtcaaaatttgcaaaataaagtactgttttggtgtgggagttgtcatgaggctgtgttgaagtgacttatctatgtgggatattgagtatccattgaaatggatttgttcagccatttacattaatgagcatttaaatgcaacagatatcatttcaggtgacttaacatgaatgaataaaagtcaatgctattggattgttttttgtttgacaagtgctatctgtgccactgatttaacttctgtagtaacaagggcattaccattcttcacctttcctaattctgatcccatagttttacatttttcctgtttattttgattttgttcactgctttatttcttaaagttctagcacatctgtgactcctccacttccacatttttgcactgcttacacttacgtgcaatcttattccttgtctgcacacacatgtggaaagctagaaataaatgttaaaacttactttttataaacattttaatatgtagtttggacatgatttattgacttaaggttcttctctaaactggaagtgaaatgcatgccttctgaagatgttctggctttgttaattctgtaatcatttcattggggaaaaaaccagctacgcagtttttccaatgagtgaattttttcattttgtgttttgcttaaaacggctccttcagggtagatgtcatactgcataacttttttggattcaaattatgaatgagaaattagttaacattctgctccacaaggtaagaaaaactgctctttggctctattttcaaaattacttctgagatgcatatagtctcaaaataacagctttagtaggcatatcacttcttgaaagccaaacatgagtgtaagacacttttatgaaacacggtggatccctaactggctttcaaattgacctttatagccttagacaacccttaggtatttacggagatgacttctttgattgtcataacaattagtggatgtgtccagttctctgtatctttgacttgatgctttatacatcatttcatttgttgcttctaagggaataagccatagaggcttctccaggtttaaaagaacagtaaagtacctggaaaaccaacatttttgaatgtatggacactggacatgagatatgtacaatgaaatcttaaaagaatctaagaatttgccctctttgccccactccacccagtaatttgacattactagtgccatgtataggacccaactgagtattagaatcagttttgactatgtctttgtatttcctaaatcttttaatgcataaaccgaattagggtccagttggcctgttaatggtaaatttacattttaaatgactcagtttgtttttcctgggcgagtttgcaatgtgataatcagattttttaaaactgattaatttgctttcttgtgtgggtgtactcacattttaaagtatgaaccacagttaactagtggtctcaggggtagtgaaacactcacttttttttttgtttgtttttttttgtttgtttgttgaaatggcttagttgaagtatacttaaggtactgatcatgctgtgttagtaatttgggcggggaggggggtaactcagccatgttttgtgttggcataacaaaactgttaatgattgttgattacacttttaagtgaatttgtcttttatgaggaacccagtgcaagtcactaaatattgtctaatagtgacatctgcataagacttgtaatagctgaagttaattgagcttaaaggaattgttaccattaaagtctgtgtttaaagaca

SEQ ID NO: 406151 - DNA, 1372 bp, Homo sapiens
ctctaccaaccaccggcataagcattcaggggcgttgctttcctggcagtggcccgccccagttcgagccggtgccttactgcgtctcgcgagaacttatgcattttggaggcggaaccccgtcaggaaaagcgcacaaaactgctcttaagtcattgcagagctaccgcttcggttagccagccacgaagttctcgcgagagtcgtctcctcgataccaagtgaggaaactgggggacgctgtggggaggggcgtggggctggatcgcgcagcggctgcttcctttaccttcctcccatggtctccttccggttctcgatgcttctctgagcctaagggtttccgccactcgttcaccctccccccagctcatgatcttcctccctcccccgccctcctggtccaatctccgatctgtttagtaagaaggtgctgttccgagaaggagaaggaaaagggcttgacacgtattcactcggccccggacgtgggaagcaagccgtctggcttcggcctcacatcggtcttgtgctcgggacggcggcgttggcggactgatccgcggcggtgaagaggcaggaggagggggaggggcggagcgtggcagctggcagtagttccgtcagagcggacatcttgtggctgtgtcgtgcgcgtgagccccgtagggccggggaggcaccagctgccgcgcggggaggaggccgaggccgcagcttgagggaggccccggcccctctgcgcctgtgtctggcagagctggtgtgagacgagacaatcctgccccgccgccgggataatcaagagttttggccggacctttgagcatacaccgagagagtgaggagccagacgacaagcacacactatggcgctgaaacggattaataaggaacttagtgatttggcccgtgaccctccagcacaatgttctgcaggtccagttggggatgatatgtttcattggcaagccacaattatgggacctaatgacagcccatatcaaggcggtgtattctttttgacaattcattttcctacagactaccccttcaaaccacctaaggttgcatttacaacaagaatttatcatccaaatattaacagtaatggcagcatttgtctcgatattctaagatcacagtggtcgcctgctttaacaatttctaaagttcttttatccatttgttcactgctatgtgatccaaacccagatgaccccctagtgccagagattgcacggatctataaaacagacagagataagtacaacagaatatctcgggaatggactcagaagtatgccatgtgatgctaccttaaagtcagaataacctgcattatagctggaataaactttaaattactgtt

SEQ ID NO: 406152 - DNA, 1231 bp, Homo sapiens
cgcggcctctcctgctggaggaggagggggaatgggcgcgtctcgcgcctaagccggagcctcagggacagcgcgggcgcgtggtggaggtggctgggcgggcgcgcgcgggagcgcgctggaaggcggagtgagtgtacggtggcgtcaggggtgacacagaatagctcgctgcgaggatagcaatacacatcaagtctcccttcctttatttccttccttttcccggccgcacctttggacagaaaccgaaagcagcccggcgtccgtccggagtcttatgcttccccctccccccttgcctttctttgccctagtgacgccggtatagcgccgactaggccccggctcctcctctgctgggctccggaccctgccccgcacccacccctttctcctacgcctcttcctctcccacccgggtctcttcctttctagaggccgggaagttaaacttgtagccaccacctccgctcttcccgtcaccctcgcccccacttcgggccgaaagcacggtacagaggctgttggtggctttgccacgccaccccacccaccccggatcgcggctgtcttaagggacctggattcatcaggggctcttcggggcctgtgcgagtgctgatctgctccgtttttgcaaaaggcgcctgtgtctggcagagctggtgtgagacgagacaatcctgccccgccgccgggataatcaagagttttggccggacctttgagcatacaccgagagagtgaggagccagacgacaagcacacactatggcgctgaaacggattaataaggaacttagtgatttggcccgtgaccctccagcacaatgttctgcaggtccagttggggatgatatgtttcattggcaagccacaattatgggacctaatgacagcccatatcaaggcggtgtattctttttgacaattcattttcctacagactaccccttcaaaccacctaaggttgcatttacaacaagaatttatcatccaaatattaacagtaatggcagcatttgtctcgatattctaagatcacagtggtcgcctgctttaacaatttctaaagttcttttatccatttgttcactgctatgtgatccaaacccagatgaccccctagtgccagagattgcacggatctataaaacagacagagataagtacaataggttagcaagagagtggacagagaaatacgctatgttgtagggtaagagga

SEQ ID NO: 406153 - DNA, 2093 bp, Homo sapiens
cgcggcctctcctgctggaggaggagggggaatgggcgcgtctcgcgcctaagccggagcctcagggacagcgcgggcgcgtggtggaggtggctgggcgggcgcgcgcgggagcgcgctggaaggcggagtgagtgtacggtggcgtcaggggtgacacagaatagctcgctgcgaggatagcaatacacatcaagtctcccttcctttatttccttccttttcccggccgcacctttggacagaaaccgaaagcagcccggcgtccgtccggagtcttatgcttccccctccccccttgcctttctttgccctagtgacgccggtatagcgccgactaggccccggctcctcctctgctgggctccggaccctgccccgcacccacccctttctcctacgcctcttcctctcccacccgggtctcttcctttctagaggccgggaagttaaacttgtagccaccacctccgctcttcccgtcaccctcgcccccacttcgggccgaaagcacggtacagaggctgttggtggctttgccacgccaccccacccaccccggatcgcggctgtcttaagggacctggattcatcaggggctcttcggggcctgtgcgagtgctgatctgctccgtttttgcaaaaggcgcctgtgtctggcagagctggtgtgagacgagacaatcctgccccgccgccgggataatcaagagttttggccggacctttgagcatacaccgagagagtgaggagccagacgacaagcacacactatggcgctgaaacggattaataaggaacttagtgatttggcccgtgaccctccagcacaatgttctgcaggtccagttggggatgatatgtttcattggcaagccacaattatgggacctgtaagtattaagaatttttaaatttagttttaagtgaaaatccagcattgatttggttgtaatttttaacttggtctgtaggtttattttatcatatagttaattctattttggatattccatagttgtactgcatttgaaagaaaaaacataatgagttagtcatttgttacgtgtactttgtgtctatccctgtgttcacgttctagagtatagccatctctatgacctaccaaacatctctgtatctcagttcagtttttctacatagcactgtgtaaagcattgtcatggaacttcctgttatttatagagacaaagttactggctctgatatgccatgcgttgtgttactcagagatcttattctgttactgcagctgccaataatctagcttaattgtattttgatatttgattctttatagaacttcagtttatgcaaaatttgaatatatttaggcagaaagtgatattttgaatatagcaaaattcctttctatcctgggtagataagcaactatatgctggataattgaatattcagaattatggataccatctaagaatttcagagaattagagcgcactaaaacatcctggggtaagactgtatcttacacaaatatttaacttttttttttttttaacttgctaaggcgcttaaggatttgttttctaagttacatgtgtatcttcctgaaaactgtcttccctttttggtggttttataagcaacataaagagcaataatgtactaggtgagataatggtcagtaagtaatatttagaattctaaaggaaaaaatgctcttagagttagtagatgagtcgaatcaacaagtatttatttagtaattctgattctaactttagtcatttttctgtctcaaatgtgagtacatactgtgtgccaggtaataaggatacaaattgaacataataaacatccctgtcgatcttatagggaacttacactgtattagaggagacagatacctaaaacaagtgctgaagtgtgacaagatggaaaataagtgattggtgaatgaagtgctgagtaggataaattaatgggaaattgaagcagggaggattaatttagagtaattaaaatgttagtgccctaaaggtagaaaaactaaatcaaagtaagacatggcaggggtgcaaatattaagtttaatactttgaaacgt

SEQ ID NO: 406154 - DNA, 1539 bp, Homo sapiens
tatttgctgcatcccataaggttggtatgctgtgtaccatttttcttgtctgaaggcattttaaaatttcattcgtaattttttctgtgacccagtgctgttaggagcatattgtttaatttccacatttttgcactgcttacacttacgtgcaatcttattccttgtctgcacacacatgtggaaagctagaaataaatgttaaaacttactttttataaacattttaatatgtagtttggacatgatttattgacttaaggttcttctctaaactggaagtgaaatgcatgccttctgaagatgttctggctttgttaattctgtaatcatttcattggggaaaaaaccagctacgcagtttttccaatgagtgaattttttcattttgtgttttgcttaaaacggctccttcagggtagatgtcatactgcataacttttttggattcaaattatgaatgagaaattagttaacattctgctccacaaggtaagaaaaactgctctttggctctattttcaaaattacttctgagatgcatatagtctcaaaataacagctttagtaggcatatcacttcttgaaagccaaacatgagtgtaagacacttttatgaaacacggtggatccctaactggctttcaaattgacctttatagccttagacaacccttaggtatttacggagatgacttctttgattgtcataacaattagtggatgtgtccagttctctgtatctttgacttgatgctttatacatcatttcatttgttgcttctaagggaataagccatagaggcttctccaggtttaaaagaacagtaaagtacctggaaaaccaacatttttgaatgtatggacactggacatgagatatgtacaatgaaatcttaaaagaatctaagaatttgccctctttgccccactccacccagtaatttgacattactagtgccatgtataggacccaactgagtattagaatcagttttgactatgtctttgtatttcctaaatcttttaatgcataaaccgaattagggtccagttggcctgttaatggtaaatttacattttaaatgactcagtttgtttttcctgggcgagtttgcaatgtgataatcagattttttaaaactgattaatttgctttcttgtgtgggtgtactcacattttaaagtatgaaccacagttaactagtggtctcaggggtagtgaaacactcacttttttttttgtttgtttttttttgtttgtttgttgaaatggcttagttgaagtatacttaaggtactgatcatgctgtgttagtaatttgggcggggaggggggtaactcagccatgttttgtgttggcataacaaaactgttaatgattgttgattacacttttaagtgaatttgtcttttatgaggaacccagtgcaagtcactaaatattgtctaatagtgacatctgcataagacttgtaatagctgaagttaattgagcttaaaggaattgttaccattaaagtctgtgtttaaagaca

SEQ ID NO: 406155 - DNA, 1116 bp, Homo sapiens
ctctaccaaccaccggcataagcattcaggggcgttgctttcctggcagtggcccgccccagttcgagccggtgccttactgcgtctcgcgagaacttatgcattttggaggcggaaccccgtcaggaaaagcgcacaaaactgctcttaagtcattgcagagctaccgcttcggttagccagccacgaagttctcgcgagagtcgtctcctcgataccaagtgaggaaactgggggacgctgtggggaggggcgtggggctggatcgcgcagcggctgcttcctttaccttcctcccatggtctccttccggttctcgatgcttctctgagcctaagggtttccgccactcgttcaccctccccccagctcatgatcttcctccctcccccgccctcctggtccaatctccgatctgtttagtaagaaggtgctgttccgagaaggagaaggaaaagggcttgacacgtattcactcggccccggacgtgggaagcaagccgtctggcttcggcctcacatcggtcttgtgctcgggacggcggcgttggcggactgatccgcggcggtgaagaggcgcctgtgtctggcagagctggtgtgagacgagacaatcctgccccgccgccgggataatcaagagttttggccggacctttgagcatacaccgagagagtgaggagccagacgacaagcacacactatggcgctgaaacggattaataaggaacttagtgatttggcccgtgaccctccagcacaatgttctgcaggtccagttggggatgatatgtttcattggcaagccacaattatgggacctaatgacagcccatatcaaggcggtgtattctttttgacaattcattttcctacagactaccccttcaaaccacctaaggttgcatttacaacaagaatttatcatccaaatattaacagtaatggcagcatttgtctcgatattctaagatccaagggacgccggtgtaccattccaaagtctttatcccttggtcacggtattgatccaaccaagtgaccctatggcgagaggccggttcttcacagccgagatagtccagaatttcggtggccttccgtgggcacctagt

SEQ ID NO: 406156 - DNA, 1095 bp, Homo sapiens
cgcggcctctcctgctggaggaggagggggaatgggcgcgtctcgcgcctaagccggagcctcagggacagcgcgggcgcgtggtggaggtggctgggcgggcgcgcgcgggagcgcgctggaaggcggagtgagtgtacggtggcgtcaggggtgacacagaatagctcgctgcgaggatagcaatacacatcaagtctcccttcctttatttccttccttttcccggccgcacctttggacagaaaccgaaagcagcccggcgtccgtccggagtcttatgcttccccctccccccttgcctttctttgccctagtgacgccggtatagcgccgactaggccccggctcctcctctgctgggctccggaccctgccccgcacccacccctttctcctacgcctcttcctctcccacccgggtctcttcctttctagaggccgggaagttaaacttgtagccaccacctccgctcttcccgtcaccctcgcccccacttcgggccgaaagcacggtacagaggctgttggtggctttgccacgccaccccacccaccccggatcgcggctgtcttaagggacctggattcatcaggggctcttcggggcctgtgcgagtgctgatctgctccgtttttgcaaaaggcgcctgtgtctggcagagctggtgtgagacgagacaatcctgccccgccgccgggataatcaagagttttggccggacctttgagcatacaccgagagagtgaggagccagacgacaagcacacactatggcgctgaaacggattaataaggtaacccgcggggacaagggcatggggtggtaggagaaaaggaaggctcgggccaagaggaaagcgtgggggtgggaaggaagcataattctgaaaatacctcttggatcacttcttccatggggggatggagaacgcagatatacttcttgaagaaatgaagtttaaagctaggaaacggagaacacttgtggcaagtgaggtgttatcctgagtgcttcagtggaatcggtgcaaattaggggtggaggagagtgacttaaggcgcctttattattttatttttttgctgcttaa

SEQ ID NO: 406157 - DNA, 897 bp, Homo sapiens
aaaaaaaaatttcaatagttaaaaatggatgctgagtttaaaaaaaaaaaaaaaaaaggttgagttgagagaataaggagattagaaaacaaaaaaggtacttagccccatgagagtttttttggtttgttttcaggtagaaaatagagttagtggattggggaggaaggatggttcaggaagaacaaagaatttaagacagttgagggcctctgaaagtggtcttggaagttcaacaaataacgtgaatgttgagctctctctggtctaagctcttaaactatgagaatatctaattatagctatttcggtttgtaagagattggcttttatgtaaagattgtctcagcatatgttcaggcatgttctctctcctaatggaatatattatttatgtgaattgtgatggagtgtgcctttaaaaatagggtgaaagtaactgaaagcagtggactcgcttgttttcttaaattaagcttatgtgactcacccattttctgtcttggtgtaggaacttagtgatttggcccgtgaccctccagcacaatgttctgcaggtccagttggggatgatatgtttcattggcaagccacaattatgggacctaatgacagcccatatcaaggcggtgtattctttttgacaattcattttcctacagactaccccttcaaaccacctaaggcaagtattttccctcaaaatctgttagtatagatttatgctttatttcaaaggaatagagcattcttggaagatagggttctgtgtaggctgtatatatatgttgaattgcactcatgtatagatgctgactcttaacctttggtttaaagagctagacctcagtttgagctttgtaaataggaataaggtttgccttttctttaatgttg

SEQ ID NO: 406158 - DNA, 1581 bp, Homo sapiens
cgcggcctctcctgctggaggaggagggggaatgggcgcgtctcgcgcctaagccggagcctcagggacagcgcgggcgcgtggtggaggtggctgggcgggcgcgcgcgggagcgcgctggaaggcggagtgagtgtacggtggcgtcaggggtgacacagaatagctcgctgcgaggatagcaatacacatcaagtctcccttcctttatttccttccttttcccggccgcacctttggacagaaaccgaaagcagcccggcgtccgtccggagtcttatgcttccccctccccccttgcctttctttgccctagtgacgccggtatagcgccgactaggccccggctcctcctctgctgggctccggaccctgccccgcacccacccctttctcctacgcctcttcctctcccacccgggtctcttcctttctagaggccgggaagttaaacttgtagccaccacctccgctcttcccgtcaccctcgcccccacttcgggccgaaagcacggtacagaggctgttggtggctttgccacgccaccccacccaccccggatcgcggctgtcttaagggacctggattcatcaggggctcttcggggcctgtgcgagtgctgatctgctccgtttttgcaaaaggcgcctgtgtctggcagagctggtgtgagacgagacaatcctgccccgccgccgggataatcaagagttttggccggacctttgagcatacaccgagagagtgaggagccagacgacaagcacacactatggcgctgaaacggattaataaggaacttagtgatttggcccgtgaccctccagcacaatgttctgcaggtccagttggggatgatatgtttcattggcaagccacaattatgggacctataagcaactatatgctggataattgaatattcagaattatggataccatctaagaatttcagagaattagagcgcactaaaacatcctggggtaagactgtatcttacacaaatatttaacttttttttttttttaacttgctaaggcgcttaaggatttgttttctaagttacatgtgtatcttcctgaaaactgtcttccctttttggtggttttataagcaacataaagagcaataatgtactaggtgagataatggtcagtaagtaatatttagaattctaaaggaaaaaatgctcttagagttagtagatgagtcgaatcaacaagtatttatttagtaattctgattctaactttagtcatttttctgtctcaaatgtgagtacatactgtgtgccaggtaataaggatacaaattgaacataataaacatccctgtcgatcttatagggaacttacactgtattagaggagacagatacctaaaacaagtgctgaagtgtgacaagatggaaaataagtgattggtgaatgaagtgctgagtaggataaattaatgggaaattgaagcagggaggattaatttagagtaattaaaatgttagtgccctaaaggtagaaaaactaaatcaaagtaagacatggcaggggtgcaaatattaagtttaatactttgaaacgt

SEQ ID NO: 406159 - DNA, 1450 bp, Homo sapiens
cgcggcctctcctgctggaggaggagggggaatgggcgcgtctcgcgcctaagccggagcctcagggacagcgcgggcgcgtggtggaggtggctgggcgggcgcgcgcgggagcgcgctggaaggcggagtgagtgtacggtggcgtcaggggtgacacagaatagctcgctgcgaggatagcaatacacatcaagtctcccttcctttatttccttccttttcccggccgcacctttggacagaaaccgaaagcagcccggcgtccgtccggagtcttatgcttccccctccccccttgcctttctttgccctagtgacgccggtatagcgccgactaggccccggctcctcctctgctgggctccggaccctgccccgcacccacccctttctcctacgcctcttcctctcccacccgggtctcttcctttctagaggccgggaagttaaacttgtagccaccacctccgctcttcccgtcaccctcgcccccacttcgggccgaaagcacggcgcctgtgtctggcagagctggtgtgagacgagacaatcctgccccgccgccgggataatcaagagttttggccggacctttgagcatacaccgagagagtgaggagccagacgacaagcacacactatggcgctgaaacggattaataaggaacttagtgatttggcccgtgaccctccagcacaatgttctgcaggtccagttggggatgatatgtttcattggcaagccacaattatgggacctataagcaactatatgctggataattgaatattcagaattatggataccatctaagaatttcagagaattagagcgcactaaaacatcctggggtaagactgtatcttacacaaatatttaacttttttttttttttaacttgctaaggcgcttaaggatttgttttctaagttacatgtgtatcttcctgaaaactgtcttccctttttggtggttttataagcaacataaagagcaataatgtactaggtgagataatggtcagtaagtaatatttagaattctaaaggaaaaaatgctcttagagttagtagatgagtcgaatcaacaagtatttatttagtaattctgattctaactttagtcatttttctgtctcaaatgtgagtacatactgtgtgccaggtaataaggatacaaattgaacataataaacatccctgtcgatcttatagggaacttacactgtattagaggagacagatacctaaaacaagtgctgaagtgtgacaagatggaaaataagtgattggtgaatgaagtgctgagtaggataaattaatgggaaattgaagcagggaggattaatttagagtaattaaaatgttagtgccctaaaggtagaaaaactaaatcaaagtaagacatggcaggggtgcaaatattaagtttaatactttgaaacgt

SEQ ID NO: 406160 - DNA, 574 bp, Homo sapiens
ggagcttgcagtgaccccagattgcgccactgcactgcagcctggagactccgtctcaaaaaaaaaaaaatttcaatagttaaaaatggatgctgagtttaaaaaaaaaaaaaaaaaaggttgagttgagagaataaggagattagaaaacaaaaaaggtacttagccccatgagagtttttttggtttgttttcaggtagaaaatagagttagtggattggggaggaaggatggttcaggaagaacaaagaatttaagacagttgagggcctctgaaagtggtcttggaagttcaacaaataacgtgaatgttgagctctctctggtctaagctcttaaactatgagaatatctaattatagctatttcggtttgtaagagattggcttttatgtaaataaaaaattttgtatcaatgtgtttgcatatatatttttacgaactctagctaagatgattgtctcagcatatgttcaggcatgttctctctcctaatggaatatattatttatgtgaattgtgatggagtgtgcctttaaaaatagggtgaaagtaactgaaagcagtggactc

SEQ ID NO: 406161 - DNA, 190 bp, Homo sapiens
aatttctcaaatatttgaattatatttatgttcaacttaaccattataactttcatatgttataattaatgctaagtgtacttgttcaattaggtacaataggttagcaagagagtggacagagaaatacgctatgttgtagggtaagaggatctgcactctatggtgcgcttattatggtactgccagc

SEQ ID NO: 406162 - DNA, 815 bp, Homo sapiens
  misc_feature (707)..(707): n is a, c, g, or t
  misc_feature (741)..(742): n is a, c, g, or t
  misc_feature (750)..(750): n is a, c, g, or t
  misc_feature (753)..(753): n is a, c, g, or t
  misc_feature (756)..(756): n is a, c, g, or t
  misc_feature (768)..(769): n is a, c, g, or t
  misc_feature (771)..(771): n is a, c, g, or t
  misc_feature (785)..(785): n is a, c, g, or t
tgccgaggcgcgggaactggcgggtagcgaggccctcctcggaatctcgtgtgaaggtggccctcctcttgggcctttaacgtctgtagatgctggagaccagcagaaaggatactgtgtgcgatgagataagcatgtgagaatgctttctaaccgaaagtgcctttcaaaagcgcctgtgtctggcagagctggtgtgagacgagacaatcctgccccgccgccgggataatcaagagttttggccggacctttgagcatacaccgagagagtgaggagccagacgacaagcacacactatggcgctgaaacggattaataaggaacttagtgatttggcccgtgaccctccagcacaatgttctgcaggtccagttggggatgatatgtttcattggcaagccacaattatgggacctaatgacagcccatatcaaggcggtgtattctttttgacaattcattttcctacagactaccccttcaaaccacctaaggttgcatttacaacaagaatttatcatccaaatattaacagtaatggcagcatttgtctcgatattctaagatcacagtggtcgcctgctttaacaatttctaaagttcttttatccatttgttcactgctatgtgatccaaacccagatgaccccctagtgccagggtcttaaacgcggatagtcacacgatatctccggatggaccnaagttgccgtgggtacctaagcgaataacggctnngcgggaanctnaanacggcccttggnncntcgggggccataancactttatattggggccccccacactgctg

SEQ ID NO: 406163 - DNA, 613 bp, Homo sapiens
tgtagttgcagcttttcacccgaagctatttatccgagggacaccgggaactgatgtaaaaggcattctggaagctcccttttccttttggctggagagtgggggtggataaggggtgcgatggcagtaagggagaacttagtgatttggcccgtgaccctccagcacaatgttctgcaggtccagttggggatgatatgtttcattggcaagccacaattatgggacctaatgacagcccatatcaaggcggtgtattctttttgacaattcattttcctacagactaccccttcaaaccacctaaggttgcatttacaacaagaatttatcatccaaatattaacagtaatggcagcatttgtctcgatattctaagatcacagtggtcgcctgctttaacaatttctaaagttcttttatccatttgttcactgctatgtgatccaaacccagatgaccccctagtgccagagattgcacggatctataaaacagacagagataagtacaacagaatatctcgggaatggactcagaagtatgccatgtgatgctaccttaaagtcagaataacctgcattatagctggaataaactttaaattactgtt

SEQ ID NO: 406164 - DNA, 4740 bp, Homo sapiens
ctctaccaaccaccggcataagcattcaggggcgttgctttcctggcagtggcccgccccagttcgagccggtgccttactgcgtctcgcgagaacttatgcattttggaggcggaaccccgtcaggaaaagcgcacaaaactgctcttaagtcattgcagagctaccgcttcggttagccagccacgaagttctcgcgagagtcgtctcctcgataccaagtgaggaaactgggggacgctgtggggaggggcgtggggctggatcgcgcagcggctgcttcctttaccttcctcccatggtctccttccggttctcgatgcttctctgagcctaagggtttccgccactcgttcaccctccccccagctcatgatcttcctccctcccccgccctcctggtccaatctccgatctgtttagtaagaaggtgctgttccgagaaggagaaggaaaagggcttgacacgtattcactcggccccggacgtgggaagcaagccgtctggcttcggcctcacatcggtcttgtgctcgggacggcggcgttggcggactgatccgcggcggtgaagaggcaggaggagggggaggggcggagcgtggcagctggcagtagttccgtcagagcggacatcttgtggctgtgtcgtgcgcgtgagccccgtagggccggggaggcaccagctgccgcgcggggaggaggccgaggccgcagcttgagggaggccccggcccctctgcgcctgtgtctggcagagctggtgtgagacgagacaatcctgccccgccgccgggataatcaagagttttggccggacctttgagcatacaccgagagagtgaggagccagacgacaagcacacactatggcgctgaaacggattaataaggaacttagtgatttggcccgtgaccctccagcacaatgttctgcaggtccagttggggatgatatgtttcattggcaagccacaattatgggacctaatgacagcccatatcaaggcggtgtattctttttgacaattcattttcctacagactaccccttcaaaccacctaaggttgcatttacaacaagaatttatcatccaaatattaacagtaatggcagcatttgtctcgatattctaagatcacagtggtcgcctgctttaacaatttctaaagttcttttatccatttgttcactgctatgtgatccaaacccagatgaccccctagtgccagagattgcacggatctataaaacagacagagataagtacaacagaatatctcgggaatggactcagaagtatgccatgtgatgctaccttaaagtcagaataacctgcattatagctggaataaactttaaattactgttccttttttgattttcttatccggctgctcccctatcagacctcatcttttttaattttattttttgtttacctccctccattcattcacatgctcatctgagaagacttaagttcttccagctttggacaataactgcttttagaaactgtaaagtagttacaagagaacagttgcccaagactcagaatttttaaaaaaaaaaatggagcatgtgtattatgtggccaatgtcttcactctaacttggttatgagactaaaaccattcctcactgctctaacatgctgaagaaatcatctgagggggagggagatggatgctcagttgtcacatcaaaggatacagcattattctagcagcatccattcttgtttaagccttccactgttagagatttgaggttacatgatatgctttatgctcataactgatgtggctggagaattggtattgaatttatagcatcagcagaacagaaaatgtgatgtattttatgcatgtcaataaaggaatgacctgttcttgttctacagagaatggaaattggaagtcaaacaccctttgtattccaaaatagggtctcaaacattttgtaattttcatttaaattgttaggaggcttggagctattagttaatctatcttccaatacactgtttaatatagcactgaataaatgatgcaagttgtcaatggatgagtgatcaactaatagctctgctagtaattgatttatttttcttcaataaagttgcataaaccaatgagttagctgcctggattaatcagtatgggaaacaatcttttgtaaatgcaaagctgttttttgtatatactgttgggatttgcttcattgtttgacatcaaatgatgatgtaaagttcgaaagagtgaatattttgccatgttcagttaaagtgcacagtctgttacaggttgacacattgcttgacctgatttatgcagaattaataagctatttggatagtgtagctttaatgtgctgcacatgatactggcagccctagagttcatagatggacttttgggacccagcagttttgaaatgtgtttatggagtttaagaaatttattttccaggtgcagcccctgtctaactgaaatttctcttcaccttgtacacttgacagctgaaaaaaaacaacatgggagtaataatgggtcaaaatttgcaaaataaagtactgttttggtgtgggagttgtcatgaggctgtgttgaagtgacttatctatgtgggatattgagtatccattgaaatggatttgttcagccatttacattaatgagcatttaaatgcaacagatatcatttcaggtgacttaacatgaatgaataaaagtcaatgctattggattgttttttgtttgacaagtgctatctgtgccactgatttaacttctgtagtaacaagggcattaccattcttcacctttcctaattctgatcccatagttttacatttttcctgtttattttgattttgttcactgctttatttcttaaagttctagcacatctgtgactcctccacttccacatttttgcactgcttacacttacgtgcaatcttattccttgtctgcacacacatgtggaaagctagaaataaatgttaaaacttactttttataaacattttaatatgtagtttggacatgatttattgacttaaggttcttctctaaactggaagtgaaatgcatgccttctgaagatgttctggctttgttaattctgtaatcatttcattggggaaaaaaccagctacgcagtttttccaatgagtgaattttttcattttgtgttttgcttaaaacggctccttcagggtagatgtcatactgcataacttttttggattcaaattatgaatgagaaattagttaacattctgctccacaaggtaagaaaaactgctctttggctctattttcaaaattacttctgagatgcatatagtctcaaaataacagctttagtaggcatatcacttcttgaaagccaaacatgagtgtaagacacttttatgaaacacggtggatccctaactggctttcaaattgacctttatagccttagacaacccttaggtatttacggagatgacttctttgattgtcataacaattagtggatgtgtccagttctctgtatctttgacttgatgctttatacatcatttcatttgttgcttctaagggaataagccatagaggcttctccaggtttaaaagaacagtaaagtacctggaaaaccaacatttttgaatgtatggacactggacatgagatatgtacaatgaaatcttaaaagaatctaagaatttgccctctttgccccactccacccagtaatttgacattactagtgccatgtataggacccaactgagtattagaatcagttttgactatgtctttgtatttcctaaatcttttaatgcataaaccgaattagggtccagttggcctgttaatggtaaatttacattttaaatgactcagtttgtttttcctgggcgagtttgcaatgtgataatcagattttttaaaactgattaatttgctttcttgtgtgggtgtactcacattttaaagtatgaaccacagttaactagtggtctcaggggtagtgaaacactcacttttttttttgtttgtttttttttgtttgtttgttgaaatggcttagttgaagtatacttaaggtactgatcatgctgtgttagtaatttgggcggggaggggggtaactcagccatgttttgtgttggcataacaaaactgttaatgattgttgattacacttttaagtgaatttgtcttttatgaggaacccagtgcaagtcactaaatattgtctaatagtgacatctgcataagacttgtaatagctgaagttaattgagcttaaaggaattgttaccattaaagtctgtgtttaaagacaaaaaaaaaaaaaaaaaaaaaaaaaaaaaaaaaaaaaaaaaaaaaaaaaaaaaaaaaaaaaaaaaaaaaaaaaccttgtggcccgtttggcccaagtggtttttaaattgggcaaggtttatccttgggccccaatttggggttcattggcccaattccccttaaggggggccgtttcaacattaatgtgccgcggtttaaaaacgtgggatttggaaaaccttgggggttcccaaattaaatcgctttggagaaaatccctcttttcgccggttggcgaaaaatcgaaaggggccccaaccgtacgccctttccaaaaattggcccaacttgattgccaattggaaattgtagcccgttaatttttgttaaaaatcggggaaattttttgt

SEQ ID NO: 406165 - DNA, 4184 bp, Homo sapiens
ctctaccaaccaccggcataagcattcaggggcgttgctttcctggcagtggcccgccccagttcgagccggtgccttactgcgtctcgcgagaacttatgcattttggaggcggaaccccgtcaggaaaagcgcacaaaactgctcttaagtcattgcagagctaccgcttcggttagccagccacgaagttctcgcgagagtcgtctcctcgataccaagtgaggaaactgggggacgctgtggggaggggcgtggggctggatcgcgcagcggctgcttcctttaccttcctcccatggtctccttccggttctcgatgcttctctgagcctaagggtttccgccactcgttcaccctccccccagctcatgatcttcctccctcccccgccctcctggtccaatctccgatctgtttagtaagaaggtgctgttccgagaaggagaaggaaaagggcttgacacgtattcactcggccccggacgtgggaagcaagccgtctggcttcggcctcacatcggtcttgtgctcgggacggcggcgttggcggactgatccgcggcggtgaagaggcgcctgtgtctggcagagctggtgtgagacgagacaatcctgccccgccgccgggataatcaagagttttggccggacctttgagcatacaccgagagagtgaggagccagacgacaagcacacactatggcgctgaaacggattaataaggaacttagtgatttggcccgtgaccctccagcacaatgttctgcaggtccagttggggatgatatgtttcattggcaagccacaattatgggacctaatgacagcccatatcaaggcggtgtattctttttgacaattcattttcctacagactaccccttcaaaccacctaaggttgcatttacaacaagaatttatcatccaaatattaacagtaatggcagcatttgtctcgatattctaagatcacagtggtcgcctgctttaacaatttctaaagttcttttatccatttgttcactgctatgtgatccaaacccagatgaccccctagtgccagagattgcacggatctataaaacagacagagataagtacaacagaatatctcgggaatggactcagaagtatgccatgtgatgctaccttaaagtcagaataacctgcattatagctggaataaactttaaattactgttccttttttgattttcttatccggctgctcccctatcagacctcatcttttttaattttattttttgtttacctccctccattcattcacatgctcatctgagaagacttaagttcttccagctttggacaataactgcttttagaaactgtaaagtagttacaagagaacagttgcccaagactcagaatttttaaaaaaaaaaatggagcatgtgtattatgtggccaatgtcttcactctaacttggttatgagactaaaaccattcctcactgctctaacatgctgaagaaatcatctgagggggagggagatggatgctcagttgtcacatcaaaggatacagcattattctagcagcatccattcttgtttaagccttccactgttagagatttgaggttacatgatatgctttatgctcataactgatgtggctggagaattggtattgaatttatagcatcagcagaacagaaaatgtgatgtattttatgcatgtcaataaaggaatgacctgttcttgttctacagagaatggaaattggaagtcaaacaccctttgtattccaaaatagggtctcaaacattttgtaattttcatttaaattgttaggaggcttggagctattagttaatctatcttccaatacactgtttaatatagcactgaataaatgatgcaagttgtcaatggatgagtgatcaactaatagctctgctagtaattgatttatttttcttcaataaagttgcataaaccaatgagttagctgcctggattaatcagtatgggaaacaatcttttgtaaatgcaaagctgttttttgtatatactgttgggatttgcttcattgtttgacatcaaatgatgatgtaaagttcgaaagagtgaatattttgccatgttcagttaaagtgcacagtctgttacaggttgacacattgcttgacctgatttatgcagaattaataagctatttggatagtgtagctttaatgtgctgcacatgatactggcagccctagagttcatagatggacttttgggacccagcagttttgaaatgtgtttatggagtttaagaaatttattttccaggtgcagcccctgtctaactgaaatttctcttcaccttgtacacttgacagctgaaaaaaaacaacatgggagtaataatgggtcaaaatttgcaaaataaagtactgttttggtgtgggagttgtcatgaggctgtgttgaagtgacttatctatgtgggatattgagtatccattgaaatggatttgttcagccatttacattaatgagcatttaaatgcaacagatatcatttcaggtgacttaacatgaatgaataaaagtcaatgctattggattgttttttgtttgacaagtgctatctgtgccactgatttaacttctgtagtaacaagggcattaccattcttcacctttcctaattctgatcccatagttttacatttttcctgtttattttgattttgttcactgctttatttcttaaagttctagcacatctgtgactcctccacttccacatttttgcactgcttacacttacgtgcaatcttattccttgtctgcacacacatgtggaaagctagaaataaatgttaaaacttactttttataaacattttaatatgtagtttggacatgatttattgacttaaggttcttctctaaactggaagtgaaatgcatgccttctgaagatgttctggctttgttaattctgtaatcatttcattggggaaaaaaccagctacgcagtttttccaatgagtgaattttttcattttgtgttttgcttaaaacggctccttcagggtagatgtcatactgcataacttttttggattcaaattatgaatgagaaattagttaacattctgctccacaaggtaagaaaaactgctctttggctctattttcaaaattacttctgagatgcatatagtctcaaaataacagctttagtaggcatatcacttcttgaaagccaaacatgagtgtaagacacttttatgaaacacggtggatccctaactggctttcaaattgacctttatagccttagacaacccttaggtatttacggagatgacttctttgattgtcataacaattagtggatgtgtccagttctctgtatctttgacttgatgctttatacatcatttcatttgttgcttctaagggaataagccatagaggcttctccaggtttaaaagaacagtaaagtacctggaaaaccaacatttttgaatgtatggacactggacatgagatatgtacaatgaaatcttaaaagaatctaagaatttgccctctttgccccactccacccagtaatttgacattactagtgccatgtataggacccaactgagtattagaatcagttttgactatgtctttgtatttcctaaatcttttaatgcataaaccgaattagggtccagttggcctgttaatggtaaatttacattttaaatgactcagtttgtttttcctgggcgagtttgcaatgtgataatcagattttttaaaactgattaatttgctttcttgtgtgggtgtactcacattttaaagtatgaaccacagttaactagtggtctcaggggtagtgaaacactcacttttttttttgtttgtttttttttgtttgtttgttgaaatggcttagttgaagtatacttaaggtactgatcatgctgtgttagtaatttgggcggggaggggggtaactcagccatgttttgtgttggcataacaaaactgttaatgattgttgattacacttttaagtgaatttgtcttttatgaggaacccagtgcaagtcactaaatattgtctaatagtgacatctgcataagacttgtaatagctgaagttaattgagcttaaaggaattgttaccattaaagtctgtgtttaaagaca

SEQ ID NO: 406166 - DNA, 3988 bp, Homo sapiens
tgccgaggcgcgggaactggcgggtagcgaggccctcctcggaatctcgtgtgaaggtggccctcctcttgggcctttaacgtctgtagatgctggagaccagcagaaaggatactgtgtgcgatgagataagcatgtgagaatgctttctaaccgaaagtgcctttcaaaaaggccgggaagttaaacttgtagccaccacctccgctcttcccgtcaccctcgcccccacttcgggccgaaagcacggtacagaggctgttggtggctttgccacgccaccccacccaccccggatcgcggctgtcttaagggacctggattcatcaggggctcttcggggcctgtgcgagtgctgatctgctccgtttttgcaaaaggcgcctgtgtctggcagagctggtgtgagacgagacaatcctgccccgccgccgggataatcaagagttttggccggacctttgagcatacaccgagagagtgaggagccagacgacaagcacacactatggcgctgaaacggattaataaggaacttagtgatttggcccgtgaccctccagcacaatgttctgcaggtccagttggggatgatatgtttcattggcaagccacaattatgggacctaatgacagcccatatcaaggcggtgtattctttttgacaattcattttcctacagactaccccttcaaaccacctaaggttgcatttacaacaagaatttatcatccaaatattaacagtaatggcagcatttgtctcgatattctaagatcacagtggtcgcctgctttaacaatttctaaagttcttttatccatttgttcactgctatgtgatccaaacccagatgaccccctagtgccagagattgcacggatctataaaacagacagagataagtacaacagaatatctcgggaatggactcagaagtatgccatgtgatgctaccttaaagtcagaataacctgcattatagctggaataaactttaaattactgttccttttttgattttcttatccggctgctcccctatcagacctcatcttttttaattttattttttgtttacctccctccattcattcacatgctcatctgagaagacttaagttcttccagctttggacaataactgcttttagaaactgtaaagtagttacaagagaacagttgcccaagactcagaatttttaaaaaaaaaaatggagcatgtgtattatgtggccaatgtcttcactctaacttggttatgagactaaaaccattcctcactgctctaacatgctgaagaaatcatctgagggggagggagatggatgctcagttgtcacatcaaaggatacagcattattctagcagcatccattcttgtttaagccttccactgttagagatttgaggttacatgatatgctttatgctcataactgatgtggctggagaattggtattgaatttatagcatcagcagaacagaaaatgtgatgtattttatgcatgtcaataaaggaatgacctgttcttgttctacagagaatggaaattggaagtcaaacaccctttgtattccaaaatagggtctcaaacattttgtaattttcatttaaattgttaggaggcttggagctattagttaatctatcttccaatacactgtttaatatagcactgaataaatgatgcaagttgtcaatggatgagtgatcaactaatagctctgctagtaattgatttatttttcttcaataaagttgcataaaccaatgagttagctgcctggattaatcagtatgggaaacaatcttttgtaaatgcaaagctgttttttgtatatactgttgggatttgcttcattgtttgacatcaaatgatgatgtaaagttcgaaagagtgaatattttgccatgttcagttaaagtgcacagtctgttacaggttgacacattgcttgacctgatttatgcagaattaataagctatttggatagtgtagctttaatgtgctgcacatgatactggcagccctagagttcatagatggacttttgggacccagcagttttgaaatgtgtttatggagtttaagaaatttattttccaggtgcagcccctgtctaactgaaatttctcttcaccttgtacacttgacagctgaaaaaaaacaacatgggagtaataatgggtcaaaatttgcaaaataaagtactgttttggtgtgggagttgtcatgaggctgtgttgaagtgacttatctatgtgggatattgagtatccattgaaatggatttgttcagccatttacattaatgagcatttaaatgcaacagatatcatttcaggtgacttaacatgaatgaataaaagtcaatgctattggattgttttttgtttgacaagtgctatctgtgccactgatttaacttctgtagtaacaagggcattaccattcttcacctttcctaattctgatcccatagttttacatttttcctgtttattttgattttgttcactgctttatttcttaaagttctagcacatctgtgactcctccacttccacatttttgcactgcttacacttacgtgcaatcttattccttgtctgcacacacatgtggaaagctagaaataaatgttaaaacttactttttataaacattttaatatgtagtttggacatgatttattgacttaaggttcttctctaaactggaagtgaaatgcatgccttctgaagatgttctggctttgttaattctgtaatcatttcattggggaaaaaaccagctacgcagtttttccaatgagtgaattttttcattttgtgttttgcttaaaacggctccttcagggtagatgtcatactgcataacttttttggattcaaattatgaatgagaaattagttaacattctgctccacaaggtaagaaaaactgctctttggctctattttcaaaattacttctgagatgcatatagtctcaaaataacagctttagtaggcatatcacttcttgaaagccaaacatgagtgtaagacacttttatgaaacacggtggatccctaactggctttcaaattgacctttatagccttagacaacccttaggtatttacggagatgacttctttgattgtcataacaattagtggatgtgtccagttctctgtatctttgacttgatgctttatacatcatttcatttgttgcttctaagggaataagccatagaggcttctccaggtttaaaagaacagtaaagtacctggaaaaccaacatttttgaatgtatggacactggacatgagatatgtacaatgaaatcttaaaagaatctaagaatttgccctctttgccccactccacccagtaatttgacattactagtgccatgtataggacccaactgagtattagaatcagttttgactatgtctttgtatttcctaaatcttttaatgcataaaccgaattagggtccagttggcctgttaatggtaaatttacattttaaatgactcagtttgtttttcctgggcgagtttgcaatgtgataatcagattttttaaaactgattaatttgctttcttgtgtgggtgtactcacattttaaagtatgaaccacagttaactagtggtctcaggggtagtgaaacactcacttttttttttgtttgtttttttttgtttgtttgttgaaatggcttagttgaagtatacttaaggtactgatcatgctgtgttagtaatttgggcggggaggggggtaactcagccatgttttgtgttggcataacaaaactgttaatgattgttgattacacttttaagtgaatttgtcttttatgaggaacccagtgcaagtcactaaatattgtctaatagtgacatctgcataagacttgtaatagctgaagttaattgagcttaaaggaattgttaccattaaagtctgtgtttaaagaca

SEQ ID NO: 406167 - DNA, 4264 bp, Homo sapiens
ctctaccaaccaccggcataagcattcaggggcgttgctttcctggcagtggcccgccccagttcgagccggtgccttactgcgtctcgcgagaacttatgcattttggaggcggaaccccgtcaggaaaagcgcacaaaactgctcttaagtcattgcagagctaccgcttcggttagccagccacgaagttctcgcgagagtcgtctcctcgataccaagtgaggaaactgggggacgctgtggggaggggcgtggggctggatcgcgcagcggctgcttcctttaccttcctcccatggtctccttccggttctcgatgcttctctgagcctaagggtttccgccactcgttcaccctccccccagctcatgatcttcctccctcccccgccctcctggtccaatctccgatctgtttagtaagaaggtgctgttccgagaaggagaaggaaaagggcttgacacgtattcactcggccccggacgtgggaagcaagccgtctggcttcggcctcacatcggtcttgtgctcgggacggcggcgttggcggactgatccgcggcggtgaagaggcaggaggagggggaggggcggagcgtggcagctggcagtagttccgtcagagcggacatcttgtggctgtgtcgtgcgcgcgcctgtgtctggcagagctggtgtgagacgagacaatcctgccccgccgccgggataatcaagagttttggccggacctttgagcatacaccgagagagtgaggagccagacgacaagcacacactatggcgctgaaacggattaataaggaacttagtgatttggcccgtgaccctccagcacaatgttctgcaggtccagttggggatgatatgtttcattggcaagccacaattatgggacctaatgacagcccatatcaaggcggtgtattctttttgacaattcattttcctacagactaccccttcaaaccacctaaggttgcatttacaacaagaatttatcatccaaatattaacagtaatggcagcatttgtctcgatattctaagatcacagtggtcgcctgctttaacaatttctaaagttcttttatccatttgttcactgctatgtgatccaaacccagatgaccccctagtgccagagattgcacggatctataaaacagacagagataagtacaacagaatatctcgggaatggactcagaagtatgccatgtgatgctaccttaaagtcagaataacctgcattatagctggaataaactttaaattactgttccttttttgattttcttatccggctgctcccctatcagacctcatcttttttaattttattttttgtttacctccctccattcattcacatgctcatctgagaagacttaagttcttccagctttggacaataactgcttttagaaactgtaaagtagttacaagagaacagttgcccaagactcagaatttttaaaaaaaaaaatggagcatgtgtattatgtggccaatgtcttcactctaacttggttatgagactaaaaccattcctcactgctctaacatgctgaagaaatcatctgagggggagggagatggatgctcagttgtcacatcaaaggatacagcattattctagcagcatccattcttgtttaagccttccactgttagagatttgaggttacatgatatgctttatgctcataactgatgtggctggagaattggtattgaatttatagcatcagcagaacagaaaatgtgatgtattttatgcatgtcaataaaggaatgacctgttcttgttctacagagaatggaaattggaagtcaaacaccctttgtattccaaaatagggtctcaaacattttgtaattttcatttaaattgttaggaggcttggagctattagttaatctatcttccaatacactgtttaatatagcactgaataaatgatgcaagttgtcaatggatgagtgatcaactaatagctctgctagtaattgatttatttttcttcaataaagttgcataaaccaatgagttagctgcctggattaatcagtatgggaaacaatcttttgtaaatgcaaagctgttttttgtatatactgttgggatttgcttcattgtttgacatcaaatgatgatgtaaagttcgaaagagtgaatattttgccatgttcagttaaagtgcacagtctgttacaggttgacacattgcttgacctgatttatgcagaattaataagctatttggatagtgtagctttaatgtgctgcacatgatactggcagccctagagttcatagatggacttttgggacccagcagttttgaaatgtgtttatggagtttaagaaatttattttccaggtgcagcccctgtctaactgaaatttctcttcaccttgtacacttgacagctgaaaaaaaacaacatgggagtaataatgggtcaaaatttgcaaaataaagtactgttttggtgtgggagttgtcatgaggctgtgttgaagtgacttatctatgtgggatattgagtatccattgaaatggatttgttcagccatttacattaatgagcatttaaatgcaacagatatcatttcaggtgacttaacatgaatgaataaaagtcaatgctattggattgttttttgtttgacaagtgctatctgtgccactgatttaacttctgtagtaacaagggcattaccattcttcacctttcctaattctgatcccatagttttacatttttcctgtttattttgattttgttcactgctttatttcttaaagttctagcacatctgtgactcctccacttccacatttttgcactgcttacacttacgtgcaatcttattccttgtctgcacacacatgtggaaagctagaaataaatgttaaaacttactttttataaacattttaatatgtagtttggacatgatttattgacttaaggttcttctctaaactggaagtgaaatgcatgccttctgaagatgttctggctttgttaattctgtaatcatttcattggggaaaaaaccagctacgcagtttttccaatgagtgaattttttcattttgtgttttgcttaaaacggctccttcagggtagatgtcatactgcataacttttttggattcaaattatgaatgagaaattagttaacattctgctccacaaggtaagaaaaactgctctttggctctattttcaaaattacttctgagatgcatatagtctcaaaataacagctttagtaggcatatcacttcttgaaagccaaacatgagtgtaagacacttttatgaaacacggtggatccctaactggctttcaaattgacctttatagccttagacaacccttaggtatttacggagatgacttctttgattgtcataacaattagtggatgtgtccagttctctgtatctttgacttgatgctttatacatcatttcatttgttgcttctaagggaataagccatagaggcttctccaggtttaaaagaacagtaaagtacctggaaaaccaacatttttgaatgtatggacactggacatgagatatgtacaatgaaatcttaaaagaatctaagaatttgccctctttgccccactccacccagtaatttgacattactagtgccatgtataggacccaactgagtattagaatcagttttgactatgtctttgtatttcctaaatcttttaatgcataaaccgaattagggtccagttggcctgttaatggtaaatttacattttaaatgactcagtttgtttttcctgggcgagtttgcaatgtgataatcagattttttaaaactgattaatttgctttcttgtgtgggtgtactcacattttaaagtatgaaccacagttaactagtggtctcaggggtagtgaaacactcacttttttttttgtttgtttttttttgtttgtttgttgaaatggcttagttgaagtatacttaaggtactgatcatgctgtgttagtaatttgggcggggaggggggtaactcagccatgttttgtgttggcataacaaaactgttaatgattgttgattacacttttaagtgaatttgtcttttatgaggaacccagtgcaagtcactaaatattgtctaatagtgacatctgcataagacttgtaatagctgaagttaattgagcttaaaggaattgttaccattaaagtctgtgtttaaagaca

SEQ ID NO: 406168 - DNA, 4038 bp, Homo sapiens
ctctaccaaccaccggcataagcattcaggggcgttgctttcctggcagtggcccgccccagttcgagccggtgccttactgcgtctcgcgagaacttatgcattttggaggcggaaccccgtcaggaaaagcgcacaaaactgctcttaagtcattgcagagctaccgcttcggttagccagccacgaagttctcgcgagagtcgtctcctcgataccaagtgaggaaactgggggacgctgtggggaggggcgtggggctggatcgcgcagcggctgcttcctttaccttcctcccatggtctccttccggttctcgatgcttctctgagcctaagggtttccgccactcgttcaccctccccccagctcatgatcttcctccctcccccgccctcctggtccaatctccgatctgtttagtaagaaggcgcctgtgtctggcagagctggtgtgagacgagacaatcctgccccgccgccgggataatcaagagttttggccggacctttgagcatacaccgagagagtgaggagccagacgacaagcacacactatggcgctgaaacggattaataaggaacttagtgatttggcccgtgaccctccagcacaatgttctgcaggtccagttggggatgatatgtttcattggcaagccacaattatgggacctaatgacagcccatatcaaggcggtgtattctttttgacaattcattttcctacagactaccccttcaaaccacctaaggttgcatttacaacaagaatttatcatccaaatattaacagtaatggcagcatttgtctcgatattctaagatcacagtggtcgcctgctttaacaatttctaaagttcttttatccatttgttcactgctatgtgatccaaacccagatgaccccctagtgccagagattgcacggatctataaaacagacagagataagtacaacagaatatctcgggaatggactcagaagtatgccatgtgatgctaccttaaagtcagaataacctgcattatagctggaataaactttaaattactgttccttttttgattttcttatccggctgctcccctatcagacctcatcttttttaattttattttttgtttacctccctccattcattcacatgctcatctgagaagacttaagttcttccagctttggacaataactgcttttagaaactgtaaagtagttacaagagaacagttgcccaagactcagaatttttaaaaaaaaaaatggagcatgtgtattatgtggccaatgtcttcactctaacttggttatgagactaaaaccattcctcactgctctaacatgctgaagaaatcatctgagggggagggagatggatgctcagttgtcacatcaaaggatacagcattattctagcagcatccattcttgtttaagccttccactgttagagatttgaggttacatgatatgctttatgctcataactgatgtggctggagaattggtattgaatttatagcatcagcagaacagaaaatgtgatgtattttatgcatgtcaataaaggaatgacctgttcttgttctacagagaatggaaattggaagtcaaacaccctttgtattccaaaatagggtctcaaacattttgtaattttcatttaaattgttaggaggcttggagctattagttaatctatcttccaatacactgtttaatatagcactgaataaatgatgcaagttgtcaatggatgagtgatcaactaatagctctgctagtaattgatttatttttcttcaataaagttgcataaaccaatgagttagctgcctggattaatcagtatgggaaacaatcttttgtaaatgcaaagctgttttttgtatatactgttgggatttgcttcattgtttgacatcaaatgatgatgtaaagttcgaaagagtgaatattttgccatgttcagttaaagtgcacagtctgttacaggttgacacattgcttgacctgatttatgcagaattaataagctatttggatagtgtagctttaatgtgctgcacatgatactggcagccctagagttcatagatggacttttgggacccagcagttttgaaatgtgtttatggagtttaagaaatttattttccaggtgcagcccctgtctaactgaaatttctcttcaccttgtacacttgacagctgaaaaaaaacaacatgggagtaataatgggtcaaaatttgcaaaataaagtactgttttggtgtgggagttgtcatgaggctgtgttgaagtgacttatctatgtgggatattgagtatccattgaaatggatttgttcagccatttacattaatgagcatttaaatgcaacagatatcatttcaggtgacttaacatgaatgaataaaagtcaatgctattggattgttttttgtttgacaagtgctatctgtgccactgatttaacttctgtagtaacaagggcattaccattcttcacctttcctaattctgatcccatagttttacatttttcctgtttattttgattttgttcactgctttatttcttaaagttctagcacatctgtgactcctccacttccacatttttgcactgcttacacttacgtgcaatcttattccttgtctgcacacacatgtggaaagctagaaataaatgttaaaacttactttttataaacattttaatatgtagtttggacatgatttattgacttaaggttcttctctaaactggaagtgaaatgcatgccttctgaagatgttctggctttgttaattctgtaatcatttcattggggaaaaaaccagctacgcagtttttccaatgagtgaattttttcattttgtgttttgcttaaaacggctccttcagggtagatgtcatactgcataacttttttggattcaaattatgaatgagaaattagttaacattctgctccacaaggtaagaaaaactgctctttggctctattttcaaaattacttctgagatgcatatagtctcaaaataacagctttagtaggcatatcacttcttgaaagccaaacatgagtgtaagacacttttatgaaacacggtggatccctaactggctttcaaattgacctttatagccttagacaacccttaggtatttacggagatgacttctttgattgtcataacaattagtggatgtgtccagttctctgtatctttgacttgatgctttatacatcatttcatttgttgcttctaagggaataagccatagaggcttctccaggtttaaaagaacagtaaagtacctggaaaaccaacatttttgaatgtatggacactggacatgagatatgtacaatgaaatcttaaaagaatctaagaatttgccctctttgccccactccacccagtaatttgacattactagtgccatgtataggacccaactgagtattagaatcagttttgactatgtctttgtatttcctaaatcttttaatgcataaaccgaattagggtccagttggcctgttaatggtaaatttacattttaaatgactcagtttgtttttcctgggcgagtttgcaatgtgataatcagattttttaaaactgattaatttgctttcttgtgtgggtgtactcacattttaaagtatgaaccacagttaactagtggtctcaggggtagtgaaacactcacttttttttttgtttgtttttttttgtttgtttgttgaaatggcttagttgaagtatacttaaggtactgatcatgctgtgttagtaatttgggcggggaggggggtaactcagccatgttttgtgttggcataacaaaactgttaatgattgttgattacacttttaagtgaatttgtcttttatgaggaacccagtgcaagtcactaaatattgtctaatagtgacatctgcataagacttgtaatagctgaagttaattgagcttaaaggaattgttaccattaaagtctgtgtttaaagaca

SEQ ID NO: 406169 - DNA, 3660 bp, Homo sapiens
cggcacgagtggaaaagcgcacttctcgcgagagtcgtctcctcgataccaagcgcctgtgtctggcagagctggtgtgagacgagacaatcctgccccgccgccgggataatcaagagttttggccggacctttgagcatacaccgagagagtgaggagccagacgacaagcacacactatggcgctgaaacggattaataaggaacttagtgatttggcccgtgaccctccagcacaatgttctgcaggtccagttggggatgatatgtttcattggcaagccacaattatgggacctaatgacagcccatatcaaggcggtgtattctttttgacaattcattttcctacagactaccccttcaaaccacctaaggttgcatttacaacaagaatttatcatccaaatattaacagtaatggcagcatttgtctcgatattctaagatcacagtggtcgcctgctttaacaatttctaaagttcttttatccatttgttcactgctatgtgatccaaacccagatgaccccctagtgccagagattgcacggatctataaaacagacagagataagtacaacagaatatctcgggaatggactcagaagtatgccatgtgatgctaccttaaagtcagaataacctgcattatagctggaataaactttaaattactgttccttttttgattttcttatccggctgctcccctatcagacctcatcttttttaattttattttttgtttacctccctccattcattcacatgctcatctgagaagacttaagttcttccagctttggacaataactgcttttagaaactgtaaagtagttacaagagaacagttgcccaagactcagaatttttaaaaaaaaaaatggagcatgtgtattatgtggccaatgtcttcactctaacttggttatgagactaaaaccattcctcactgctctaacatgctgaagaaatcatctgagggggagggagatggatgctcagttgtcacatcaaaggatacagcattattctagcagcatccattcttgtttaagccttccactgttagagatttgaggttacatgatatgctttatgctcataactgatgtggctggagaattggtattgaatttatagcatcagcagaacagaaaatgtgatgtattttatgcatgtcaataaaggaatgacctgttcttgttctacagagaatggaaattggaagtcaaacaccctttgtattccaaaatagggtctcaaacattttgtaattttcatttaaattgttaggaggcttggagctattagttaatctatcttccaatacactgtttaatatagcactgaataaatgatgcaagttgtcaatggatgagtgatcaactaatagctctgctagtaattgatttatttttcttcaataaagttgcataaaccaatgagttagctgcctggattaatcagtatgggaaacaatcttttgtaaatgcaaagctgttttttgtatatactgttgggatttgcttcattgtttgacatcaaatgatgatgtaaagttcgaaagagtgaatattttgccatgttcagttaaagtgcacagtctgttacaggttgacacattgcttgacctgatttatgcagaattaataagctatttggatagtgtagctttaatgtgctgcacatgatactggcagccctagagttcatagatggacttttgggacccagcagttttgaaatgtgtttatggagtttaagaaatttattttccaggtgcagcccctgtctaactgaaatttctcttcaccttgtacacttgacagctgaaaaaaaacaacatgggagtaataatgggtcaaaatttgcaaaataaagtactgttttggtgtgggagttgtcatgaggctgtgttgaagtgacttatctatgtgggatattgagtatccattgaaatggatttgttcagccatttacattaatgagcatttaaatgcaacagatatcatttcaggtgacttaacatgaatgaataaaagtcaatgctattggattgttttttgtttgacaagtgctatctgtgccactgatttaacttctgtagtaacaagggcattaccattcttcacctttcctaattctgatcccatagttttacatttttcctgtttattttgattttgttcactgctttatttcttaaagttctagcacatctgtgactcctccacttccacatttttgcactgcttacacttacgtgcaatcttattccttgtctgcacacacatgtggaaagctagaaataaatgttaaaacttactttttataaacattttaatatgtagtttggacatgatttattgacttaaggttcttctctaaactggaagtgaaatgcatgccttctgaagatgttctggctttgttaattctgtaatcatttcattggggaaaaaaccagctacgcagtttttccaatgagtgaattttttcattttgtgttttgcttaaaacggctccttcagggtagatgtcatactgcataacttttttggattcaaattatgaatgagaaattagttaacattctgctccacaaggtaagaaaaactgctctttggctctattttcaaaattacttctgagatgcatatagtctcaaaataacagctttagtaggcatatcacttcttgaaagccaaacatgagtgtaagacacttttatgaaacacggtggatccctaactggctttcaaattgacctttatagccttagacaacccttaggtatttacggagatgacttctttgattgtcataacaattagtggatgtgtccagttctctgtatctttgacttgatgctttatacatcatttcatttgttgcttctaagggaataagccatagaggcttctccaggtttaaaagaacagtaaagtacctggaaaaccaacatttttgaatgtatggacactggacatgagatatgtacaatgaaatcttaaaagaatctaagaatttgccctctttgccccactccacccagtaatttgacattactagtgccatgtataggacccaactgagtattagaatcagttttgactatgtctttgtatttcctaaatcttttaatgcataaaccgaattagggtccagttggcctgttaatggtaaatttacattttaaatgactcagtttgtttttcctgggcgagtttgcaatgtgataatcagattttttaaaactgattaatttgctttcttgtgtgggtgtactcacattttaaagtatgaaccacagttaactagtggtctcaggggtagtgaaacactcacttttttttttgtttgtttttttttgtttgtttgttgaaatggcttagttgaagtatacttaaggtactgatcatgctgtgttagtaatttgggcggggaggggggtaactcagccatgttttgtgttggcataacaaaactgttaatgattgttgattacacttttaagtgaatttgtcttttatgaggaacccagtgcaagtcactaaatattgtctaatagtgacatctgcataagacttgtaatagctgaagttaattgagcttaaaggaattgttaccattaaagtctgtgtttaaagaca

SEQ ID NO: 406170 - DNA, 4295 bp, Homo sapiens
ctctaccaaccaccggcataagcattcaggggcgttgctttcctggcagtggcccgccccagttcgagccggtgccttactgcgtctcgcgagaacttatgcattttggaggcggaaccccgtcaggaaaagcgcacaaaactgctcttaagtcattgcagagctaccgcttcggttagccagccacgaagttctcgcgagagtcgtctcctcgataccaagtgaggaaactgggggacgctgtggggaggggcgtggggctggatcgcgcagcggctgcttcctttaccttcctcccatggtctccttccggttctcgatgcttctctgagcctaagggtttccgccactcgttcaccctccccccagctcatgatcttcctccctcccccgccctcctggtccaatctccgatctgtttagtaagaaggtgctgttccgagaaggagaaggaaaagggcttgacacgtattcactcggccccggacgtgggaagcaagccgtctggcttcggcctcacatcggtcttgtgctcgggacggcggcgttggcggactgatccgcggcggtgaagaggcaggaggagggggaggggcggagcgtggcagctggcagtagttccgtcagagcggacatcttgtggctgtgtcgtgcgcgtgagccccgtagggccggggaggcaccagctgccgcgcggggaggaggccgaggccgcagcttgagggaggccccggcccctctgcgcctgtgtctggcagagctggtgtgagacgagacaatcctgccccgccgccgggataatcaagagttttggccggacctttgagcatacaccgagagagtgaggagccagacgacaagcacacactatggcgctgaaacggattaataaggaacttagtgatttggcccgtgaccctccagcacaatgttctgcaggtccagttggggatgatatgtttcattggcaagccacaattatgggacctaatgacagcccatatcaaggcggtgtattctttttgacaattcattttcctacagactaccccttcaaaccacctaaggttgcatttacaacaagaatttatcatccaaatattaacagtaatggcagcatttgtctcgatattctaagatcacagtggtcgcctgctttaacaatttctaaagttcttttatccatttgttcactgctatgtgatccaaacccagatgaccccctagtgccagagattgcacggatctataaaacagacagagataagtacaacagaatatctcgggaatggactcagaagtatgccatgtgatgctaccttaaagtcagaataacctgcattatagctggaataaactttaaattactgttccttttttgattttcttatccggctgctcccctatcagacctcatcttttttaattttattttttgtttacctccctccattcattcacatgctcatctgagaagacttaagttcttccagctttggacaataactgcttttagaaactgtaaagtagttacaagagaacagttgcccaagactcagaatttttaaaaaaaaaaatggagcatgtgtattatgtggccaatgtcttcactctaacttggttatgagactaaaaccattcctcactgctctaacatgctgaagaaatcatctgagggggagggagatggatgctcagttgtcacatcaaaggatacagcattattctagcagcatccattcttgtttaagccttccactgttagagatttgaggttacatgatatgctttatgctcataactgatgtggctggagaattggtattgaatttatagcatcagcagaacagaaaatgtgatgtattttatgcatgtcaataaaggaatgacctgttcttgttctacagagaatggaaattggaagtcaaacaccctttgtattccaaaatagggtctcaaacattttgtaattttcatttaaattgttaggaggcttggagctattagttaatctatcttccaatacactgtttaatatagcactgaataaatgatgcaagttgtcaatggatgagtgatcaactaatagctctgctagtaattgatttatttttcttcaataaagttgcataaaccaatgagttagctgcctggattaatcagtatgggaaacaatcttttgtaaatgcaaagctgttttttgtatatactgttgggatttgcttcattgtttgacatcaaatgatgatgtaaagttcgaaagagtgaatattttgccatgttcagttaaagtgcacagtctgttacaggttgacacattgcttgacctgatttatgcagaattaataagctatttggatagtgtagctttaatgtgctgcacatgatactggcagccctagagttcatagatggacttttgggacccagcagttttgaaatgtgtttatggagtttaagaaatttattttccaggtgcagcccctgtctaactgaaatttctcttcaccttgtacacttgacagctgaaaaaaaacaacatgggagtaataatgggtcaaaatttgcttatctatgtgggatattgagtatccattgaaatggatttgttcagccatttacattaatgagcatttaaatgcaacagatatcatttcaggtgacttaacatgaatgaataaaagtcaatgctattggattgttttttgtttgacaagtgctatctgtgccactgatttaacttctgtagtaacaagggcattaccattcttcacctttcctaattctgatcccatagttttacatttttcctgtttattttgattttgttcactgctttatttcttaaagttctagcacatctgtgactcctccacttccacatttttgcactgcttacacttacgtgcaatcttattccttgtctgcacacacatgtggaaagctagaaataaatgttaaaacttactttttataaacattttaatatgtagtttggacatgatttattgacttaaggttcttctctaaactggaagtgaaatgcatgccttctgaagatgttctggctttgttaattctgtaatcatttcattggggaaaaaaccagctacgcagtttttccaatgagtgaattttttcattttgtgttttgcttaaaacggctccttcagggtagatgtcatactgcataacttttttggattcaaattatgaatgagaaattagttaacattctgctccacaaggtaagaaaaactgctctttggctctattttcaaaattacttctgagatgcatatagtctcaaaataacagctttagtaggcatatcacttcttgaaagccaaacatgagtgtaagacacttttatgaaacacggtggatccctaactggctttcaaattgacctttatagccttagacaacccttaggtatttacggagatgacttctttgattgtcataacaattagtggatgtgtccagttctctgtatctttgacttgatgctttatacatcatttcatttgttgcttctaagggaataagccatagaggcttctccaggtttaaaagaacagtaaagtacctggaaaaccaacatttttgaatgtatggacactggacatgagatatgtacaatgaaatcttaaaagaatctaagaatttgccctctttgccccactccacccagtaatttgacattactagtgccatgtataggacccaactgagtattagaatcagttttgactatgtctttgtatttcctaaatcttttaatgcataaaccgaattagggtccagttggcctgttaatggtaaatttacattttaaatgactcagtttgtttttcctgggcgagtttgcaatgtgataatcagattttttaaaactgattaatttgctttcttgtgtgggtgtactcacattttaaagtatgaaccacagttaactagtggtctcaggggtagtgaaacactcacttttttttttgtttgtttttttttgtttgtttgttgaaatggcttagttgaagtatacttaaggtactgatcatgctgtgttagtaatttgggcggggaggggggtaactcagccatgttttgtgttggcataacaaaactgttaatgattgttgattacacttttaagtgaatttgtcttttatgaggaacccagtgcaagtcactaaatattgtctaatagtgacatctgcataagacttgtaatagctgaagttaattgagcttaaaggaattgttaccattaaagtctgtgtttaaagaca

SEQ ID NO: 406171 - DNA, 2983 bp, Homo sapiens
ctctaccaaccaccggcataagcattcaggggcgttgctttcctggcagtggcccgccccagttcgagccggtgccttactgcgtctcgcgagaacttatgcattttggaggcggaaccccgtcaggaaaagcgcacaaaactgctcttaagtcattgcagagctaccgcttcggttagccagccacgaagttctcgcgagagtcgtctcctcgataccaagtgaggaaactgggggacgctgtggggaggggcgtggggctggatcgcgcagcggctgcttcctttaccttcctcccatggtctccttccggttctcgatgcttctctgagcctaagggtttccgccactcgttcaccctccccccagctcatgatcttcctccctcccccgccctcctggtccaatctccgatctgtttagtaagaaggtgctgttccgagaaggagaaggaaaagggcttgacacgtattcactcggccccggacgtgggaagcaagccgtctggcttcggcctcacatcggtcttgtgctcgggacggcggcgttggcggactgatccgcggcggtgaagaggcaggaggagggggaggggcggagcgtggcagctggcagtagttccgtcagagcggacatcttgtggctgtgtcgtgcgcgtgagccccgtagggccggggaggcaccagctgccgcgcggggaggaggccgaggccgcagcttgagggaggccccggcccctctgcgcctgtgtctggcagagctggtgtgagacgagacaatcctgccccgccgccgggataatcaagagttttggccggacctttgagcatacaccgagagagtgaggagccagacgacaagcacacactatggcgctgaaacggattaataaggaacttagtgatttggcccgtgaccctccagcacaatgttctgcaggtccagttggggatgatatgtttcattggcaagccacaattatgggacctaatgacagcccatatcaaggcggtgtattctttttgacaattcattttcctacagactaccccttcaaaccacctaaggttgcatttacaacaagaatttatcatccaaatattaacagtaatggcagcatttgtctcgatattctaagatcacagtggtcgcctgctttaacaatttctaaagttcttttatccatttgttcactgctatgtgatccaaacccagatgaccccctagtgccagagattgcacggatctataaaacagacagagataagtacaacagaatatctcgggaatggactcagaagtatgccatgtgatgctaccttaaagtcagaataacctgcattatagctggaataaactttaaattactgttccttttttgattttcttatccggctgctcccctatcagacctcatcttttttaattttattttttgtttacctccctccattcattcacatgctcatctgagaagacttaagttcttccagctttggacaataactgcttttagaaactgtaaagtagttacaagagaacagttgcccaagactcagaatttttaaaaaaaaaaatggagcatgtgtattatgtggccaatgtcttcactctaacttggttatgagactaaaaccattcctcactgctctaacatgctgaagaaatcatctgagggggagggagatggatgctcagttgtcacatcaaaggatacagcattattctagcagcatccattcttgtttaagccttccactgttagagatttgaggttacatgatatgctttatgctcataactgatgtggctggagaattggtattgaatttatagcatcagcagaacagaaaatgtgatgtattttatgcatgtcaataaaggaatgacctgttcttgttctacagagaatggaaattggaagtcaaacaccctttgtattccaaaatagggtctcaaacattttgtaattttcatttaaattgttaggaggcttggagctattagttaatctatcttccaatacactgtttaatatagcactgaataaatgatgcaagttgtcaatggatgagtgatcaactaatagctctgctagtaattgatttatttttcttcaataaagttgcataaaccaatgagttagctgcctggattaatcagtatgggaaacaatcttttgtaaatgcaaagctgttttttgtatatactgttgggatttgcttcattgtttgacatcaaatgatgatgtaaagttcgaaagagtgaatattttgccatgttcagttaaagtgcacagtctgttacaggttgacacattgcttgacctgatttatgcagaattaataagctatttggatagtgtagctttaatgtgctgcacatgatactggcagccctagagttcatagatggacttttgggacccagcagttttgaaatgtgtttatggagtttaagaaatttattttccaggtgcagcccctgtctaactgaaatttctcttcaccttgtacacttgacagctgaaaaaaaacaacatgggagtaataatgggtcaaaatttgcaaaataaagtactgttttggtgtgaaaaaaaaaaaaaaaaaaaaaaaaaaaaaaaaaaaaaaaaaaaaaaaaaaaaaaaaaaaaaaaaaaaaaaaaccttgtggcccgtttggcccaagtggtttttaaattgggcaaggtttatccttgggccccaatttggggttcattggcccaattccccttaaggggggccgtttcaacattaatgtgccgcggtttaaaaacgtgggatttggaaaaccttgggggttcccaaattaaatcgctttggagaaaatccctcttttcgccggttggcgaaaaatcgaaaggggccccaaccgtacgccctttccaaaaattggcccaacttgattgccaattggaaattgtagcccgttaatttttgttaaaaatcggggaaattttttgt

SEQ ID NO: 406172 - DNA, 3640 bp, Homo sapiens
aagagctcagaaactgaagcacagaaacgttaggtaggagtctgagaggcgtggagaattttgcttgtgcaagattatttcagagcaaggtcgtgcggtgtgtgtagaagatgaacagactagccactttgcattgactggaaacaatggcatttacagaaagagtcaacagcagtggcaacaggaacttagtgatttggcccgtgaccctccagcacaatgttctgcaggtccagttggggatgatatgtttcattggcaagccacaattatgggacctaatgacagcccatatcaaggcggtgtattctttttgacaattcattttcctacagactaccccttcaaaccacctaaggttgcatttacaacaagaatttatcatccaaatattaacagtaatggcagcatttgtctcgatattctaagatcacagtggtcgcctgctttaacaatttctaaagttcttttatccatttgttcactgctatgtgatccaaacccagatgaccccctagtgccagagattgcacggatctataaaacagacagagataagtacaacagaatatctcgggaatggactcagaagtatgccatgtgatgctaccttaaagtcagaataacctgcattatagctggaataaactttaaattactgttccttttttgattttcttatccggctgctcccctatcagacctcatcttttttaattttattttttgtttacctccctccattcattcacatgctcatctgagaagacttaagttcttccagctttggacaataactgcttttagaaactgtaaagtagttacaagagaacagttgcccaagactcagaatttttaaaaaaaaaaatggagcatgtgtattatgtggccaatgtcttcactctaacttggttatgagactaaaaccattcctcactgctctaacatgctgaagaaatcatctgagggggagggagatggatgctcagttgtcacatcaaaggatacagcattattctagcagcatccattcttgtttaagccttccactgttagagatttgaggttacatgatatgctttatgctcataactgatgtggctggagaattggtattgaatttatagcatcagcagaacagaaaatgtgatgtattttatgcatgtcaataaaggaatgacctgttcttgttctacagagaatggaaattggaagtcaaacaccctttgtattccaaaatagggtctcaaacattttgtaattttcatttaaattgttaggaggcttggagctattagttaatctatcttccaatacactgtttaatatagcactgaataaatgatgcaagttgtcaatggatgagtgatcaactaatagctctgctagtaattgatttatttttcttcaataaagttgcataaaccaatgagttagctgcctggattaatcagtatgggaaacaatcttttgtaaatgcaaagctgttttttgtatatactgttgggatttgcttcattgtttgacatcaaatgatgatgtaaagttcgaaagagtgaatattttgccatgttcagttaaagtgcacagtctgttacaggttgacacattgcttgacctgatttatgcagaattaataagctatttggatagtgtagctttaatgtgctgcacatgatactggcagccctagagttcatagatggacttttgggacccagcagttttgaaatgtgtttatggagtttaagaaatttattttccaggtgcagcccctgtctaactgaaatttctcttcaccttgtacacttgacagctgaaaaaaaacaacatgggagtaataatgggtcaaaatttgcaaaataaagtactgttttggtgtgggagttgtcatgaggctgtgttgaagtgacttatctatgtgggatattgagtatccattgaaatggatttgttcagccatttacattaatgagcatttaaatgcaacagatatcatttcaggtgacttaacatgaatgaataaaagtcaatgctattggattgttttttgtttgacaagtgctatctgtgccactgatttaacttctgtagtaacaagggcattaccattcttcacctttcctaattctgatcccatagttttacatttttcctgtttattttgattttgttcactgctttatttcttaaagttctagcacatctgtgactcctccacttccacatttttgcactgcttacacttacgtgcaatcttattccttgtctgcacacacatgtggaaagctagaaataaatgttaaaacttactttttataaacattttaatatgtagtttggacatgatttattgacttaaggttcttctctaaactggaagtgaaatgcatgccttctgaagatgttctggctttgttaattctgtaatcatttcattggggaaaaaaccagctacgcagtttttccaatgagtgaattttttcattttgtgttttgcttaaaacggctccttcagggtagatgtcatactgcataacttttttggattcaaattatgaatgagaaattagttaacattctgctccacaaggtaagaaaaactgctctttggctctattttcaaaattacttctgagatgcatatagtctcaaaataacagctttagtaggcatatcacttcttgaaagccaaacatgagtgtaagacacttttatgaaacacggtggatccctaactggctttcaaattgacctttatagccttagacaacccttaggtatttacggagatgacttctttgattgtcataacaattagtggatgtgtccagttctctgtatctttgacttgatgctttatacatcatttcatttgttgcttctaagggaataagccatagaggcttctccaggtttaaaagaacagtaaagtacctggaaaaccaacatttttgaatgtatggacactggacatgagatatgtacaatgaaatcttaaaagaatctaagaatttgccctctttgccccactccacccagtaatttgacattactagtgccatgtataggacccaactgagtattagaatcagttttgactatgtctttgtatttcctaaatcttttaatgcataaaccgaattagggtccagttggcctgttaatggtaaatttacattttaaatgactcagtttgtttttcctgggcgagtttgcaatgtgataatcagattttttaaaactgattaatttgctttcttgtgtgggtgtactcacattttaaagtatgaaccacagttaactagtggtctcaggggtagtgaaacactcacttttttttttgtttgtttttttttgtttgtttgttgaaatggcttagttgaagtatacttaaggtactgatcatgctgtgttagtaatttgggcggggaggggggtaactcagccatgttttgtgttggcataacaaaactgttaatgattgttgattacacttttaagtgaatttgtcttttatgaggaacccagtgcaagtcactaaatattgtctaatagtgacatctgcataagacttgtaatagctgaagttaattgagcttaaaggaattgttaccattaaagtctgtgtttaaagaca

SEQ ID NO: 406173 - DNA, 3453 bp, Homo sapiens
atcagctcgcccggatagcgggactccagcacaatgttcgtgcaggtcattggggatgatatgtttcattggcaagccacaattatgggacctaatgacagcccatatcaaggcggtgtattctttttgacaattcattttcctacagactaccccttcaaaccacctaaggttgcatttacaacaagaatttatcatccaaatattaacagtaatggcagcatttgtctcgatattctaagatcacagtggtcgcctgctttaacaatttctaaagttcttttatccatttgttcactgctatgtgatccaaacccagatgaccccctagtgccagagattgcacggatctataaaacagacagagataagtacaacagaatatctcgggaatggactcagaagtatgccatgtgatgctaccttaaagtcagaataacctgcattatagctggaataaactttaaattactgttccttttttgattttcttatccggctgctcccctatcagacctcatcttttttaattttattttttgtttacctccctccattcattcacatgctcatctgagaagacttaagttcttccagctttggacaataactgcttttagaaactgtaaagtagttacaagagaacagttgcccaagactcagaatttttaaaaaaaaaaatggagcatgtgtattatgtggccaatgtcttcactctaacttggttatgagactaaaaccattcctcactgctctaacatgctgaagaaatcatctgagggggagggagatggatgctcagttgtcacatcaaaggatacagcattattctagcagcatccattcttgtttaagccttccactgttagagatttgaggttacatgatatgctttatgctcataactgatgtggctggagaattggtattgaatttatagcatcagcagaacagaaaatgtgatgtattttatgcatgtcaataaaggaatgacctgttcttgttctacagagaatggaaattggaagtcaaacaccctttgtattccaaaatagggtctcaaacattttgtaattttcatttaaattgttaggaggcttggagctattagttaatctatcttccaatacactgtttaatatagcactgaataaatgatgcaagttgtcaatggatgagtgatcaactaatagctctgctagtaattgatttatttttcttcaataaagttgcataaaccaatgagttagctgcctggattaatcagtatgggaaacaatcttttgtaaatgcaaagctgttttttgtatatactgttgggatttgcttcattgtttgacatcaaatgatgatgtaaagttcgaaagagtgaatattttgccatgttcagttaaagtgcacagtctgttacaggttgacacattgcttgacctgatttatgcagaattaataagctatttggatagtgtagctttaatgtgctgcacatgatactggcagccctagagttcatagatggacttttgggacccagcagttttgaaatgtgtttatggagtttaagaaatttattttccaggtgcagcccctgtctaactgaaatttctcttcaccttgtacacttgacagctgaaaaaaaacaacatgggagtaataatgggtcaaaatttgcaaaataaagtactgttttggtgtgggagttgtcatgaggctgtgttgaagtgacttatctatgtgggatattgagtatccattgaaatggatttgttcagccatttacattaatgagcatttaaatgcaacagatatcatttcaggtgacttaacatgaatgaataaaagtcaatgctattggattgttttttgtttgacaagtgctatctgtgccactgatttaacttctgtagtaacaagggcattaccattcttcacctttcctaattctgatcccatagttttacatttttcctgtttattttgattttgttcactgctttatttcttaaagttctagcacatctgtgactcctccacttccacatttttgcactgcttacacttacgtgcaatcttattccttgtctgcacacacatgtggaaagctagaaataaatgttaaaacttactttttataaacattttaatatgtagtttggacatgatttattgacttaaggttcttctctaaactggaagtgaaatgcatgccttctgaagatgttctggctttgttaattctgtaatcatttcattggggaaaaaaccagctacgcagtttttccaatgagtgaattttttcattttgtgttttgcttaaaacggctccttcagggtagatgtcatactgcataacttttttggattcaaattatgaatgagaaattagttaacattctgctccacaaggtaagaaaaactgctctttggctctattttcaaaattacttctgagatgcatatagtctcaaaataacagctttagtaggcatatcacttcttgaaagccaaacatgagtgtaagacacttttatgaaacacggtggatccctaactggctttcaaattgacctttatagccttagacaacccttaggtatttacggagatgacttctttgattgtcataacaattagtggatgtgtccagttctctgtatctttgacttgatgctttatacatcatttcatttgttgcttctaagggaataagccatagaggcttctccaggtttaaaagaacagtaaagtacctggaaaaccaacatttttgaatgtatggacactggacatgagatatgtacaatgaaatcttaaaagaatctaagaatttgccctctttgccccactccacccagtaatttgacattactagtgccatgtataggacccaactgagtattagaatcagttttgactatgtctttgtatttcctaaatcttttaatgcataaaccgaattagggtccagttggcctgttaatggtaaatttacattttaaatgactcagtttgtttttcctgggcgagtttgcaatgtgataatcagattttttaaaactgattaatttgctttcttgtgtgggtgtactcacattttaaagtatgaaccacagttaactagtggtctcaggggtagtgaaacactcacttttttttttgtttgtttttttttgtttgtttgttgaaatggcttagttgaagtatacttaaggtactgatcatgctgtgttagtaatttgggcggggaggggggtaactcagccatgttttgtgttggcataacaaaactgttaatgattgttgattacacttttaagtgaatttgtcttttatgaggaacccagtgcaagtcactaaatattgtctaatagtgacatctgcataagacttgtaatagctgaagttaattgagcttaaaggaattgttaccattaaagtctgtgtttaaagaca

SEQ ID NO: 406174 - DNA, 4290 bp, Homo sapiens
ctctaccaaccaccggcataagcattcaggggcgttgctttcctggcagtggcccgccccagttcgagccggtgccttactgcgtctcgcgagaacttatgcattttggaggcggaaccccgtcaggaaaagcgcacaaaactgctcttaagtcattgcagagctaccgcttcggttagccagccacgaagttctcgcgagagtcgtctcctcgataccaagtgaggaaactgggggacgctgtggggaggggcgtggggctggatcgcgcagcggctgcttcctttaccttcctcccatggtctccttccggttctcgatgcttctctgagcctaagggtttccgccactcgttcaccctccccccagctcatgatcttcctccctcccccgccctcctggtccaatctccgatctgtttagtaagaaggtgctgttccgagaaggagaaggaaaagggcttgacacgtattcactcggccccggacgtgggaagcaagccgtctggcttcggcctcacatcggtcttgtgctcgggacggcggcgttggcggactgatccgcggcggtgaagaggcaggaggagggggaggggcggagcgtggcagctggcagtagttccgtcagagcggacatcttgtggctgtgtcgtgcgcgtgagccccgtagggccggggaggcaccagctgccgcgcggggaggaggccgaggccgcagcttgagggaggccccggcccctctgcgcctgtgtctggcagagctggtgtgagacgagacaatcctgccccgccgccgggataatcaagagttttggccggacctttgagcatacaccgagagagtgaggagccagacgacaagcacacactatggcgctgaaacggattaataaggaacttagtgatttggcccgtgaccctccagcacaatgttctgcaggtccagttggggatgatatgtttcattggcaagccacaattatgggacctaatgacagcccatatcaaggcggtgtattctttttgacaattcattttcctacagactaccccttcaaaccacctaaggttgcatttacaacaagaatttatcatccaaatattaacagtaatggcagcatttgtctcgatattctaagatcacagtggtcgcctgctttaacaatttctaaaggagattgcacggatctataaaacagacagagataagtacaacagaatatctcgggaatggactcagaagtatgccatgtgatgctaccttaaagtcagaataacctgcattatagctggaataaactttaaattactgttccttttttgattttcttatccggctgctcccctatcagacctcatcttttttaattttattttttgtttacctccctccattcattcacatgctcatctgagaagacttaagttcttccagctttggacaataactgcttttagaaactgtaaagtagttacaagagaacagttgcccaagactcagaatttttaaaaaaaaaaatggagcatgtgtattatgtggccaatgtcttcactctaacttggttatgagactaaaaccattcctcactgctctaacatgctgaagaaatcatctgagggggagggagatggatgctcagttgtcacatcaaaggatacagcattattctagcagcatccattcttgtttaagccttccactgttagagatttgaggttacatgatatgctttatgctcataactgatgtggctggagaattggtattgaatttatagcatcagcagaacagaaaatgtgatgtattttatgcatgtcaataaaggaatgacctgttcttgttctacagagaatggaaattggaagtcaaacaccctttgtattccaaaatagggtctcaaacattttgtaattttcatttaaattgttaggaggcttggagctattagttaatctatcttccaatacactgtttaatatagcactgaataaatgatgcaagttgtcaatggatgagtgatcaactaatagctctgctagtaattgatttatttttcttcaataaagttgcataaaccaatgagttagctgcctggattaatcagtatgggaaacaatcttttgtaaatgcaaagctgttttttgtatatactgttgggatttgcttcattgtttgacatcaaatgatgatgtaaagttcgaaagagtgaatattttgccatgttcagttaaagtgcacagtctgttacaggttgacacattgcttgacctgatttatgcagaattaataagctatttggatagtgtagctttaatgtgctgcacatgatactggcagccctagagttcatagatggacttttgggacccagcagttttgaaatgtgtttatggagtttaagaaatttattttccaggtgcagcccctgtctaactgaaatttctcttcaccttgtacacttgacagctgaaaaaaaacaacatgggagtaataatgggtcaaaatttgcaaaataaagtactgttttggtgtgggagttgtcatgaggctgtgttgaagtgacttatctatgtgggatattgagtatccattgaaatggatttgttcagccatttacattaatgagcatttaaatgcaacagatatcatttcaggtgacttaacatgaatgaataaaagtcaatgctattggattgttttttgtttgacaagtgctatctgtgccactgatttaacttctgtagtaacaagggcattaccattcttcacctttcctaattctgatcccatagttttacatttttcctgtttattttgattttgttcactgctttatttcttaaagttctagcacatctgtgactcctccacttccacatttttgcactgcttacacttacgtgcaatcttattccttgtctgcacacacatgtggaaagctagaaataaatgttaaaacttactttttataaacattttaatatgtagtttggacatgatttattgacttaaggttcttctctaaactggaagtgaaatgcatgccttctgaagatgttctggctttgttaattctgtaatcatttcattggggaaaaaaccagctacgcagtttttccaatgagtgaattttttcattttgtgttttgcttaaaacggctccttcagggtagatgtcatactgcataacttttttggattcaaattatgaatgagaaattagttaacattctgctccacaaggtaagaaaaactgctctttggctctattttcaaaattacttctgagatgcatatagtctcaaaataacagctttagtaggcatatcacttcttgaaagccaaacatgagtgtaagacacttttatgaaacacggtggatccctaactggctttcaaattgacctttatagccttagacaacccttaggtatttacggagatgacttctttgattgtcataacaattagtggatgtgtccagttctctgtatctttgacttgatgctttatacatcatttcatttgttgcttctaagggaataagccatagaggcttctccaggtttaaaagaacagtaaagtacctggaaaaccaacatttttgaatgtatggacactggacatgagatatgtacaatgaaatcttaaaagaatctaagaatttgccctctttgccccactccacccagtaatttgacattactagtgccatgtataggacccaactgagtattagaatcagttttgactatgtctttgtatttcctaaatcttttaatgcataaaccgaattagggtccagttggcctgttaatggtaaatttacattttaaatgactcagtttgtttttcctgggcgagtttgcaatgtgataatcagattttttaaaactgattaatttgctttcttgtgtgggtgtactcacattttaaagtatgaaccacagttaactagtggtctcaggggtagtgaaacactcacttttttttttgtttgtttttttttgtttgtttgttgaaatggcttagttgaagtatacttaaggtactgatcatgctgtgttagtaatttgggcggggaggggggtaactcagccatgttttgtgttggcataacaaaactgttaatgattgttgattacacttttaagtgaatttgtcttttatgaggaacccagtgcaagtcactaaatattgtctaatagtgacatctgcataagacttgtaatagctgaagttaattgagcttaaaggaattgttaccattaaagtctgtgtttaaagaca

SEQ ID NO: 406175 - DNA, 2518 bp, Homo sapiens
ctctaccaaccaccggcataagcattcaggggcgttgctttcctggcagtggcccgccccagttcgagccggtgccttactgcgtctcgcgagaacttatgcattttggaggcggaaccccgtcaggaaaagcgcacaaaactgctcttaagtcattgcagagctaccgcttcggttagccagccacgaagttctcgcgagagtcgtctcctcgataccaagtgaggaaactgggggacgctgtggggaggggcgtggggctggatcgcgcagcggctgcttcctttaccttcctcccatggtctccttccggttctcgatgcttctctgagcctaagggtttccgccactcgttcaccctccccccagctcatgatcttcctccctcccccgccctcctggtccaatctccgatctgtttagtaagaaggtgctgttccgagaaggagaaggaaaagggcttgacacgtattcactcggccccggacgtgggaagcaagccgtctggcttcggcctcacatcggtcttgtgctcgggacggcggcgttggcggactgatccgcggcggtgaagaggcaggaggagggggaggggcggagcgtggcagctggcagtagttccgtcagagcggacatcttgtggctgtgtcgtgcgcgtgagccccgtagggccggggaggcaccagctgccgcgcggggaggaggccgaggccgcagcttgagggaggccccggcccctctgcgcctgtgtctggcagagctggtgtgagacgagacaatcctgccccgccgccgggataatcaagagttttggccggacctttgagcatacaccgagagagtgaggagccagacgacaagcacacactatggcgctgaaacggattaataaggaacttagtgatttggcccgtgaccctccagcacaatgttctgcaggtccagttggggatgatatgtttcattggcaagccacaattatgggacctaatgacagcccatatcaaggcggtgtattctttttgacaattcattttcctacagactaccccttcaaaccacctaaggttgcatttacaacaagaatttatcatccaaatattaacagtaatggcagcatttgtctcgatattctaagatcacagtggtcgcctgctttaacaatttctaaagttcttttatccatttgttcactgctatgtgatccaaacccagatgaccccctagtgccagagattgcacggatctataaaacagacagagataagtacaacagaatatctcgggaatggactcagaagtatgccatgtgatgctaccttaaagtcagaataacctgcattatagctggaataaactttaaattactgttccttttttgattttcttatccggctgctcccctatcagacctcatcttttttaattttattttttgtttacctccctccattcattcacatgctcatctgagaagacttaagttcttccagctttggacaataactgcttttagaaactgtaaagtagttacaagagaacagttgcccaagactcagaatttttaaaaaaaaaaatggagcatgtgtattatgtggccaatgtcttcactctaacttggttatgagactaaaaccattcctcactgctctaacatgctgaagaaatcatctgagggggagggagatggatgctcagttgtcacatcaaaggatacagcattattctagcagcatccattcttgtttaagccttccactgttagagatttgaggttacatgatatgctttatgctcataactgatgtggctggagaattggtattgaatttatagcatcagcagaacagaaaatgtgatgtattttatgcatgtcaataaaggaatgacctgttcttgttctacagagaatggaaattggaagtcaaacaccctttgtattccaaaatagggtctcaaacattttgtaattttcatttaaattgttaggaggcttggagctattagttaatctatcttccaatacactgtttaatatagcactgaataaatgatgcaagttgtcaatggatgagtgatcaactaatagctctgctagtaattgatttatttttcttcaataaagttaaaaaaaaaaaaaaaaaaaaaaaaaaaaaaaaaaaaaaaaaaaaaaaaaaaaaaaaaaaaaaaaaaaaaaaaccttgtggcccgtttggcccaagtggtttttaaattgggcaaggtttatccttgggccccaatttggggttcattggcccaattccccttaaggggggccgtttcaacattaatgtgccgcggtttaaaaacgtgggatttggaaaaccttgggggttcccaaattaaatcgctttggagaaaatccctcttttcgccggttggcgaaaaatcgaaaggggccccaaccgtacgccctttccaaaaattggcccaacttgattgccaattggaaattgtagcccgttaatttttgttaaaaatcggggaaattttttgt

SEQ ID NO: 406176 - DNA, 1207 bp, Homo sapiens
ctctaccaaccaccggcataagcattcaggggcgttgctttcctggcagtggcccgccccagttcgagccggtgccttactgcgtctcgcgagaacttatgcattttggaggcggaaccccgtcaggaaaagcgcacaaaactgctcttaagtcattgcagagctaccgcttcggttagccagccacgaagttctcgcgagagtcgtctcctcgataccaagtgaggaaactgggggacgctgtggggaggggcgtggggctggatcgcgcagcggctgcttcctttaccttcctcccatggtctccttccggttctcgatgcttctctgagcctaagggtttccgccactcgttcaccctccccccagctcatgatcttcctccctcccccgccctcctggtccaatctccgatctgtttagtaagaaggtgctgttccgagaaggagaaggaaaagggcttgacacgtattcactcggccccggacgtgggaagcaagccgtctggcttcggcctcacatcggtcttgtgctcgggacggcggcgttggcggactgatccgcggcggtgaagaggcgcctgtgtctggcagagctggtgtgagacgagacaatcctgccccgccgccgggataatcaagagttttggccggacctttgagcatacaccgagagagtgaggagccagacgacaagcacacactatggcgctgaaacggattaataaggaacttagtgatttggcccgtgaccctccagcacaatgttctgcaggtccagttggggatgatatgtttcattggcaagccacaattatgggacctaatgacagcccatatcaaggcggtgtattctttttgacaattcattttcctacagactaccccttcaaaccacctaaggttgcatttacaacaagaatttatcatccaaatattaacagtaatggcagcatttgtctcgatattctaagatcacagtggtcgcctgctttaacaatttctaaagttcttttatccatttgttcactgctatgtgatccaaacccagatgaccccctagtgccagagattgcacggatctataaaacagacagagataagtacaacagaatatctcgggaatggactcagaagtatgccatgtgatgctaccttaaagtcagaataacctgcattatagctggaataaactttaaattactgtt

SEQ ID NO: 406177 - DNA, 1569 bp, Homo sapiens
ctctaccaaccaccggcataagcattcaggggcgttgctttcctggcagtggcccgccccagttcgagccggtgccttactgcgtctcgcgagaacttatgcattttggaggcggaaccccgtcaggaaaagcgcacaaaactgctcttaagtcattgcagagctaccgcttcggttagccagccacgaagttctcgcgagagtcgtctcctcgataccaagtgaggaaactgggggacgctgtggggaggggcgtggggctggatcgcgcagcggctgcttcctttaccttcctcccatggtctccttccggttctcgatgcttctctgagcctaagggtttccgccactcgttcaccctccccccagctcatgatcttcctccctcccccgccctcctggtccaatctccgatctgtttagtaagaaggtgctgttccgagaaggagaaggaaaagggcttgacacgtattcactcggccccggacgtgggaagcaagccgtctggcttcggcctcacatcggtcttgtgctcgggacggcggcgttggcggactgatccgcggcggtgaagaggcaggaggagggggaggggcggagcgtggcagctggcagtagttccgtcagagcggacatcttgtggctgtgtcgtgcgcgtgagccccgtagggccggggaggcaccagctgccgcgcggggaggaggccgaggccgcagcttgagggaggccccggcccctctgcgcctgtgtctggcagagctggtgtgagacgagacaatcctgccccgccgccgggataatcaagagttttggccggacctttgagcatacaccgagagagtgaggagccagacgacaagcacacactatggcgctgaaacggattaataaggaacttagtgatttggcccgtgaccctccagcacaatgttctgcaggtccagttggggatgatatgtttcattggcaagccacaattatgggacctaatgacagcccatatcaaggcggtgtattctttttgacaattcattttcctacagactaccccttcaaaccacctaaggttgcatttacaacaagaatttatcatccaaatattaacagtaatggcagcatttgtctcgatattctaagatcacagtggtcgcctgctttaacaatttctaaagttcttttatccatttgttcactgctatgtgatccaaacccagatgaccccctagtgccagagattgcacggatctataaaacagacagagataacgatcacccgactcttccgggaatggggccagagtatgcctgttattgtccctgttcgccggcctatcgttgataacgtgagtacggtcctttgatttctatcggagtccgatgaaccaacttaatatatgggacccccgagtacggtgtctacgacacgctccgggggacaggtcaacagatatggaagcgcccgcataccaactttttggctcgatgacacaccccactggagggcggctttggatgatattattgaggtgcgagctgacacgcctcggccgaccagtgcccgccagtcg

SEQ ID NO: 406178 - DNA, 422 bp, Homo sapiens
taaaccctatatgcgtcttatgtgtaccagtatagctatgaggaacagtcttattttgaggattttgagtcataggtctgtaatttatagagatctctagaattcttattgtaattttcctacttctttgataaaagaaaaataagtcagattgttaactccaagattgaaaaaaaaaactcttgaaagaagattattagttgtaactaatttgggggttctgggcacagacatctaacctggtattgtaaggcagaggctcccattggaatggtagtggtccgggtcagttgttcatggtgtaagctttgcacagtgtattaacattgggagggtctggcttgaaaatttggccaccctcagcctctgaatgtttattaaaataaatttagtctttctttgcttaatataaaatagtgcca

SEQ ID NO: 406179 - DNA, 3019 bp, Homo sapiens
tgctagccttgtttcgggtctaccttgtctctcggctctagcttgtctctcggctctaccttgtctctcggctctaccttgtctctcggctctaccttgtctctggctctaccgtctccatcattctcttcctcaacaagatggacctcctggtggagaaggtgaagaccgtgagcatcaagaagcacttcccggacttcaggggcgacccgcacaggctggaggacgtccagcgctacctggtccagtgcttcgacaggaagagacggaaccgcagcaagccactcttccaccacttcaccaccgccatcgacaccgagaacgtccgcttcgtgttccatgctgtgaaagacaccatcctgcaggagaacctgaaggacatcatgctgcagtgagcgaggaagccccggggtttgtcgtcgttgagcagcccccacggctgtcggtcagactcttgggtgtgtgttgtctgtgtggtccttgagtgggtttctcggatccgtgccctggaatacctggctcaggaatgctgtcagaccagccagccagcgagctctaggcaaaaggacatggaaactgtcacgttagctactgaatcctgggggcgagtgaaactactgaaaatccgagtgatgatgttgtgaatacggaacacctaatcacacagcttgctttgcttttacagaaacgttcctctttttctgacgcagtttaattgaggaccgtgttgtgtgtgtatgtgtgtacacacgctctgtctttaatgacagaaacacaaaaaccagctggccttgcagacggcttttctaactcacaagtcttccctgagacagactaacctgaaagctttgcctaacagtagcttgtagagatccagtgcacgccgatgctgctaaactcagtgcctgagcccggccctgcagccccagccgcagtgtctgaaggccacctcccaaagggagcacgttgccttttcaaactcccgtgccgatttcctaagagcccctagtccaagcctctcagatgaagctgaggagccgtgcctaggatcccttcccagctctgaggacgggctgcagagctctgcaggtgtggattcaccttacgcccctacagcaggctcagcccttcccaccctgcccgatgcccagcagcacaacacggagtgagacaggatgcccacggtgactgccgctccgtccgtgcacacacagcggtgctcttctccccttagccacccactgcccaacccaacggcaaagacacagaaaccaggtccccttgcagatggctctcccatcttcctgcaagtcatctgctcacacacagttggcagcacatagcgtttccttctttcagaaacattcctcttctggggcttcagaaagctggcaaggccactagcagagcttttgttaatgccccagctgcttggcgagctaacagctgacctttcgggaagcccacagacgctggaggaatcttgagtttctccaaactgccgctccaccagtgcctttggacagccgtgcctgttcgccgctctccctaagtctgattctcatcgaggcccctcgcttctatgactgtgcttgcagaagagtaaacactctcggatgccgctgtcctgggggagcccgcgggagcctgtgaatgttgatacgagctggccagtcctgggcccagctcacttgtccagctacctgccaggtggctttcactgtgtttaaaatacattgcattccaagctggtcccctctgtgtatcactctactgagaaatcctgcctagtgtgttttgggatgtgtcctagcatttacaagaaaatgaaaagcgtcctcttaattggcacccgaatgttgctgtggctcagtcacatatcccagggccctcgtcccgaggccgtgctgccccgagccccgagcccctctgcagctcacccttggcttgttttccgcaaacccggtaaacgcaagcccttggggcagatgcagaagcagaagagggaggggaaacctgcctctgggtcaccctgttagcacagcgttctcatcgggagacagcatggaactctctctcgcagtgctcgaggctgtgtgtcagtgtttgctgggcttgtggctccttttttggctggataaagaagtcgctgtttttgtactgcttctgtggctcttcacagacctcacggatgtgaccggagatgagtgccgatgaccacgttttaaaggagaaagagagctcctggtggggccctcggggtggtctcaggtcccatttgcagtctgcaacagtgacgcgcagcccggtccggagcgtggtgagctttgtttgccttctgggtcggctttcgctgtgtctcctgtgtgtgttagaatccagagcccagaggaagtgcaagcgggtcctccgccaacggggagagcctcttcgcggcgctgttggcgacagcagcgctgtgattcgcgtagcaggggagttgtttgaaacaccttcctgagtagtccggccttgtcaatgagtgcttgttttcctttaaacagtctgacatatttactcgtcactttcaaaccagaagcatgagaggaaggagatattgtggggtccgtttaactcgatagaaagcgcagggggatggcccccggcgcaggctcttgacccgctcagcgctgaccccaccgccctggccgaggcacttggccttgctgagctggacttcctcctcctcctcctcatgaccggggtgaattagaacgtttttaaagacacccccttccaaattctgtaacacattgtaattggagaagaaggaaactctgcaaggctaaactgtcattcacaacttggctacacatagactctagtcagttttgtctccagaaccttaggcttttgtattttttaattttaatttcactgttaatccttattgtcttttttattaagatgttggaaaagcaggaggtagttgtgcctcaattattgcaaaaatgtaacaataaagttcctcaaaataaga

SEQ ID NO: 406180 - DNA, 3479 bp, Homo sapiens
tgctagccttgtttcgggtctaccttgtctctcggctctagcttgtctctcggctctaccttgtctctcggctctaccttgtctctcggctctaccttgtctctggctctaccgtctccatcattctcttcctcaacaagatggacctcctggtggagaaggtgaagaccgtgagcatcaagaagcacttcccggacttcaggggcgacccgcacaggctggaggacgtccagcgctacctggtccagtgcttcgacaggaagagacggaaccgcagcaagccactcttccaccacttcaccaccgccatcgacaccgagaacgtccgcttcgtgttccatgctgtgaaagacaccatcctgcaggagaacctgaaggacatcatgctgcagtgagcgaggaagccccggggtttgtcgtcgttgagcagcccccacggctgtcggtcagactcttgggtgtgtgttgtctgtgtggtccttgagtgggtttctcggatccgtgccctggaatacctggctcaggaatgctgtcagaccagccagccagcgagctctaggcaaaaggacatggaaactgtcacgttagctactgaatcctgggggcgagtgaaactactgaaaatccgagtgatgatgttgtgaatacggaacacctaatcacacagcttgctttgcttttacagaaacgttcctctttttctgacgcagtttaattgaggaccgtgttgtgtgtgtatgtgtgtacacacgctctgtctttaatgacagaaacacaaaaaccagctggccttgcagacggcttttctaactcacaagtcttccctgagacagactaacctgaaagctttgcctaacagtagcttgtagagatccagtgcacgccgatgctgctaaactcagtgcctgagcccggccctgcagccccagccgcagtgtctgaaggccacctcccaaagggagcacgttgccttttcaaactcccgtgccgatttcctaagagcccctagtccaagcctctcagatgaagctgaggagccgtgcctaggatcccttcccagctctgaggacgggctgcagagctctgcaggtgtggattcaccttacgcccctacagcaggctcagcccttcccaccctgcccgatgcccagcagcacaacacggagtgagacaggatgcccacggtgactgccgctccgtccgtgcacacacagcggtgctcttctccccttagccacccactgcccaacccaacggcaaagacacagaaaccaggtccccttgcagatggctctcccatcttcctgcaagtcatctgctcacacacagttggcagcacatagcgtttccttctttcagaaacattcctcttctggggcttcagaaagctggcaaggccactagcagagcttttgttaatgccccagctgcttggcgagctaacagctgacctttcgggaagcccacagacgctggaggaatcttgagtttctccaaactgccgctccaccagtgcctttggacagccgtgcctgttcgccgctctccctaagtctgattctcatcgaggcccctcgcttctatgactgtgcttgcagaagagtaaacactctcggatgccgctgtcctgggggagcccgcgggagcctgtgaatgttgatacgagctggccagtcctgggcccagctcacttgtccagctacctgccaggtggctttcactgtgtttaaaatacattgcattccaagctggtcccctctgtgtatcactctactgagaaatcctgcctagtgtgttttgggatgtgtcctagcatttacaagaaaatgaaaagcgtcctcttaattggcacccgaatgttgctgtggctcagtcacatatcccagggccctcgtcccgaggccgtgctgccccgagccccgagcccctctgcagctcacccttggcttgttttccgcaaacccggtaaacgcaagcccttggggcagatgcagaagcagaagagggaggggaaacctgcctctgggtcaccctgttagcacagcgttctcatcgggagacagcatggaactctctctcgcagtgctcgaggctgtgtgtcagtgtttgctgggcttgtggctccttttttggctggataaagaagtcgctgtttttgtactgcttctgtggctcttcacagacctcacggatgtgaccggagatgagtgccgatgaccacgttttaaaggagaaagagagctcctggtggggccctcggggtggtctcaggtcccatttgcagtctgcaacagtgacgcgcagcccggtccggagcgtggtgagctttgtttgccttctgggtcggctttcgctgtgtctcctgtgtgtgttagaatccagagcccagaggaagtgcaagcgggtcctccgccaacggggagagcctcttcgcggcgctgttggcgacagcagcgctgtgattcgcgtagcaggggagttgtttgaaacaccttcctgagtagtccggccttgtcaatgagtgcttgttttcctttaaacagtctgacatatttactcgtcactttcaaaccagaagcatgagaggaaggagatattgtggggtccgtttaactcgatagaaagcgcagggggatggcccccggcgcaggctcttgacccgctcagcgctgaccccaccgccctggccgaggcacttggccttgctgagctggacttcctcctcctcctcctcatgaccggggtgaattagaacgtttttaaagacacccccttccaaattctgtaacacattgtaattggagaagaaggaaactctgcaaggctaaactgtcattcacaacttggctacacatagactctagtcagttttgtctccagaaccttaggcttttgtattttttaattttaatttcactgttaatccttattgtcttttttattaagatgttggaaaagcaggaggtagttgtgcctcaattattgcaaaaatgtaacaataaagttcctcaaaataagatctgttcctcatagctatactgtgtacacataagacgcatatagggttttactgaaatctatttttaactcttatgttcgtagagaaattgtttcaaggattttgagtcataggtctgtaatttatagagatctctagaattcttattgtaattttcctacttctttgataaaagaaaaataagtcagattgttaactccaagattgaaaaaaaaaactcttgaaagaagattattagttgtaactaatttgggggttctgggcacagacatctaacctggtattgtaaggcagaggctcccattggaatggtagtggtccgggtcagttgttcatggtgtaagctttgcacagtgtattaacattgggagggtctggcttgaaaatttggccaccctcagcctctgaatgtttattaaaataaatttagtctttctttgcttaatataaaatagtgcca

SEQ ID NO: 406181 - DNA, 1829 bp, Homo sapiens
caccgggatgtgtacagccaactccacacatctgccaaaaagagcaagtcatcaaggcgagcagtctcgactcaagactccctagctgcagaaaaccaatgttgtcagttgtaacaggttaatatattatttatgccacacaaaaaaggaatagtacaggcaatgatcttccaaagaaagtctttaaggcatctgtaacttctgggaatttcagggtttttatcttgccagtcagctctcactaaagtacttccacagagtgagaaggtggctcccaagtccctttggtgagttggtgccacctgcttcctctgccaccaggctggggtggggagctttggtgcttcaggtagttcttctgggacttgtcccaagggaagcaagtgtctgtcatggaaacattacccttccttgttcctgctactgtcccggtgggaagtcgacttcccgcgggagcctgtgaatgttgatacgagctggccagtcctgggcccagctcacttgtccagctacctgccaggtggctttcactgtgtttaaaatacattgcattccaagctggtcccctctgtgtatcactctactgagaaatcctgcctagtgtgttttgggatgtgtcctagcatttacaagaaaatgaaaagcgtcctcttaattggcacccgaatgttgctgtggctcagtcacatatcccagggccctcgtcccgaggccgtgctgccccgagccccgagcccctctgcagctcacccttggcttgttttccgcaaacccggtaaacgcaagcccttggggcagatgcagaagcagaagagggaggggaaacctgcctctgggtcaccctgttagcacagcgttctcatcgggagacagcatggaactctctctcgcagtgctcgaggctgtgtgtcagtgtttgctgggcttgtggctccttttttggctggataaagaagtcgctgtttttgtactgcttctgtggctcttcacagacctcacggatgtgaccggagatgagtgccgatgaccacgttttaaaggagaaagagagctcctggtggggccctcggggtggtctcaggtcccatttgcagtctgcaacagtgacgcgcagcccggtccggagcgtggtgagctttgtttgccttctgggtcggctttcgctgtgtctcctgtgtgtgttagaatccagagcccagaggaagtgcaagcgggtcctccgccaacggggagagcctcttcgcggcgctgttggcgacagcagcgctgtgattcgcgtagcaggggagttgtttgaaacaccttcctgagtagtccggccttgtcaatgagtgcttgttttcctttaaacagtctgacatatttactcgtcactttcaaaccagaagcatgagaggaaggagatattgtggggtccgtttaactcgatagaaagcgcagggggatggcccccggcgcaggctcttgacccgctcagcgctgaccccaccgccctggccgaggcacttggccttgctgagctggacttcctcctcctcctcctcatgaccggggtgaattagaacgtttttaaagacacccccttccaaattctgtaacacattgtaattggagaagaaggaaactctgcaaggctaaactgtcattcacaacttggctacacatagactctagtcagttttgtctccagaaccttaggcttttgtattttttaattttaatttcactgttaatccttattgtcttttttattaagatgttggaaaagcaggaggtagttgtgcctcaattattgcaaaaatgtaacaataaagttcctcaaaataaga

SEQ ID NO: 406182 - DNA, 2851 bp, Homo sapiens
cgatgggtccctgccgggatgtgtttactgtgtttgtgtgtgtctctgtgtgtctgtctgtgtgtctgtgtctgtccctgtcgggatgtatttactgtgtgggtgtgtgtgtgtgtgtgtgtgtctgcgtgtgtatgtgtttgtgtccctgccgggatgtgttcaccgtatgcatgtctatgtctttgagacacacactcctagagacacaccccctctcacgctgacttcctggaccccggggtttgtcgtcgttgagcagcccccacggctgtcggtcagactcttgggtgtgtgttgtctgtgtggtccttgagtgggtttctcggatccgtgccctggaatacctggctcaggaatgctgtcagaccagccagccagcgagctctaggcaaaaggacatggaaactgtcacgttagctactgaatcctgggggcgagtgaaactactgaaaatccgagtgatgatgttgtgaatacggaacacctaatcacacagcttgctttgcttttacagaaacgttcctctttttctgacgcagtttaattgaggaccgtgttgtgtgtgtatgtgtgtacacacgctctgtctttaatgacagaaacacaaaaaccagctggccttgcagacggcttttctaactcacaagtcttccctgagacagactaacctgaaagctttgcctaacagtagcttgtagagatccagtgcacgccgatgctgctaaactcagtgcctgagcccggccctgcagccccagccgcagtgtctgaaggccacctcccaaagggagcacgttgccttttcaaactcccgtgccgatttcctaagagcccctagtccaagcctctcagatgaagctgaggagccgtgcctaggatcccttcccagctctgaggacgggctgcagagctctgcaggtgtggattcaccttacgcccctacagcaggctcagcccttcccaccctgcccgatgcccagcagcacaacacggagtgagacaggatgcccacggtgactgccgctccgtccgtgcacacacagcggtgctcttctccccttagccacccactgcccaacccaacggcaaagacacagaaaccaggtccccttgcagatggctctcccatcttcctgcaagtcatctgctcacacacagttggcagcacatagcgtttccttctttcagaaacattcctcttctggggcttcagaaagctggcaaggccactagcagagcttttgttaatgccccagctgcttggcgagctaacagctgacctttcgggaagcccacagacgctggaggaatcttgagtttctccaaactgccgctccaccagtgcctttggacagccgtgcctgttcgccgctctccctaagtctgattctcatcgaggcccctcgcttctatgactgtgcttgcagaagagtaaacactctcggatgccgctgtcctgggggagcccgcgggagcctgtgaatgttgatacgagctggccagtcctgggcccagctcacttgtccagctacctgccaggtggctttcactgtgtttaaaatacattgcattccaagctggtcccctctgtgtatcactctactgagaaatcctgcctagtgtgttttgggatgtgtcctagcatttacaagaaaatgaaaagcgtcctcttaattggcacccgaatgttgctgtggctcagtcacatatcccagggccctcgtcccgaggccgtgctgccccgagccccgagcccctctgcagctcacccttggcttgttttccgcaaacccggtaaacgcaagcccttggggcagatgcagaagcagaagagggaggggaaacctgcctctgggtcaccctgttagcacagcgttctcatcgggagacagcatggaactctctctcgcagtgctcgaggctgtgtgtcagtgtttgctgggcttgtggctccttttttggctggataaagaagtcgctgtttttgtactgcttctgtggctcttcacagacctcacggatgtgaccggagatgagtgccgatgaccacgttttaaaggagaaagagagctcctggtggggccctcggggtggtctcaggtcccatttgcagtctgcaacagtgacgcgcagcccggtccggagcgtggtgagctttgtttgccttctgggtcggctttcgctgtgtctcctgtgtgtgttagaatccagagcccagaggaagtgcaagcgggtcctccgccaacggggagagcctcttcgcggcgctgttggcgacagcagcgctgtgattcgcgtagcaggggagttgtttgaaacaccttcctgagtagtccggccttgtcaatgagtgcttgttttcctttaaacagtctgacatatttactcgtcactttcaaaccagaagcatgagaggaaggagatattgtggggtccgtttaactcgatagaaagcgcagggggatggcccccggcgcaggctcttgacccgctcagcgctgaccccaccgccctggccgaggcacttggccttgctgagctggacttcctcctcctcctcctcatgaccggggtgaattagaacgtttttaaagacacccccttccaaattctgtaacacattgtaattggagaagaaggaaactctgcaaggctaaactgtcattcacaacttggctacacatagactctagtcagttttgtctccagaaccttaggcttttgtattttttaattttaatttcactgttaatccttattgtcttttttattaagatgttggaaaagcaggaggtagttgtgcctcaattattgcaaaaatgtaacaataaagttcctcaaaataaga

SEQ ID NO: 406183 - DNA, 3472 bp, Homo sapiens
tgctagccttgtttcgggtctaccttgtctctcggctctagcttgtctctcggctctaccttgtctctcggctctaccttgtctctcggctctaccttgtctctggctctaccgtctccatcattctcttcctcaacaagatggacctcctggtggagaaggtgaagaccgtgagcatcaagaagcacttcccggacttcaggggcgacccgcacaggctggaggacgtccagcgctacctggtccagtgcttcgacaggaagagacggaaccgcagcaagccactcttccaccacttcaccaccgccatcgacaccgagaacgtccgcttcgtgttccatgctgtgaaagacaccatcctgcaggagaacctgaaggacatcatgctgcagtgagcgaggaagccccggggtttgtcgtcgttgagcagcccccacggctgtcggtcagactcttgggtgtgtgttgtctgtgtggtccttgagtgggtttctcggatccgtgccctggaatacctggctcaggaatgctgtcagaccagccagccagcgagctctaggcaaaaggacatggaaactgtcacgttagctactgaatcctgggggcgagtgaaactactgaaaatccgagtgatgatgttgtgaatacggaacacctaatcacacagcttgctttgcttttacagaaacgttcctctttttctgacgcagtttaattgaggaccgtgttgtgtgtgtatgtgtgtacacacgctctgtctttaatgacagaaacacaaaaaccagctggccttgcagacggcttttctaactcacaagtcttccctgagacagactaacctgaaagctttgcctaacagtagcttgtagagatccagtgcacgccgatgctgctaaactcagtgcctgagcccggccctgcagccccagccgcagtgtctgaaggccacctcccaaagggagcacgttgccttttcaaactcccgtgccgatttcctaagagcccctagtccaagcctctcagatgaagctgaggagccgtgcctaggatcccttcccagctctgaggacgggctgcagagctctgcaggtgtggattcaccttacgcccctacagcaggctcagcccttcccaccctgcccgatgcccagcagcacaacacggagtgagacaggatgcccacggtgactgccgctccgtccgtgcacacacagcggtgctcttctccccttagccacccactgcccaacccaacggcaaagacacagaaaccaggtccccttgcagatggctctcccatcttcctgcaagtcatctgctcacacacagttggcagcacatagcgtttccttctttcagaaacattcctcttctggggcttcagaaagctggcaaggccactagcagagcttttgttaatgccccagctgcttggcgagctaacagctgacctttcgggaagcccacagacgctggaggaatcttgagtttctccaaactgccgctccaccagtgcctttggacagccgtgcctgttcgccgctctccctaagtctgattctcatcgaggcccctcgcttctatgactgtgcttgcagaagagtaaacactctcggatgccgctgtcctgggggagcccgcgggagcctgtgaatgttgatacgagctggccagtcctgggcccagctcacttgtccagctacctgccaggtggctttcactgtgtttaaaatacattgcattccaagctggtcccctctgtgtatcactctactgagaaatcctgcctagtgtgttttgggatgtgtcctagcatttacaagaaaatgaaaagcgtcctcttaattggcacccgaatgttgctgtggctcagtcacatatcccagggccctcgtcccgaggccgtgctgccccgagccccgagcccctctgcagctcacccttggcttgttttccgcaaacccggtaaacgcaagcccttggggcagatgcagaagcagaagagggaggggaaacctgcctctgggtcaccctgttagcacagcgttctcatcgggagacagcatggaactctctctcgcagtgctcgaggctgtgtgtcagtgtttgctgggcttgtggctccttttttggctggataaagaagtcgctgtttttgtactgcttctgtggctcttcacagacctcacggatgtgaccggagatgagtgccgatgaccacgttttaaaggagaaagagagctcctggtggggccctcggggtggtctcaggtcccatttgcagtctgcaacagtgacgcgcagcccggtccggagcgtggtgagctttgtttgccttctgggtcggctttcgctgtgtctcctgtgtgtgttagaatccagagcccagaggaagtgcaagcgggtcctccgccaacggggagagcctcttcgcggcgctgttggcgacagcagcgctgtgattcgcgtagcaggggagttgtttgaaacaccttcctgagtagtccggccttgtcaatgagtgcttgttttcctttaaacagtctgacatatttactcgtcactttcaaaccagaagcatgagaggaaggagatattgtggggtccgtttaactcgatagaaagcgcagggggatggcccccggcgcaggctcttgacccgctcagcgctgaccccaccgccctggccgaggcacttggccttgctgagctggacttcctcctcctcctcctcatgaccggggtgaattagaacgtttttaaagacacccccttccaaattctgtaacacattgtaattggagaagaaggaaactctgcaaggctaaactgtcattcacaacttggctacacatagactctagtcagttttgtctccagaaccttaggcttttgtattttttaattttaatttcactgttaatccttattgtcttttttattaagatgttggaaaagcaggaggtagttgtgcctcaattattgcaaaaatgtaacaataaagttcctcaaaataagatctgttcctcatagctatactgtgtacacataagacgcatatagggttttactgaaatctatttttaactcttatgttcgtagagaaattgtttcaaggattttgagtcataggtctgtaatttatagagatctctagaattcttattgtaattttcctacttctttgataaaagaaaaataagtcagattgttaactccaagattgaaaaaaacaaaaaactaaaaaaaaaaatgttgtgggcggttgggccttagaagaagtttcttaaacattttgtgtgggcgggggccgaggaaggttatgggaactggcaataagctggtcccaaaggaatctttggtatgaatagggttgggtttctcaccatatataacgcgcggggaacgggtgtttgacatcagagggttgggcataggtttcaaggtcaggagtgatatcgcggcggtgggg

SEQ ID NO: 406184 - DNA, 1330 bp, Homo sapiens
tgggacaggaagtagaattatgggtgagtattaagaggggggcagccattggaagccctctggtcccctctgtgtatcactctactgagaaatcctgcctagtgtgttttgggatgtgtcctagcatttacaagaaaatgaaaagcgtcctcttaattggcacccgaatgttgctgtggctcagtcacatatcccagggccctcgtcccgaggccgtgctgccccgagccccgagcccctctgcagctcacccttggcttgttttccgcaaacccggtaaacgcaagcccttggggcagatgcagaagcagaagagggaggggaaacctgcctctgggtcaccctgttagcacagcgttctcatcgggagacagcatggaactctctctcgcagtgctcgaggctgtgtgtcagtgtttgctgggcttgtggctccttttttggctggataaagaagtcgctgtttttgtactgcttctgtggctcttcacagacctcacggatgtgaccggagatgagtgccgatgaccacgttttaaaggagaaagagagctcctggtggggccctcggggtggtctcaggtcccatttgcagtctgcaacagtgacgcgcagcccggtccggagcgtggtgagctttgtttgccttctgggtcggctttcgctgtgtctcctgtgtgtgttagaatccagagcccagaggaagtgcaagcgggtcctccgccaacggggagagcctcttcgcggcgctgttggcgacagcagcgctgtgattcgcgtagcaggggagttgtttgaaacaccttcctgagtagtccggccttgtcaatgagtgcttgttttcctttaaacagtctgacatatttactcgtcactttcaaaccagaagcatgagaggaaggagatattgtggggtccgtttaactcgatagaaagcgcagggggatggcccccggcgcaggctcttgacccgctcagcgctgaccccaccgccctggccgaggcacttggccttgctgagctggacttcctcctcctcctcctcatgaccggggtgaattagaacgtttttaaagacacccccttccaaattctgtaacacattgtaattggagaagaaggaaactctgcaaggctaaactgtcattcacaacttggctacacatagactctagtcagttttgtctccagaaccttaggcttttgtattttttaattttaatttcactgttaatccttattgtcttttttattaagatgttggaaaagcaggaggtagttgtgcctcaattattgcaaaaatgtaacaataaagttcctcaaaataaga

SEQ ID NO: 406185 - DNA, 1298 bp, Homo sapiens
  misc_feature (1)..(2): n is a, c, g, or t
  misc_feature (4)..(4): n is a, c, g, or t
  misc_feature (754)..(754): n is a, c, g, or t
  misc_feature (1291)..(1294): n is a, c, g, or t
  misc_feature (1296)..(1296): n is a, c, g, or t
nntnttttttgatgttccaaatgggaatttatttcaaagaggaaaagttaatattttactttaaaaaaatcaaaataatacaaataaaaataattcttggtttatggtctgtgggaagggaataaaaggacaagtagcaaggccaatgtgcatgtttagaaaacctaatcacaccagctcactcaagcagagaagctactgcatgtgcatgcattgtgtggaattaagactgggtttcttagagaaggaggagagaaagggggagagtaggagggagaggggaaaaggaggagggagaggaagagaaagaagagataaagtgggactaagagaaagagggaagagaggaagaacaaagacacagttcctttaaacatcagggcttcctgagtgcaaggctgcattaacagcttattaacaaccagccagggctgtgtggacaaagaaacttcaggatgacattatcgaagccaacatccattcaagattggagaggaagacaggaatgcccaagagtgaatctgaagttagacgttaagtgaggtgcccaatcacggctcttgggcactgctagacagcactgaaagagctgcattctccttcctcccttctccactactgagaaggcctgacaaagcaaatgcctcacatgggcaaggctggccgtcgccatggttcccttactgataccaggtgggatccccaaacattccctcaactccagttcacagcagacacgagccttgactcttangttccacaacttaattccagttacgacactggtcttcccgggggaaggccactcggtcatgcccaccttagcctaaacatgtggactgacttgactgtaggcaacggatgggacacatcgctaaggggagggaaaggcaaagaacgaggtggccccaaagagcagcaccacagacttgccaattcagccatctgagcgcttgtgggaaacatgcaggaagccgtctgcagagacagttggggtaatgcccacactctggaaaacccctaccacagagggtgctaggagccgagcgtctccccaagtaaaattctggccgccacacatgcaggcactaactactgatcaggtgcggcaggcagacagaaacccaactgctctccctcacatagaagctgtggtctgtgaatgccaccgtcatccagggactcttagaaatgtagaatcttgggcagcaccccagccctaatctatcaggatctgcattttaacaagatccccaggctacttagtaaacggctgatgggaaatggctcnnnntncc

SEQ ID NO: 406186 - DNA, 691 bp, Homo sapiens
  misc_feature (1)..(2): n is a, c, g, or t
  misc_feature (4)..(4): n is a, c, g, or t
nntnttttttgatgttccaaatgggaatttatttcaaagaggaaaagttaatattttactttaaaaaaatcaaaataatacaaataaaaataattcttggtttatggtctgtgggaagggaataaaaggacaagtagcaaggccaatgtgcatgtttagaaaacctaatcacaccagctcactcaagcagagaagctactgcatgtgcatgcattgtgtggaattaagactgggtttcttagagaaggaggagagaaagggggagagtaggagggagaggggaaaaggaggagggagaggaagagaaagaagagataaagtgggactaagagaaagagggaagagaggaagaacaaagacacagttcctttaaacatcagggcttcctgagtgcaaggctgcattaacagcttattaacaaccagccagggctgtgtggacaaagaaacttcaggatgacattatcgaagccaacatccattcaagattggagaggaagacaggaatgcccaagagtgaatctgaagttagacgttaagtgaggtgcccaatcacggctcttgggcactgctagacagcactgaaagagctgcattctccttcctcccttctccactttttcccctctccctcctactctccccctttctctcctccttctctaagaaacccagtcttgagtccacattat

SEQ ID NO: 406187 - DNA, 2859 bp, Homo sapiens
  misc_feature (2734)..(2734): n is a, c, g, or t
  misc_feature (2757)..(2757): n is a, c, g, or t
  misc_feature (2766)..(2766): n is a, c, g, or t
  misc_feature (2772)..(2772): n is a, c, g, or t
  misc_feature (2777)..(2777): n is a, c, g, or t
  misc_feature (2783)..(2783): n is a, c, g, or t
  misc_feature (2794)..(2794): n is a, c, g, or t
  misc_feature (2803)..(2804): n is a, c, g, or t
  misc_feature (2809)..(2809): n is a, c, g, or t
  misc_feature (2811)..(2811): n is a, c, g, or t
  misc_feature (2858)..(2858): n is a, c, g, or t
agcttccacccgtcctagccagggtgagaccaccctgcctgctggtggagccaggcgggcccagagcccacctggaagatggaggctgcacggcactgcgtggtccggggcagccccagggcagcagagcattccctggccttccctgctggtgccagctccttaccacagagacgccgcgtggaactcactactggcgatcgtggacgccccaggaaggcgagtggcacgaggtgtggcggggctgccacaggcagtcacggagcacccgctggtgccaggctcacccctcagatacagcctcgtgggctggctcagtggcggccctgactctccaaggtctgaggtctgctctgtcttccattccatgactcacaggaggttcaaggttacttccactgtggcagctgcctccctcctccctctccaggatggaaggaggtcctgctgtgcaaacctgcctggctgtccccttccgggacacggacggggggtttcctggcagttcctggtcctcccttgagggctaagggtccccccgttctgtggccgcctccagcacatccacccagagtccctgggcgtgaacacagccgctggggacgatcaccgcctgcccagcgtgcagccctggggctgcgtccttatctccgctcctcctgcctcctgcccagctgttcaacgtctacccatggctcggggccctgctccagctgcaccggcccgtcctgcgcaagatcgaggaggtccgtgccattctgaggaccctcctggaggcgcggaggccccacgtgtgcccgggggaccccgtgtgcagctatgtggacgccctgatccagcagggacaggtgtgtcgggacccaagacctccttgaaggcctgtaggggtcctgagggacaccccaggggagcacggctggggaggggtccataccggtcctgcaccaagctccctacctcctggctgggggcctctcagagcctcagtctccttgtctgtgaaacggggcatccatagtgcctgcctcggggacgctgagggatggctgagcccagatcaccggggcatccatagtggagcccagggctgggctgggtctgtggggtgggggacagaccccagatcatcccacgagccctgccccacgcctctgcagggggatgaccccgagggcctgtttgctgaggccaacgcggtggcctgcaccctggacatggtcatggccgggacggagacgacctcggccacgctgcagtgggccgcacttctgatgggccggcacccggacgtgcagggccgggtgcaggaggagctagaccgcgtgctgggccctgggcggactccccggctggaggaccagcaggctctgccctacacaagcgccgtgctccacgaggtgcagcggttcatcacgctcctgccgcccggcctcccgctgacccacgcgcaggatctcactccagccatgtccccagctggaccccgacctcggccccccaccgctgtggaccctgatgcagagcccaccctgctgcgtgagccccaggccaccgtggtcttcaccacccatgtgcccacgctgggccgctatgccttcctgtgcaattgtatactgggggtgaagctgcctgggagctgaagctgcctcccccgcagtgtgggctgccctccagggtgccaggacccagctccgagatgtccgggccaagaaggaccagctggaggcgcacatccaggcggcgcaggccatgcttgccatggacacagacgagacaagcaagaagatcgcacatgccaaggctgtggctgctgaagcccaggacaccgccacccgtgtgcagtcccagctgcaggccgccgcgtctgtgttggggagcgcctggccaggaccgagctcttcctgctgtttgccggcctcctgcagaggtaccgcctgctgcccccgcctggcgtcagtccggcctccctggacgccacgcccgcccgggcttttaccatgaggccgagggcccaggccctgtgtgcggtgctcaggccctaggagctcccccagcccccaggtcctcctgaccactcccctcccagccctgggtcctcccaccctctctcctcccaccccacagctcggactgctctgggagggccctgaggactcccaccctcacccccacccccacagggtcagcaactgcttccggttacacccaggactacccctgcccgaccctgtgggacccccacccctctgatgctgtctgcagctcagtccctgccagcccccaggagcgcctccagggccccgcccactctcccacccctgaagctgcactcccacccacctagctccccccagggccccccagcacctacagctggggctgcagggagacaacgggtggctgcatccagccagagacaggcgcaggtgggtgtcctcagcgtgcgagccctgcaccccccaggtcctgggactcctgcagaccccactccattcccgctcctggaacacttcctgcagctgtgcctggaggcagtcggcctgcagtgccagactctgagccaagccactggggccatgcgtatgactggtgcagggaggcaaggcccacattctccttcagagacaggcactggcgccagaggcttccttggggcggggggagggcacctcagcccctgaagacaagcagcactgcagtggcaaaaatggaaacactgacccggtgcggtggntcatgcctgtaatcccagcactntgggaggcngaggcnggcgnatcacnaggtcaggagntcgagaccnncctgncnaacatggtgaaaccctgtctctactaaaaatacaaaaaattaaccgng

SEQ ID NO: 406188 - DNA, 1663 bp, Homo sapiens
  misc_feature (1520)..(1520): n is a, c, g, or t
ggggacgcggcccggagccgggaagatggcgaagcggctctgcgcggggagcgcactgtgtgttcgcggcccccggggccccgcgccgctgctgctggtcgggctggcgctgctgggcgcggcgcgggcgcgggaggaggcgggcggcggcttcagcctgcacccgccctacttcaacctggccgagggcgcccgcatcgccgcctccgcgacctgcggagaggaggccccggcgcgcggctccccgcgccccaccgaggacctttactgcaagctggtagggggccccgtggccggcggcgaccccaaccagaccatccggggccagtactgtgacatctgcacggctgccaacagcaacaaggcacaccccgcgagcaatgccatcgatggcacggagcgctggtggcagagtccaccgctgtcccgcggcctggagtacaacgaggtcaacgtcaccctggacctgggccaggtcttccacgtggcctacgtcctcatcaagtttgccaactcaccccggccggacctctgggtgctggagcggtccatggacttcggccgcacctaccagccctggcagttctttgcctcctccaagagggactgtctggagcggttcgggccacagacgctggagcgcatcacacgggacgacgcggccatctgcaccaccgagtactcacgcatcgtgcccctggagaacggagagatcgtggtgtccctggtgaacggacgtccgggcgccatgaatttctcctactcgccgctgctacgtgagttcaccaaggccaccaacgtccgcctgcgcttcctgcgtaccaacacgctgctgggccatctcatggggaaggcgctgcgggaccccacggtcacccgccggtattattacagcatcaaggatatcagcatcggaggccgctgtgtctgccacggccacgcggatgcctgcgatgccaaagaccccacggacccgttcaggctgcagtgcacctgccagcacaacacctgcgggggcacctgcgaccgctgctgccccggcttcaatcagcagccgtggaagcctgcgactgccaacagtgccaacgagtgccagtcctgtaactgctacggccatgccaccgactgttactacgaccctgaggtggaccggcgccgcgccagccagagcctggatggcacctatcagggtgggggtgtctgtatcgactgccagcaccacaccgccggcgtcaactgtgagcgctgcctgcccggcttctaccgctctcccaaccaccctctcgactcgccccacgtctgccgccgctgcaactgcgagtccgacttcacggatggcacctgcgaggacctgacgggtcgatgctactgccggcccaacttctctggggagcggtgtgacgtgtgtgccgagggcttcacgggcttcccaagctgctacccgacgccctcgtcctccaatgacaccagggagcaggtgctgccagccggccagattgtgacaaatacaaaaattagcngggtgtagtgatgtgtgcctgtagttcgagctactccggaggctgaggtggaaggattgcttgagcctggaaggccgaagctgcagtgagccatgatcacaccacagcactccagcctgggcaacagagtgagaccttgtttc

SEQ ID NO: 406189 - DNA, 191 bp, Homo sapiens
gacctggggtggagggggctcagctcccgcccctgccacaggtgcagacccaacgtgactgggcgccgctgtgatacctgctctccgggcttcccagggtaccatctcgtttaaagtgtgttaatgactcagtcgagcgaaggtacttgaccttcccacagccctcttctcaacgttccccctagagtcct

SEQ ID NO: 406190 - DNA, 11291 bp, Homo sapiens
ggggacgcggcccggagccgggaagatggcgaagcggctctgcgcggggagcgcactgtgtgttcgcggcccccggggccccgcgccgctgctgctggtcgggctggcgctgctgggcgcggcgcgggcgcgggaggaggcgggcggcggcttcagcctgcacccgccctacttcaacctggccgagggcgcccgcatcgccgcctccgcgacctgcggagaggaggccccggcgcgcggctccccgcgccccaccgaggacctttactgcaagctggtagggggccccgtggccggcggcgaccccaaccagaccatccggggccagtactgtgacatctgcacggctgccaacagcaacaaggcacaccccgcgagcaatgccatcgatggcacggagcgctggtggcagagtccaccgctgtcccgcggcctggagtacaacgaggtcaacgtcaccctggacctgggccaggtcttccacgtggcctacgtcctcatcaagtttgccaactcaccccggccggacctctgggtgctggagcggtccatggacttcggccgcacctaccagccctggcagttctttgcctcctccaagagggactgtctggagcggttcgggccacagacgctggagcgcatcacacgggacgacgcggccatctgcaccaccgagtactcacgcatcgtgcccctggagaacggagagatcgtggtgtccctggtgaacggacgtccgggcgccatgaatttctcctactcgccgctgctacgtgagttcaccaaggccaccaacgtccgcctgcgcttcctgcgtaccaacacgctgctgggccatctcatggggaaggcgctgcgggaccccacggtcacccgccggtattattacagcatcaaggatatcagcatcggaggccgctgtgtctgccacggccacgcggatgcctgcgatgccaaagaccccacggacccgttcaggctgcagtgcacctgccagcacaacacctgcgggggcacctgcgaccgctgctgccccggcttcaatcagcagccgtggaagcctgcgactgccaacagtgccaacgagtgccagtcctgtaactgctacggccatgccaccgactgttactacgaccctgaggtggaccggcgccgcgccagccagagcctggatggcacctatcagggtgggggtgtctgtatcgactgccagcaccacaccgccggcgtcaactgtgagcgctgcctgcccggcttctaccgctctcccaaccaccctctcgactcgccccacgtctgccgccgctgcaactgcgagtccgacttcacggatggcacctgcgaggacctgacgggtcgatgctactgccggcccaacttctctggggagcggtgtgacgtgtgtgccgagggcttcacgggcttcccaagctgctacccgacgccctcgtcctccaatgacaccagggagcaggtgctgccagccggccagattgtgaattgtgactgcagcgcggcagggacccagggcaacgcctgccggaaggacccaagggtgggacgctgtctgtgcaaacccaacttccaaggcacccattgtgagctctgcgcgccagggttctacggccccggctgccagccctgccagtgttccagccctggagtggccgatgaccgctgtgaccctgacacaggccagtgcaggtgccgagtgggcttcgagggggccacatgtgatcgctgtgcccccggctactttcacttccctctctgccagttgtgtggctgcagccctgcaggaaccttgcccgagggctgcgatgaggccggccgctgcctatgccagcctgagtttgctggacctcattgtgaccggtgccgccctggctaccatggtttccccaactgccaagcatgcacctgcgaccctcggggagccctggaccagctctgtggggcgggaggtttgtgccgctgccgccccggctacacaggcactgcctgccaggaatgcagccccggctttcacggcttccccagctgtgtcccctgccactgctctgctgaaggctccctgcacgcagcctgtgacccccggagtgggcagtgcagctgccggccccgtgtgacggggctgcggtgtgacacatgtgtgcccggtgcctacaacttcccctactgcgaagctggctcttgccaccctgccggtctggccccagtggatcctgcccttcctgaggcacaggttccctgtatgtgccgggctcacgtggaggggccgagctgtgaccgctgcaaacctgggttctggggactgagccccagcaaccccgagggctgtacccgctgcagctgcgacctcaggggcacactgggtggagttgctgagtgccagccgggcaccggccagtgcttctgcaagccccacgtgtgcggccaggcctgcgcgtcctgcaaggatggcttctttggactggatcaggctgactattttggctgccgcagctgccggtgtgacattggcggtgcactgggccagagctgtgaaccgaggacgggcgtctgccggtgccgccccaacacccagggccccacctgcagcgagcctgcgagggaccactacctcccggacctgcaccacctgcgcctggagctggaggaggctgccacacctgagggtcacgccgtgcgctttggcttcaaccccctcgagttcgagaacttcagctggaggggctacgcgcagatggcacctgtccagcccaggatcgtggccaggctgaacctgacctcccctgaccttttctggctcgtcttccgatacgtcaaccggggggccatgagtgtgagcgggcgggtctctgtgcgagaggagggcaggtcggccacctgcgccaactgcacagcacagagtcagcccgtggccttcccacccagcacggagcctgccttcatcaccgtgccccagaggggcttcggagagccctttgtgctgaaccctggcacctgggccctgcgtgtggaggccgaaggggtgctcctggactacgtggttctgctgcctagcgcatactacgaggcggcgctcctgcagctgcgggtgactgaggcctgcacataccgtccctctgcccagcagtctggcgacaactgcctcctctacacacacctccccctggatggcttcccctcggccgccgggctggaggccctgtgtcgccaggacaacagcctgccccggccctgccccacggagcagctcagcccgtcgcacccgccactgatcacctgcacgggcagtgatgtggacgtccagcttcaagtggcagtgccacagccaggccgctatgccctagtggtggagtacgccaatgaggatgcccgccaggaggtgggcgtggccgtgcacaccccacagcgggccccccagcaggggctgctctccctgcacccctgcctgtacagcaccctgtgccggggcactgcccgggatacccaggaccacctggctgtcttccacctggactcggaggccagcgtgaggctcacagccgagcaggcacgcttcttcctgcacggggtcactctggtgcccattgaggagttcagcccggagttcgtggagccccgggtcagctgcatcagcagccacggcgcctttggccccaacagtgccgcctgtctgccctcgcgcttcccaaagccgccccagcccatcatcctcagggactgccaggtgatcccgctgccgcccggcctcccgctgacccacgcgcaggatctcactccagccatgtccccagctggaccccgacctcggccccccaccgctgtggaccctgatgcagagcccaccctgctgcgtgagccccaggccaccgtggtcttcaccacccatgtgcccacgctgggccgctatgccttcctgctgcacggctaccagccagcccaccccaccttccccgtggaagtcctcatcaacgccggccgcgtgtggcagggccacgccaacgccagcttctgtccacatggctacggctgccgcaccctggtggtgtgtgagggccaggccctgctggacgtgacccacagcgagctcactgtgaccgtgcgtgtgcccgagggccggtggctctggctggattatgtactcgtggtccctgagaacgtctacagctttggctacctccgggaggagcccctggataaatcctatgacttcatcagccactgcgcagcccagggctaccacatcagccccagcagctcatccctgttctgccgaaacgctgctgcttccctctccctcttctataacaacggagcccgtccatgtggctgccacgaagtaggtgctacaggccccacgtgtgagcccttcgggggccagtgtccctgccatgcccatgtcattggccgtgactgctcccgctgtgccaccggatactggggcttccccaactgcaggccctgtgactgcggtgcccgcctctgtgacgagctcacgggccagtgcatctgcccgccacgcaccatcccgcccgactgcctgctgtgccagccccagacctttggctgccaccccctggtcggctgtgaggagtgtaactgctcagggcccggcatccaggagctcacagaccctacctgtgacacagacagcggccagtgcaagtgcagacccaacgtgactgggcgccgctgtgatacctgctctccgggcttccatggctacccccgctgccgcccctgtgactgtcacgaggcgggcactgcgcctggcgtgtgtgaccccctcacagggcagtgctactgtaaggagaacgtgcagggccccaaatgtgaccagtgcagccttgggaccttctcactggatgctgccaaccccaaaggttgcacccgctgcttctgctttggggccacggagcgctgccggagctcgtcctacacccgccaggagttcgtggatatggagggatgggtgctgctgagcactgaccggcaggtggtgccccacgagcggcagccagggacggagatgctccgtgcagacctgcggcacgtgcctgaggctgtgcccgaggctttccccgagctgtactggcaggccccaccctcctacctgggggaccgggtgtcatcctacggtgggaccctccgttatgaactgcactcagagacccagcggggagatgtctttgtccccatggagagcaggccggatgtggtgctgcagggcaaccagatgagcatcacattcctggagccggcataccccacgcctggccacgttcaccgtgggcagctgcagctggtggaggggaacttccggcatacggagactcgcaacactgtgtcccgcgaggagctcatgatggtgctggccagcctggagcagctgcagatccgtgccctcttctcacagatctcctcggctgtctccctgcgcagggtggcactggaggtggccagcccagcaggccagggggccctggccagcaatgtggagctgtgcctgtgccccgccagctaccggggggactcatgccaggaatgtgcccccggcttctatcgggacgtcaaaggtctcttcctgggccgatgtgtcccttgtcagtgccatggacactcagaccgctgcctccctggctctggcgtctgtgtggactgccagcacaacaccgaaggggcccactgtgagcgctgccaggctggcttcatgagcagcagggacgaccccagcgccccctgtgtcagctgcccctgccccctctcagtgccttccaacaacttcgccgagggctgtgtcctgcgaggcggccgcacccagtgcctctgcaaacctggttatgcaggtgcctcctgcgagcggtgtgcgcccggattctttgggaacccactggtgctgggcagctcctgccagccatgcgactgcagcggcaacggtgaccccaacttgctcttcagcgactgcgaccccctgacgggcgcctgccgtggctgcctgcgccacaccactgggccccgctgcgagatctgtgcccccggcttctacggcaacgccctgctgcccggcaactgcacccggtgcgactgtaccccatgtgggacagaggcctgcgacccccacagcgggcactgcctgtgcaaggcgggcgtgactgggcggcgctgtgaccgctgccaggagggacattttggtttcaatggctgcgggggctgccgcccgtgtgcttgtggaccggccgccgagggctccgagtgccacccccagagcggacagtgccactgccgaccagggaccatgggaccccagtgccgcgagtgtgcccctggctactgggggctccctgagcagggctgcaggcgctgccagtgccctgggggccgctgtgaccctcacacgggccgctgcaactgccccccggggctcagcggggagcgctgcgacacctgcagccagcagcatcaggtgcctgttccaggcgggcctgtgggccacagcatccactgtgaagtgtgtgaccactgtgtggtcctgctcctggatgacctggaacgggccggcgccctcctccccgccattcacgagcaactgcgtggcatcaatgccagctccatggcctgggcccgtctgcacaggctgaacgcctccatcgctgacctgcagagccagctccggagccccctgggcccccgccatgagacggcacagcagctggaggtgctggagcagcagagcacaagcctcgggcaggacgcacggcggctaggcggccaggccgtggggacccgagaccaggcgagccaattgctggccggcaccgaggccacactgggccatgcgaagacgctgttggcggccatccgggctgtggaccgcaccctgagcgagctcatgtcccagacgggccacctggggctggccaatgcctcggctccatcaggtgagcagctgctccggacactggccgaggtggagcggctgctctgggagatgcgggcccgggacctgggggccccgcaggcagcagctgaggctgagttggctgcagcacagagattgctggcccgggtgcaggagcagctgagcagcctctgggaggagaaccaggcactggccacacaaacccgcgaccggctggcccagcacgaggccggcctcatggacctgcgagaggctttgaaccgggcagtggacgccacacgggaggcccaggagctcaacagccgcaaccaggagcgcctggaggaagccctgcaaaggaagcaggagctgtcccgggacaatgccaccctgcaggccactctgcatgcggctagggacaccctggccagcgtcttcagattgctgcacagcctggaccaggctaaggaggagctggagcgcctcgccgccagcctggatggggctcggaccccactgctgcagaggatgcagaccttctccccggcgggcagcaagctgcgtctagtggaggccgccgaggcccacgcacagcagctgggccagctggcactcaatctgtccagcatcatcctggacgtcaaccaggaccgcctcacccagagggccatcgaggcctccaacgcctacagccgcatcctgcaggccgtgcaggctgccgaggatgctgctggccaggccctgcagcaggcggaccacacgtgggcgacggtggtgcggcagggcctggtggaccgagcccagcagctcctggccaacagcactgcactagaagaggccatgctccaggaacagcagaggctgggccttgtgtgggctgccctccagggtgccaggacccagctccgagatgtccgggccaagaaggaccagctggaggcgcacatccaggcggcgcaggccatgcttgccatggacacagacgagacaagcaagaagatcgcacatgccaaggctgtggctgctgaagcccaggacaccgccacccgtgtgcagtcccagctgcaggccatgcaggagaatgtggagcggtggcagggccagtacgagggcctgcggggccaggacctgggccaggcagtgcttgacgcaggccactcagtgtccaccctggagaagacgctgccccagctgctggccaagctgagcatcctggagaaccgtggggtgcacaacgccagcctggccctgtccgccagcattggccgcgtgcgagagctcattgcccaggcccggggggctgccagtaaggtcaaggtgcccatgaagttcaacgggcgctcaggggtgcagctgcgcaccccacgggatcttgccgaccttgctgcctacactgccctcaagttctacctgcagggcccagagcctgagcctgggcagggtaccgaggatcgctttgtgatgtacatgggcagccgccaggccactggggactacatgggtgtgtctctgcgtgacaagaaggtgcactgggtgtatcagctgggtgaggcgggccctgcagtcctaagcatcgatgaggacattggggagcagttcgcagctgtcagcctggacaggactctccagtttggccacatgtccgtcacagtggagagacagatgatccaggaaaccaagggtgacacggtggcccctggggcagaggggctgctcaacctgcggccagacgacttcgtcttctacgtcggggggtaccccagtaccttcacgccccctcccctgcttcgcttccccggctaccggggctgcatcgagatggacacgctgaatgaggaggtggtcagcctctacaacttcgagaggaccttccagctggacacggctgtggacaggccttgtgcccgctccaagtcgaccggggacccgtggctcacggacggctcctacctggacggcaccggcttcgcccgcatcagcttcgacagtcagatcagcaccaccaagcgcttcgagcaggagctgcggctcgtgtcctacagcggggtgctcttcttcctgaagcagcagagccagttcctgtgcttggccgtgcaagaaggcagcctcgtgctgttgtatgactttggggctggcctgaaaaaggccgtcccactgcagcccccaccgcccctgacctcggccagcaaggcgatccaggtgttcctgctggggggcagccgcaagcgtgtgctggtgcgtgtggagcgggccacggtgtacagcgtggagcaggacaatgatctggagctggccgacgcctactacctggggggcgtgccgcccgaccagctgcccccgagcctgcgatggctcttccccaccggaggctcagtccgtggctgcgtcaaaggcatcaaggccctgggcaagtatgtggacctcaagcggctgaacacgacaggcgtgagcgccggctgcaccgccgacctgctggtggggcgcgccatgactttccatggccacggcttccttcgcctggcgctctcgaacgtggcaccgctcactggcaacgtctactccggcttcggcttccacagcgcccaggacagtgccctgctctactaccgggcgtccccggatgggctatgccaggtgtccctgcagcagggccgtgtgagcctacagctcctgaggactgaagtgaaaactcaagcgggcttcgccgatggtgccccccattacgtcgccttctacagcaatgccacgggagtctggctgtatgtcgatgaccagctccagcagatgaagccccaccggggaccaccccccgagctccagccgcagcctgaggggcccccgaggctcctcctgggaggcctgcctgagtctggcaccatttacaacttcagtggctgcatcagcaacgtcttcgtgcagcggctcctgggcccacagcgcgtatttgatctgcagcagaacctgggcagcgtcaatgtgagcacgggctgtgcacccgccctgcaagcccagaccccgggcctggggcctagaggactgcaggccaccgcccggaaggcctcccgccgcagccgtcagcccgcccggcatcctgcctgcatgctgcccccacacctcaggaccacccgagactcctaccagtttgggggttccctgtccagtcacctggagtttgtgggcatcctggcccgacataggaactggcccagtctctccatgcacgtcctcccgcgaagctcccgaggcctcctcctcttcactgcccgtctgaggcccggcagcccctccctggcgctcttcctgagcaatggccacttcgttgcacagatggaaggcctcgggactcggctccgcgcccagagccgccagcgctcccggcctggccgctggcacaaggtctccgtgcgctgggagaagaaccggatcctgctggtgacggacggggcccgggcctggagccaggaggggccgcaccggcagcaccagggggcagagcacccccagccccacaccctctttgtgggcggcctcccggccagcagccacagctccaaacttccggtgaccgtcgggttcagcggctgtgtgaagagactgaggctgcacgggaggcccctgggggcccccacacggatggcaggggtcacaccctgcatcttgggccccctggaggcgggcctgttcttcccaggcagcgggggagttatcactttagacctcccaggagctacactgcctgatgtgggcctggaactggaggtgcggcccctggcagtcaccggactgatcttccacttgggccaggcccggacgcccccctacttgcagttgcaggtgaccgagaagcaagtcctgctgcgggcggatgacggagcaggggagttctccacgtcagtgacccgcccctcagtgctgtgtgatggccagtggcaccggctagcggtgatgaaaagcgggaatgtgctccggctggaggtggacgcgcagagcaaccacaccgtgggccccttgctggcggctgcagctggtgccccagcccctctgtacctcgggggcctgcctgagcccatggccgtgcagccctggccccccgcctactgcggctgcatgaggaggctggcggtgaaccggtcccccgtcgccatgactcgctctgtggaggtccacggggcagtgggggccagtggctgcccagccgcctaggacacagccaaccccggcccctggtcaggcccctgcagctgcctcacaccgccccttgtgctcgcctcataggtgtctatttggactctaagctctacgggtgacagatcttgtttctgaagatggtttaagttatagcttcttaaacgaaagaataaaatactgcaaaatgttttta

SEQ ID NO: 406191 - DNA, 11384 bp, Homo sapiens
ggggacgcggcccggagccgggaagatggcgaagcggctctgcgcggggagcgcactgtgtgttcgcggcccccggggccccgcgccgctgctgctggtcgggctggcgctgctgggcgcggcgcgggcgcgggaggaggcgggcggcggcttcagcctgcacccgccctacttcaacctggccgagggcgcccgcatcgccgcctccgcgacctgcggagaggaggccccggcgcgcggctccccgcgccccaccgaggacctttactgcaagctggtagggggccccgtggccggcggcgaccccaaccagaccatccggggccagtactgtgacatctgcacggctgccaacagcaacaaggcacaccccgcgagcaatgccatcgatggcacggagcgctggtggcagagtccaccgctgtcccgcggcctggagtacaacgaggtcaacgtcaccctggacctgggccaggtcttccacgtggcctacgtcctcatcaagtttgccaactcaccccggccggacctctgggtgctggagcggtccatggacttcggccgcacctaccagccctggcagttctttgcctcctccaagagggactgtctggagcggttcgggccacagacgctggagcgcatcacacgggacgacgcggccatctgcaccaccgagtactcacgcatcgtgcccctggagaacggagagatcgtggtgtccctggtgaacggacgtccgggcgccatgaatttctcctactcgccgctgctacgtgagttcaccaaggccaccaacgtccgcctgcgcttcctgcgtaccaacacgctgctgggccatctcatggggaaggcgctgcgggaccccacggtcacccgccggtattattacagcatcaaggatatcagcatcggaggccgctgtgtctgccacggccacgcggatgcctgcgatgccaaagaccccacggacccgttcaggctgcagtgcacctgccagcacaacacctgcgggggcacctgcgaccgctgctgccccggcttcaatcagcagccgtggaagcctgcgactgccaacagtgccaacgagtgccagtcctgtaactgctacggccatgccaccgactgttactacgaccctgaggtggaccggcgccgcgccagccagagcctggatggcacctatcagggtgggggtgtctgtatcgactgccagcaccacaccgccggcgtcaactgtgagcgctgcctgcccggcttctaccgctctcccaaccaccctctcgactcgccccacgtctgccgccgctgcaactgcgagtccgacttcacggatggcacctgcgaggacctgacgggtcgatgctactgccggcccaacttctctggggagcggtgtgacgtgtgtgccgagggcttcacgggcttcccaagctgctacccgacgccctcgtcctccaatgacaccagggagcaggtgctgccagccggccagattgtgaattgtgactgcagcgcggcagggacccagggcaacgcctgccggaaggacccaagggtgggacgctgtctgtgcaaacccaacttccaaggcacccattgtgagctctgcgcgccagggttctacggccccggctgccagccctgccagtgttccagccctggagtggccgatgaccgctgtgaccctgacacaggccagtgcaggtgccgagtgggcttcgagggggccacatgtgatcgctgtgcccccggctactttcacttccctctctgccagttgtgtggctgcagccctgcaggaaccttgcccgagggctgcgatgaggccggccgctgcctatgccagcctgagtttgctggacctcattgtgaccggtgccgccctggctaccatggtttccccaactgccaagcatgcacctgcgaccctcggggagccctggaccagctctgtggggcgggaggtttgtgccgctgccgccccggctacacaggcactgcctgccaggaatgcagccccggctttcacggcttccccagctgtgtcccctgccactgctctgctgaaggctccctgcacgcagcctgtgacccccggagtgggcagtgcagctgccggccccgtgtgacggggctgcggtgtgacacatgtgtgcccggtgcctacaacttcccctactgcgaagctggctcttgccaccctgccggtctggccccagtggatcctgcccttcctgaggcacaggttccctgtatgtgccgggctcacgtggaggggccgagctgtgaccgctgcaaacctgggttctggggactgagccccagcaaccccgagggctgtacccgctgcagctgcgacctcaggggcacactgggtggagttgctgagtgccagccgggcaccggccagtgcttctgcaagccccacgtgtgcggccaggcctgcgcgtcctgcaaggatggcttctttggactggatcaggctgactattttggctgccgcagctgccggtgtgacattggcggtgcactgggccagagctgtgaaccgaggacgggcgtctgccggtgccgccccaacacccagggccccacctgcagcgagcctgcgagggaccactacctcccggacctgcaccacctgcgcctggagctggaggaggctgccacacctgagggtcacgccgtgcgctttggcttcaaccccctcgagttcgagaacttcagctggaggggctacgcgcagatggcacctgtccagcccaggatcgtggccaggctgaacctgacctcccctgaccttttctggctcgtcttccgatacgtcaaccggggggccatgagtgtgagcgggcgggtctctgtgcgagaggagggcaggtcggccacctgcgccaactgcacagcacagagtcagcccgtggccttcccacccagcacggagcctgccttcatcaccgtgccccagaggggcttcggagagccctttgtgctgaaccctggcacctgggccctgcgtgtggaggccgaaggggtgctcctggactacgtggttctgctgcctagcgcatactacgaggcggcgctcctgcagctgcgggtgactgaggcctgcacataccgtccctctgcccagcagtctggcgacaactgcctcctctacacacacctccccctggatggcttcccctcggccgccgggctggaggccctgtgtcgccaggacaacagcctgccccggccctgccccacggagcagctcagcccgtcgcacccgccactgatcacctgcacgggcagtgatgtggacgtccagcttcaagtggcagtgccacagccaggccgctatgccctagtggtggagtacgccaatgaggatgcccgccaggaggtgggcgtggccgtgcacaccccacagcgggccccccagcaggggctgctctccctgcacccctgcctgtacagcaccctgtgccggggcactgcccgggatacccaggaccacctggctgtcttccacctggactcggaggccagcgtgaggctcacagccgagcaggcacgcttcttcctgcacggggtcactctggtgcccattgaggagttcagcccggagttcgtggagccccgggtcagctgcatcagcagccacggcgcctttggccccaacagtgccgcctgtctgccctcgcgcttcccaaagccgccccagcccatcatcctcagggactgccaggtgatcccgctgccgcccggcctcccgctgacccacgcgcaggatctcactccagccatgtccccagctggaccccgacctcggccccccaccgctgtggaccctgatgcagagcccaccctgctgcgtgagccccaggccaccgtggtcttcaccacccatgtgcccacgctgggccgctatgccttcctgctgcacggctaccagccagcccaccccaccttccccgtggaagtcctcatcaacgccggccgcgtgtggcagggccacgccaacgccagcttctgtccacatggctacggctgccgcaccctggtggtgtgtgagggccaggccctgctggacgtgacccacagcgagctcactgtgaccgtgcgtgtgcccgagggccggtggctctggctggattatgtactcgtggtccctgagaacgtctacagctttggctacctccgggaggagcccctggataaatcctatgacttcatcagccactgcgcagcccagggctaccacatcagccccagcagctcatccctgttctgccgaaacgctgctgcttccctctccctcttctataacaacggagcccgtccatgtggctgccacgaagtaggtgctacaggccccacgtgtgagcccttcgggggccagtgtccctgccatgcccatgtcattggccgtgactgctcccgctgtgccaccggatactggggcttccccaactgcaggccctgtgactgcggtgcccgcctctgtgacgagctcacgggccagtgcatctgcccgccacgcaccatcccgcccgactgcctgctgtgccagccccagacctttggctgccaccccctggtcggctgtgaggagtgtaactgctcagggcccggcatccaggagctcacagaccctacctgtgacacagacagcggccagtgcaagtgcagacccaacgtgactgggcgccgctgtgatacctgctctccgggcttccatggctacccccgctgccgcccctgtgactgtcacgaggcgggcactgcgcctggcgtgtgtgaccccctcacagggcagtgctactgtaaggagaacgtgcagggccccaaatgtgaccagtgcagccttgggaccttctcactggatgctgccaaccccaaaggttgcacccgctgcttctgctttggggccacggagcgctgccggagctcgtcctacacccgccaggagttcgtggatatggagggatgggtgctgctgagcactgaccggcaggtggtgccccacgagcggcagccagggacggagatgctccgtgcagacctgcggcacgtgcctgaggctgtgcccgaggctttccccgagctgtactggcaggccccaccctcctacctgggggaccgggtgtcatcctacggtgggaccctccgttatgaactgcactcagagacccagcggggagatgtctttgtccccatggagagcaggccggatgtggtgctgcagggcaaccagatgagcatcacattcctggagccggcataccccacgcctggccacgttcaccgtgggcagctgcagctggtggaggggaacttccggcatacggagactcgcaacactgtgtcccgcgaggagctcatgatggtgctggccagcctggagcagctgcagatccgtgccctcttctcacagatctcctcggctgtctccctgcgcagggtggcactggaggtggccagcccagcaggccagggggccctggccagcaatgtggagctgtgcctgtgccccgccagctaccggggggactcatgccaggaatgtgcccccggcttctatcgggacgtcaaaggtctcttcctgggccgatgtgtcccttgtcagtgccatggacactcagaccgctgcctccctggctctggcgtctgtgtggactgccagcacaacaccgaaggggcccactgtgagcgctgccaggctggcttcatgagcagcagggacgaccccagcgccccctgtgtcagctgcccctgccccctctcagtgccttccaacaacttcgccgagggctgtgtcctgcgaggcggccgcacccagtgcctctgcaaacctggttatgcaggtgcctcctgcgagcggtgtgcgcccggattctttgggaacccactggtgctgggcagctcctgccagccatgcgactgcagcggcaacggtgaccccaacttgctcttcagcgactgcgaccccctgacgggcgcctgccgtggctgcctgcgccacaccactgggccccgctgcgagatctgtgcccccggcttctacggcaacgccctgctgcccggcaactgcacccggtgcgactgtaccccatgtgggacagaggcctgcgacccccacagcgggcactgcctgtgcaaggcgggcgtgactgggcggcgctgtgaccgctgccaggagggacattttggtttcaatggctgcgggggctgccgcccgtgtgcttgtggaccggccgccgagggctccgagtgccacccccagagcggacagtgccactgccgaccagggaccatgggaccccagtgccgcgagtgtgcccctggctactgggggctccctgagcagggctgcaggcgctgccagtgccctgggggccgctgtgaccctcacacgggccgctgcaactgccccccggggctcagcggggagcgctgcgacacctgcagccagcagcatcaggtgcctgttccaggcgggcctgtgggccacagcatccactgtgaagtgtgtgaccactgtgtggtcctgctcctggatgacctggaacgggccggcgccctcctccccgccattcacgagcaactgcgtggcatcaatgccagctccatggcctgggcccgtctgcacaggctgaacgcctccatcgctgacctgcagagccagctccggagccccctgggcccccgccatgagacggcacagcagctggaggtgctggagcagcagagcacaagcctcgggcaggacgcacggcggctaggcggccaggccgtggggacccgagaccaggcgagccaattgctggccggcaccgaggccacactgggccatgcgaagacgctgttggcggccatccgggctgtggaccgcaccctgagcgagctcatgtcccagacgggccacctggggctggccaatgcctcggctccatcaggtgagcagctgctccggacactggccgaggtggagcggctgctctgggagatgcgggcccgggacctgggggccccgcaggcagcagctgaggctgagttggctgcagcacagagattgctggcccgggtgcaggagcagctgagcagcctctgggaggagaaccaggcactggccacacaaacccgcgaccggctggcccagcacgaggccggcctcatggacctgcgagaggctttgaaccgggcagtggacgccacacgggaggcccaggagctcaacagccgcaaccaggagcgcctggaggaagccctgcaaaggaagcaggagctgtcccgggacaatgccaccctgcaggccactctgcatgcggctagggacaccctggccagcgtcttcagattgctgcacagcctggaccaggctaaggaggagctggagcgcctcgccgccagcctggatggggctcggaccccactgctgcagaggatgcagaccttctccccggcgggcagcaagctgcgtctagtggaggccgccgaggcccacgcacagcagctgggccagctggcactcaatctgtccagcatcatcctggacgtcaaccaggaccgcctcacccagagggccatcgaggcctccaacgcctacagccgcatcctgcaggccgtgcaggctgccgaggatgctgctggccaggccctgcagcaggcggaccacacgtgggcgacggtggtgcggcagggcctggtggaccgagcccagcagctcctggccaacagcactgcactagaagaggccatgctccaggaacagcagaggctgggccttgtgtgggctgccctccagggtgccaggacccagctccgagatgtccgggccaagaaggaccagctggaggcgcacatccaggcggcgcaggccatgcttgccatggacacagacgagacaagcaagaagatcgcacatgccaaggctgtggctgctgaagcccaggacaccgccacccgtgtgcagtcccagctgcaggccatgcaggagaatgtggagcggtggcagggccagtacgagggcctgcggggccaggacctgggccaggcagtgcttgacgcaggccactcagtgtccaccctggagaagacgctgccccagctgctggccaagctgagcatcctggagaaccgtggggtgcacaacgccagcctggccctgtccgccagcattggccgcgtgcgagagctcattgcccaggcccggggggctgccagtaaggtcaaggtgcccatgaagttcaacgggcgctcaggggtgcagctgcgcaccccacgggatcttgccgaccttgctgcctacactgccctcaagttctacctgcagggcccagagcctgagcctgggcagggtaccgaggatcgctttgtgatgtacatgggcagccgccaggccactggggactacatgggtgtgtctctgcgtgacaagaaggtgcactgggtgtatcagctgggtgaggcgggccctgcagtcctaagcatcgatgaggacattggggagcagttcgcagctgtcagcctggacaggactctccagtttggccacatgtccgtcacagtggagagacagatgatccaggaaaccaagggtgacacggtggcccctggggcagaggggctgctcaacctgcggccagacgacttcgtcttctacgtcggggggtaccccagtaccttcacgccccctcccctgcttcgcttccccggctaccggggctgcatcgagatggacacgctgaatgaggaggtggtcagcctctacaacttcgagaggaccttccagctggacacggctgtggacaggccttgtgcccgctccaagtcgaccggggacccgtggctcacggacggctcctacctggacggcaccggcttcgcccgcatcagcttcgacagtcagatcagcaccaccaagcgcttcgagcaggagctgcggctcgtgtcctacagcggggtgctcttcttcctgaagcagcagagccagttcctgtgcttggccgtgcaagaaggcagcctcgtgctgttgtatgactttggggctggcctgaaaaaggccgtcccactgcagcccccaccgcccctgacctcggccagcaaggcgatccaggtgttcctgctggggggcagccgcaagcgtgtgctggtgcgtgtggagcgggccacggtgtacagcgtggagcaggacaatgatctggagctggccgacgcctactacctggggggcgtgccgcccgaccagctgcccccgagcctgcgatggctcttccccaccggaggctcagtccgtggctgcgtcaaaggcatcaaggccctgggcaagtatgtggacctcaagcggctgaacacgacaggcgtgagcgccggctgcaccgccgacctgctggtggggcgcgccatgactttccatggccacggcttccttcgcctggcgctctcgaacgtggcaccgctcactggcaacgtctactccggcttcggcttccacagcgcccaggacagtgccctgctctactaccgggcgtccccggatgggctatgccaggtgtccctgcagcagggccgtgtgagcctacagctcctgaggactgaagtgaaaactcaagcgggcttcgccgatggtgccccccattacgtcgccttctacagcaatgccacgggagtctggctgtatgtcgatgaccagctccagcagatgaagccccaccggggaccaccccccgagctccagccgcagcctgaggggcccccgaggctcctcctgggaggcctgcctgagtctggcaccatttacaacttcagtggctgcatcagcaacgtcttcgtgcagcggctcctgggcccacagcgcgtatttgatctgcagcagaacctgggcagcgtcaatgtgagcacgggctgtgcacccgccctgcaagcccagaccccgggcctggggcctagaggactgcaggccaccgcccggaaggcctcccgccgcagccgtcagcccgcccggcatcctgcctgcatgctgcccccacacctcaggaccacccgagactcctaccagtttgggggttccctgtccagtcacctggagtttgtgggcatcctggcccgacataggaactggcccagtctctccatgcacgtcctcccgcgaagctcccgaggcctcctcctcttcactgcccgtctgaggcccggcagcccctccctggcgctcttcctgagcaatggccacttcgttgcacagatggaaggcctcgggactcggctccgcgcccagagccgccagcgctcccggcctggccgctggcacaaggtctccgtgcgctgggagaagaaccggatcctgctggtgacggacggggcccgggcctggagccaggaggggccgcaccggcagcaccagggggcagagcacccccagccccacaccctctttgtgggcggcctcccggccagcagccacagctccaaacttccggtgaccgtcgggttcagcggctgtgtgaagagactgaggctgcacgggaggcccctgggggcccccacacggatggcaggggtcacaccctgcatcttgggccccctggaggcgggcctgttcttcccaggcagcgggggagttatcactttagacctcccaggagctacactgcctgatgtgggcctggaactggaggtgcggcccctggcagtcaccggactgatcttccacttgggccaggcccggacgcccccctacttgcagttgcaggtgaccgagaagcaagtcctgctgcgggcggatgacggagcaggggagttctccacgtcagtgacccgcccctcagtgctgtgtgatggccagtggcaccggctagcggtgatgaaaagcgggaatgtgctccggctggaggtggacgcgcagagcaaccacaccgtgggccccttgctggcggctgcagctggtgccccagcccctctgtacctcgggggcctgcctgagcccatggccgtgcagccctggccccccgcctactgcggctgcatgaggaggctggcggtgaaccggtcccccgtcgccatgactcgctctgtggaggtccacggggcagtgggggccagtggctgcccagccgcctaggacacagccaaccccggcccctggtcaggcccctgcagctgcctcacaccgccccttgtgctcgcctcataggtgtctatttggactctaagctctacgggtgacagatcttgtttctgaagatggtttaagttatagcttcttaaacgaaagaataaaatactgcaaaatgtttttatatttggcccttccacccatttttaattgtgagagatttgtcaccaatcatcactggttcctccttaaaaattaaaaagtaacttctgtgtaa

SEQ ID NO: 406192 - DNA, 11294 bp, Homo sapiens
ggggacgcggcccggagccgggaagatggcgaagcggctctgcgcggggagcgcactgtgtgttcgcggcccccggggccccgcgccgctgctgctggtcgggctggcgctgctgggcgcggcgcgggcgcgggaggaggcgggcggcggcttcagcctgcacccgccctacttcaacctggccgagggcgcccgcatcgccgcctccgcgacctgcggagaggaggccccggcgcgcggctccccgcgccccaccgaggacctttactgcaagctggtagggggccccgtggccggcggcgaccccaaccagaccatccggggccagtactgtgacatctgcacggctgccaacagcaacaaggcacaccccgcgagcaatgccatcgatggcacggagcgctggtggcagagtccaccgctgtcccgcggcctggagtacaacgaggtcaacgtcaccctggacctgggccaggtcttccacgtggcctacgtcctcatcaagtttgccaactcaccccggccggacctctgggtgctggagcggtccatggacttcggccgcacctaccagccctggcagttctttgcctcctccaagagggactgtctggagcggttcgggccacagacgctggagcgcatcacacgggacgacgcggccatctgcaccaccgagtactcacgcatcgtgcccctggagaacggagagatcgtggtgtccctggtgaacggacgtccgggcgccatgaatttctcctactcgccgctgctacgtgagttcaccaaggccaccaacgtccgcctgcgcttcctgcgtaccaacacgctgctgggccatctcatggggaaggcgctgcgggaccccacggtcacccgccggtattattacagcatcaaggatatcagcatcggaggccgctgtgtctgccacggccacgcggatgcctgcgatgccaaagaccccacggacccgttcaggctgcagtgcacctgccagcacaacacctgcgggggcacctgcgaccgctgctgccccggcttcaatcagcagccgtggaagcctgcgactgccaacagtgccaacgagtgccagtcctgtaactgctacggccatgccaccgactgttactacgaccctgaggtggaccggcgccgcgccagccagagcctggatggcacctatcagggtgggggtgtctgtatcgactgccagcaccacaccgccggcgtcaactgtgagcgctgcctgcccggcttctaccgctctcccaaccaccctctcgactcgccccacgtctgccgccgctgcaactgcgagtccgacttcacggatggcacctgcgaggacctgacgggtcgatgctactgccggcccaacttctctggggagcggtgtgacgtgtgtgccgagggcttcacgggcttcccaagctgctacccgacgccctcgtcctccaatgacaccagggagcaggtgctgccagccggccagattgtgaattgtgactgcagcgcggcagggacccagggcaacgcctgccggaaggacccaagggtgggacgctgtctgtgcaaacccaacttccaaggcacccattgtgagctctgcgcgccagggttctacggccccggctgccagccctgccagtgttccagccctggagtggccgatgaccgctgtgaccctgacacaggccagtgcaggtgccgagtgggcttcgagggggccacatgtgatcgctgtgcccccggctactttcacttccctctctgccagttgtgtggctgcagccctgcaggaaccttgcccgagggctgcgatgaggccggccgctgcctatgccagcctgagtttgctggacctcattgtgaccggtgccgccctggctaccatggtttccccaactgccaagcatgcacctgcgaccctcggggagccctggaccagctctgtggggcgggaggtttgtgccgctgccgccccggctacacaggcactgcctgccaggaatgcagccccggctttcacggcttccccagctgtgtcccctgccactgctctgctgaaggctccctgcacgcagcctgtgacccccggagtgggcagtgcagctgccggccccgtgtgacggggctgcggtgtgacacatgtgtgcccggtgcctacaacttcccctactgcgaagctggctcttgccaccctgccggtctggccccagtggatcctgcccttcctgaggcacaggttccctgtatgtgccgggctcacgtggaggggccgagctgtgaccgctgcaaacctgggttctggggactgagccccagcaaccccgagggctgtacccgctgcagctgcgacctcaggggcacactgggtggagttgctgagtgccagccgggcaccggccagtgcttctgcaagccccacgtgtgcggccaggcctgcgcgtcctgcaaggatggcttctttggactggatcaggctgactattttggctgccgcagctgccggtgtgacattggcggtgcactgggccagagctgtgaaccgaggacgggcgtctgccggtgccgccccaacacccagggccccacctgcagcgagcctgcgagggaccactacctcccggacctgcaccacctgcgcctggagctggaggaggctgccacacctgagggtcacgccgtgcgctttggcttcaaccccctcgagttcgagaacttcagctggaggggctacgcgcagatggcacctgtccagcccaggatcgtggccaggctgaacctgacctcccctgaccttttctggctcgtcttccgatacgtcaaccggggggccatgagtgtgagcgggcgggtctctgtgcgagaggagggcaggtcggccacctgcgccaactgcacagcacagagtcagcccgtggccttcccacccagcacggagcctgccttcatcaccgtgccccagaggggcttcggagagccctttgtgctgaaccctggcacctgggccctgcgtgtggaggccgaaggggtgctcctggactacgtggttctgctgcctagcgcatactacgaggcggcgctcctgcagctgcgggtgactgaggcctgcacataccgtccctctgcccagcagtctggcgacaactgcctcctctacacacacctccccctggatggcttcccctcggccgccgggctggaggccctgtgtcgccaggacaacagcctgccccggccctgccccacggagcagctcagcccgtcgcacccgccactgatcacctgcacgggcagtgatgtggacgtccagcttcaagtggcagtgccacagccaggccgctatgccctagtggtggagtacgccaatgaggatgcccgccaggaggtgggcgtggccgtgcacaccccacagcgggccccccagcaggggctgctctccctgcacccctgcctgtacagcaccctgtgccggggcactgcccgggatacccaggaccacctggctgtcttccacctggactcggaggccagcgtgaggctcacagccgagcaggcacgcttcttcctgcacggggtcactctggtgcccattgaggagttcagcccggagttcgtggagccccgggtcagctgcatcagcagccacggcgcctttggccccaacagtgccgcctgtctgccctcgcgcttcccaaagccgccccagcccatcatcctcagggactgccaggtgatcccgctgccgcccggcctcccgctgacccacgcgcaggatctcactccagccatgtccccagctggaccccgacctcggccccccaccgctgtggaccctgatgcagagcccaccctgctgcgtgagccccaggccaccgtggtcttcaccacccatgtgcccacgctgggccgctatgccttcctgctgcacggctaccagccagcccaccccaccttccccgtggaagtcctcatcaacgccggccgcgtgtggcagggccacgccaacgccagcttctgtccacatggctacggctgccgcaccctggtggtgtgtgagggccaggccctgctggacgtgacccacagcgagctcactgtgaccgtgcgtgtgcccgagggccggtggctctggctggattatgtactcgtggtccctgagaacgtctacagctttggctacctccgggaggagcccctggataaatcctatgacttcatcagccactgcgcagcccagggctaccacatcagccccagcagctcatccctgttctgccgaaacgctgctgcttccctctccctcttctataacaacggagcccgtccatgtggctgccacgaagtaggtgctacaggccccacgtgtgagcccttcgggggccagtgtccctgccatgcccatgtcattggccgtgactgctcccgctgtgccaccggatactggggcttccccaactgcaggccctgtgactgcggtgcccgcctctgtgacgagctcacgggccagtgcatctgcccgccacgcaccatcccgcccgactgcctgctgtgccagccccagacctttggctgccaccccctggtcggctgtgaggagtgtaactgctcagggcccggcatccaggagctcacagaccctacctgtgacacagacagcggccagtgcaagtgcagacccaacgtgactgggcgccgctgtgatacctgctctccgggcttccatggctacccccgctgccgcccctgtgactgtcacgaggcgggcactgcgcctggcgtgtgtgaccccctcacagggcagtgctactgtaaggagaacgtgcagggccccaaatgtgaccagtgcagccttgggaccttctcactggatgctgccaaccccaaaggttgcacccgctgcttctgctttggggccacggagcgctgccggagctcgtcctacacccgccaggagttcgtggatatggagggatgggtgctgctgagcactgaccggcaggtggtgccccacgagcggcagccagggacggagatgctccgtgcagacctgcggcacgtgcctgaggctgtgcccgaggctttccccgagctgtactggcaggccccaccctcctacctgggggaccgggtgtcatcctacggtgggaccctccgttatgaactgcactcagagacccagcggggagatgtctttgtccccatggagagcaggccggatgtggtgctgcagggcaaccagatgagcatcacattcctggagccggcataccccacgcctggccacgttcaccgtgggcagctgcagctggtggaggggaacttccggcatacggagactcgcaacactgtgtcccgcgaggagctcatgatggtgctggccagcctggagcagctgcagatccgtgccctcttctcacagatctcctcggctgtctccctgcgcagggtggcactggaggtggccagcccagcaggccagggggccctggccagcaatgtggagctgtgcctgtgccccgccagctaccggggggactcatgccaggaatgtgcccccggcttctatcgggacgtcaaaggtctcttcctgggccgatgtgtcccttgtcagtgccatggacactcagaccgctgcctccctggctctggcgtctgtgtggactgccagcacaacaccgaaggggcccactgtgagcgctgccaggctggcttcatgagcagcagggacgaccccagcgccccctgtgtcagctgcccctgccccctctcagtgccttccaacaacttcgccgagggctgtgtcctgcgaggcggccgcacccagtgcctctgcaaacctggttatgcaggtgcctcctgcgagcggtgtgcgcccggattctttgggaacccactggtgctgggcagctcctgccagccatgcgactgcagcggcaacggtgaccccaacttgctcttcagcgactgcgaccccctgacgggcgcctgccgtggctgcctgcgccacaccactgggccccgctgcgagatctgtgcccccggcttctacggcaacgccctgctgcccggcaactgcacccggtgcgactgtaccccatgtgggacagaggcctgcgacccccacagcgggcactgcctgtgcaaggcgggcgtgactgggcggcgctgtgaccgctgccaggagggacattttggtttcaatggctgcgggggctgccgcccgtgtgcttgtggaccggccgccgagggctccgagtgccacccccagagcggacagtgccactgccgaccagggaccatgggaccccagtgccgcgagtgtgcccctggctactgggggctccctgagcagggctgcaggcgctgccagtgccctgggggccgctgtgaccctcacacgggccgctgcaactgccccccggggctcagcggggagcgctgcgacacctgcagccagcagcatcaggtgcctgttccaggcgggcctgtgggccacagcatccactgtgaagtgtgtgaccactgtgtggtcctgctcctggatgacctggaacgggccggcgccctcctccccgccattcacgagcaactgcgtggcatcaatgccagctccatggcctgggcccgtctgcacaggctgaacgcctccatcgctgacctgcagagccagctccggagccccctgggcccccgccatgagacggcacagcagctggaggtgctggagcagcagagcacaagcctcgggcaggacgcacggcggctaggcggccaggccgtggggacccgagaccaggcgagccaattgctggccggcaccgaggccacactgggccatgcgaagacgctgttggcggccatccgggctgtggaccgcaccctgagcgagctcatgtcccagacgggccacctggggctggccaatgcctcggctccatcaggtgagcagctgctccggacactggccgaggtggagcggctgctctgggagatgcgggcccgggacctgggggccccgcaggcagcagctgaggctgagttggctgcagcacagagattgctggcccgggtgcaggagcagctgagcagcctctgggaggagaaccaggcactggccacacaaacccgcgaccggctggcccagcacgaggccggcctcatggacctgcgagaggctttgaaccgggcagtggacgccacacgggaggcccaggagctcaacagccgcaaccaggagcgcctggaggaagccctgcaaaggaagcaggagctgtcccgggacaatgccaccctgcaggccactctgcatgcggctagggacaccctggccagcgtcttcagattgctgcacagcctggaccaggctaaggaggagctggagcgcctcgccgccagcctggatggggctcggaccccactgctgcagaggatgcagaccttctccccggcgggcagcaagctgcgtctagtggaggccgccgaggcccacgcacagcagctgggccagctggcactcaatctgtccagcatcatcctggacgtcaaccaggaccgcctcacccagagggccatcgaggcctccaacgcctacagccgcatcctgcaggccgtgcaggctgccgaggatgctgctggccaggccctgcagcaggcggaccacacgtgggcgacggtggtgcggcagggcctggtggaccgagcccagcagctcctggccaacagcactgcactagaagaggccatgctccaggaacagcagaggctgggccttgtgtgggctgccctccagggtgccaggacccagctccgagatgtccgggccaagaaggaccagctggaggcgcacatccaggcggcgcaggccatgcttgccatggacacagacgagacaagcaagaagatcgcacatgccaaggctgtggctgctgaagcccaggacaccgccacccgtgtgcagtcccagctgcaggccatgcaggagaatgtggagcggtggcagggccagtacgagggcctgcggggccaggacctgggccaggcagtgcttgacgcaggccactcagtgtccaccctggagaagacgctgccccagctgctggccaagctgagcatcctggagaaccgtggggtgcacaacgccagcctggccctgtccgccagcattggccgcgtgcgagagctcattgcccaggcccggggggctgccagtaaggtgggtgagagtcccaggggaaggtggacatcagggagggtggtggtggacgctgatggaccgtgccccgcaggtcaaggtgcccatgaagttcaacgggcgctcaggggtgcagctgcgcaccccacgggatcttgccgaccttgctgcctacactgccctcaagttctacctgcagggcccagagcctgagcctgggcagggtaccgaggatcgctttgtgatgtacatgggcagccgccaggtaccaggctggctgggtggatgcggcccgagctcaggctctgtttggaaatgagcggtgcctggtccctggtccccggtccccatcccgactgtgtgtctgtcactgccgcaggccactggggactacatgggtgtgtctctgcgtgacaagaaggtgcactgggtgtatcagctgggtgaggcgggccctgcagtcctaagcatcgatgaggacattggggagcagttcgcagctgtcagcctggacaggactctccagtttggccacatgtccgtcacagtggagagacagatgatccaggaaaccaagggtgacacggtggcccctggggcagaggggctgctcaacctgcggccagacgacttcgtcttctacgtcggggggtaccccagtaccttcacgccccctcccctgcttcgcttccccggctaccggggctgcatcgagatggacacgctgaatgaggaggtggtcagcctctacaacttcgagaggaccttccagctggacacggctgtggacaggccttgtgcccgctccaagtcgaccggggacccgtggctcacggacggctcctacctggacggcaccggcttcgcccgcatcagcttcgacagtcagatcagcaccaccaagcgcttcgagcaggagctgcggctcgtgtcctacagcggggtgctcttcttcctgaagcagcagatccaggtgttcctgctggggggcagccgcaagcgtgtgctggtgcgtgtggagcgggccacggtgtacagcgtggagcaggacaatgatctggagctggccgacgcctactacctggggggcgtgccgcccgaccagctgcccccgagcctgcgatggctcttccccaccggaggctcagtccgtggctgcgtcaaaggcatcaaggccctgggcaagtatgtggacctcaagcggctgaacacgacaggcgtgagcgccggctgcaccgccgacctgctggtggggcgcgccatgactttccatggccacggcttccttcgcctggcgctctcgaacgtggcaccgctcactggcaacgtctactccggcttcggcttccacagcgcccaggacagtgccctgctctactaccgggcgtccccggatgggctatgccaggtgtccctgcagcagggccgtgtgagcctacagctcctgaggactgaagtgaaaactcaagcgggcttcgccgatggtgccccccattacgtcgccttctacagcaatgccacgggagtctggctgtatgtcgatgaccagctccagcagatgaagccccaccggggaccaccccccgagctccagccgcagcctgaggggcccccgaggctcctcctgggaggcctgcctgagtctggcaccatttacaacttcagtggctgcatcagcaacgtcttcgtgcagcggctcctgggcccacagcgcgtatttgatctgcagcagaacctgggcagcgtcaatgtgagcacgggctgtgcacccgccctgcaagcccagaccccgggcctggggcctagaggactgcaggccaccgcccggaaggcctcccgccgcagccgtcagcccgcccggcatcctgcctgcatgctgcccccacacctcaggaccacccgagactcctaccagtttgggggttccctgtccagtcacctggagtttgtgggcatcctggcccgacataggaactggcccagtctctccatgcacgtcctcccgcgaagctcccgaggcctcctcctcttcactgcccgtctgaggcccggcagcccctccctggcgctcttcctgagcaatggccacttcgttgcacagatggaaggcctcgggactcggctccgcgcccagagccgccagcgctcccggcctggccgctggcacaaggtctccgtgcgctgggagaagaaccggatcctgctggtgacggacggggcccgggcctggagccaggaggggccgcaccggcagcaccagggggcagagcacccccagccccacaccctctttgtgggcggcctcccggccagcagccacagctccaaacttccgacctcccaggagctacactgcctgatgtgggcctggaactggaggtgcggcccctggcagtcaccggactgatcttccacttgggccaggcccggacgcccccctacttgcagttgcaggtgaccgagaagcaagtcctgctgcgggcggatgacggagcaggggagttctccacgtcagtgacccgcccctcagtgctgtgtgatggccagtggcaccggctagcggtgatgaaaagcgggaatgtgctccggctggaggtggacgcgcagagcaaccacaccgtgggccccttgctggcggctgcagctggtgccccagcccctctgtacctcgggggcctgcctgagcccatggccgtgcagccctggccccccgcctactgcggctgcatgaggaggctggcggtgaaccggtcccccgtcgccatgactcgctctgtggaggtccacggggcagtgggggccagtggctgcccagccgcctaggacacagccaaccccggcccctggtcaggcccctgcagctgcctcacaccgccccttgtgctcgcctcataggtgtctatttggactctaagctctacgggtgacagatcttgtttctgaagatggtttaagttatagcttcttaaacgaaagaataaaatactgcaaaatgtttttatatttggcccttccacccatttttaattgtgagagatttgtcaccaatcatcactggttcctccttaaaaattaaaaagtaacttctgtgtaa

SEQ ID NO: 406193 - DNA, 11689 bp, Homo sapiens
ggggacgcggcccggagccgggaagatggcgaagcggctctgcgcggggagcgcactgtgtgttcgcggcccccggggccccgcgccgctgctgctggtcgggctggcgctgctgggcgcggcgcgggcgcgggaggaggcgggcggcggcttcagcctgcacccgccctacttcaacctggccgagggcgcccgcatcgccgcctccgcgacctgcggagaggaggccccggcgcgcggctccccgcgccccaccgaggacctttactgcaagctggtagggggccccgtggccggcggcgaccccaaccagaccatccggggccagtactgtgacatctgcacggctgccaacagcaacaaggcacaccccgcgagcaatgccatcgatggcacggagcgctggtggcagagtccaccgctgtcccgcggcctggagtacaacgaggtcaacgtcaccctggacctgggccaggtcttccacgtggcctacgtcctcatcaagtttgccaactcaccccggccggacctctgggtgctggagcggtccatggacttcggccgcacctaccagccctggcagttctttgcctcctccaagagggactgtctggagcggttcgggccacagacgctggagcgcatcacacgggacgacgcggccatctgcaccaccgagtactcacgcatcgtgcccctggagaacggagagatcgtggtgtccctggtgaacggacgtccgggcgccatgaatttctcctactcgccgctgctacgtgagttcaccaaggccaccaacgtccgcctgcgcttcctgcgtaccaacacgctgctgggccatctcatggggaaggcgctgcgggaccccacggtcacccgccggtattattacagcatcaaggatatcagcatcggaggccgctgtgtctgccacggccacgcggatgcctgcgatgccaaagaccccacggacccgttcaggctgcagtgcacctgccagcacaacacctgcgggggcacctgcgaccgctgctgccccggcttcaatcagcagccgtggaagcctgcgactgccaacagtgccaacgagtgccagtcctgtaactgctacggccatgccaccgactgttactacgaccctgaggtggaccggcgccgcgccagccagagcctggatggcacctatcagggtgggggtgtctgtatcgactgccagcaccacaccgccggcgtcaactgtgagcgctgcctgcccggcttctaccgctctcccaaccaccctctcgactcgccccacgtctgccgccgctgcaactgcgagtccgacttcacggatggcacctgcgaggacctgacgggtcgatgctactgccggcccaacttctctggggagcggtgtgacgtgtgtgccgagggcttcacgggcttcccaagctgctacccgacgccctcgtcctccaatgacaccagggagcaggtgctgccagccggccagattgtgaattgtgactgcagcgcggcagggacccagggcaacgcctgccggaaggacccaagggtgggacgctgtctgtgcaaacccaacttccaaggcacccattgtgagctctgcgcgccagggttctacggccccggctgccagccctgccagtgttccagccctggagtggccgatgaccgctgtgaccctgacacaggccagtgcaggtgccgagtgggcttcgagggggccacatgtgatcgctgtgcccccggctactttcacttccctctctgccagttgtgtggctgcagccctgcaggaaccttgcccgagggctgcgatgaggccggccgctgcctatgccagcctgagtttgctggacctcattgtgaccggtgccgccctggctaccatggtttccccaactgccaagcatgcacctgcgaccctcggggagccctggaccagctctgtggggcgggaggtttgtgccgctgccgccccggctacacaggcactgcctgccaggaatgcagccccggctttcacggcttccccagctgtgtcccctgccactgctctgctgaaggctccctgcacgcagcctgtgacccccggagtgggcagtgcagctgccggccccgtgtgacggggctgcggtgtgacacatgtgtgcccggtgcctacaacttcccctactgcgaagctggctcttgccaccctgccggtctggccccagtggatcctgcccttcctgaggcacaggttccctgtatgtgccgggctcacgtggaggggccgagctgtgaccgctgcaaacctgggttctggggactgagccccagcaaccccgagggctgtacccgctgcagctgcgacctcaggggcacactgggtggagttgctgagtgccagccgggcaccggccagtgcttctgcaagccccacgtgtgcggccaggcctgcgcgtcctgcaaggatggcttctttggactggatcaggctgactattttggctgccgcagctgccggtgtgacattggcggtgcactgggccagagctgtgaaccgaggacgggcgtctgccggtgccgccccaacacccagggccccacctgcagcgagcctgcgagggaccactacctcccggacctgcaccacctgcgcctggagctggaggaggctgccacacctgagggtcacgccgtgcgctttggcttcaaccccctcgagttcgagaacttcagctggaggggctacgcgcagatggcacctgtccagcccaggatcgtggccaggctgaacctgacctcccctgaccttttctggctcgtcttccgatacgtcaaccggggggccatgagtgtgagcgggcgggtctctgtgcgagaggagggcaggtcggccacctgcgccaactgcacagcacagagtcagcccgtggccttcccacccagcacggagcctgccttcatcaccgtgccccagaggggcttcggagagccctttgtgctgaaccctggcacctgggccctgcgtgtggaggccgaaggggtgctcctggactacgtggttctgctgcctagcgcatactacgaggcggcgctcctgcagctgcgggtgactgaggcctgcacataccgtccctctgcccagcagtctggcgacaactgcctcctctacacacacctccccctggatggcttcccctcggccgccgggctggaggccctgtgtcgccaggacaacagcctgccccggccctgccccacggagcagctcagcccgtcgcacccgccactgatcacctgcacgggcagtgatgtggacgtccagcttcaagtggcagtgccacagccaggccgctatgccctagtggtggagtacgccaatgaggatgcccgccaggaggtgggcgtggccgtgcacaccccacagcgggccccccagcaggggctgctctccctgcacccctgcctgtacagcaccctgtgccggggcactgcccgggatacccaggaccacctggctgtcttccacctggactcggaggccagcgtgaggctcacagccgagcaggcacgcttcttcctgcacggggtcactctggtgcccattgaggagttcagcccggagttcgtggagccccgggtcagctgcatcagcagccacggcgcctttggccccaacagtgccgcctgtctgccctcgcgcttcccaaagccgccccagcccatcatcctcagggactgccaggtgatcccgctgccgcccggcctcccgctgacccacgcgcaggatctcactccagccatgtccccagctggaccccgacctcggccccccaccgctgtggaccctgatgcagagcccaccctgctgcgtgagccccaggccaccgtggtcttcaccacccatgtgcccacgctgggccgctatgccttcctgctgcacggctaccagccagcccaccccaccttccccgtggaagtcctcatcaacgccggccgcgtgtggcagggccacgccaacgccagcttctgtccacatggctacggctgccgcaccctggtggtgtgtgagggccaggccctgctggacgtgacccacagcgagctcactgtgaccgtgcgtgtgcccgagggccggtggctctggctggattatgtactcgtggtccctgagaacgtctacagctttggctacctccgggaggagcccctggataaatcctatgacttcatcagccactgcgcagcccagggctaccacatcagccccagcagctcatccctgttctgccgaaacgctgctgcttccctctccctcttctataacaacggagcccgtccatgtggctgccacgaagtaggtgctacaggccccacgtgtgagcccttcgggggccagtgtccctgccatgcccatgtcattggccgtgactgctcccgctgtgccaccggatactggggcttccccaactgcaggcgtgagtaccccagtccttgggcgcccagtggcagggagttggtgccagagcccaaggtggacgggtcgaccagaaagcagggtcaggagaatgttctagagcctggcagggcagcattgctgccccatctgcgggcctgggcccaggacttcagcttgcgggccatgcagaaggtttcagggaccagcaggtggtccacagtctctgacgatgatgttgattctgagcagctgcctccatgtcaggagctgtccaaggctcagcacccggggcaggggtccctgttcttgtctcccccgcccccgtcacactgccacatcccctagggctgcattctgggcctctgagaggggcgggactgggaagaggggtcagtaaaccctgtacccgccccacagcctgtgactgcggtgcccgcctctgtgacgagctcacgggccagtgcatctgcccgccacgcaccatcccgcccgactgcctgctgtgccagccccagacctttggctgccaccccctggtcggctgtgaggagtgtaactgctcagggcccggcatccaggagctcacagaccctacctgtgacacagacagcggccagtgcaagtgcagacccaacgtgactgggcgccgctgtgatacctgctctccgggcttccatggctacccccgctgccgcccctgtgactgtcacgaggcgggcactgcgcctggcgtgtgtgaccccctcacagggcagtgctactgtaaggagaacgtgcagggccccaaatgtgaccagtgcagccttgggaccttctcactggatgctgccaaccccaaaggttgcacccgctgcttctgctttggggccacggagcgctgccggagctcgtcctacacccgccaggagttcgtggatatggagggatgggtgctgctgagcactgaccggcaggtggtgccccacgagcggcagccagggacggagatgctccgtgcagacctgcggcacgtgcctgaggctgtgcccgaggctttccccgagctgtactggcaggccccaccctcctacctgggggaccgggtgtcatcctacggtgggaccctccgttatgaactgcactcagagacccagcggggagatgtctttgtccccatggagagcaggccggatgtggtgctgcagggcaaccagatgagcatcacattcctggagccggcataccccacgcctggccacgttcaccgtgggcagctgcagctggtggaggggaacttccggcatacggagactcgcaacactgtgtcccgcgaggagctcatgatggtgctggccagcctggagcagctgcagatccgtgccctcttctcacagatctcctcggctgtctccctgcgcagggtggcactggaggtggccagcccagcaggccagggggccctggccagcaatgtggagctgtgcctgtgccccgccagctaccggggggactcatgccaggaatgtgcccccggcttctatcgggacgtcaaaggtctcttcctgggccgatgtgtcccttgtcagtgccatggacactcagaccgctgcctccctggctctggcgtctgtgtggactgccagcacaacaccgaaggggcccactgtgagcgctgccaggctggcttcatgagcagcagggacgaccccagcgccccctgtgtcagctgcccctgccccctctcagtgccttccaacaacttcgccgagggctgtgtcctgcgaggcggccgcacccagtgcctctgcaaacctggttatgcaggtgcctcctgcgagcggtgtgcgcccggattctttgggaacccactggtgctgggcagctcctgccagccatgcgactgcagcggcaacggtgaccccaacttgctcttcagcgactgcgaccccctgacgggcgcctgccgtggctgcctgcgccacaccactgggccccgctgcgagatctgtgcccccggcttctacggcaacgccctgctgcccggcaactgcacccggtgcgactgtaccccatgtgggacagaggcctgcgacccccacagcgggcactgcctgtgcaaggcgggcgtgactgggcggcgctgtgaccgctgccaggagggacattttggtttcaatggctgcgggggctgccgcccgtgtgcttgtggaccggccgccgagggctccgagtgccacccccagagcggacagtgccactgccgaccagggaccatgggaccccagtgccgcgagtgtgcccctggctactgggggctccctgagcagggctgcaggcgctgccagtgccctgggggccgctgtgaccctcacacgggccgctgcaactgccccccggggctcagcggggagcgctgcgacacctgcagccagcagcatcaggtgcctgttccaggcgggcctgtgggccacagcatccactgtgaagtgtgtgaccactgtgtggtcctgctcctggatgacctggaacgggccggcgccctcctccccgccattcacgagcaactgcgtggcatcaatgccagctccatggcctgggcccgtctgcacaggctgaacgcctccatcgctgacctgcagagccagctccggagccccctgggcccccgccatgagacggcacagcagctggaggtgctggagcagcagagcacaagcctcgggcaggacgcacggcggctaggcggccaggccgtggggacccgagaccaggcgagccaattgctggccggcaccgaggccacactgggccatgcgaagacgctgttggcggccatccgggctgtggaccgcaccctgagcgagctcatgtcccagacgggccacctggggctggccaatgcctcggctccatcaggtgagcagctgctccggacactggccgaggtggagcggctgctctgggagatgcgggcccgggacctgggggccccgcaggcagcagctgaggctgagttggctgcagcacagagattgctggcccgggtgcaggagcagctgagcagcctctgggaggagaaccaggcactggccacacaaacccgcgaccggctggcccagcacgaggccggcctcatggacctgcgagaggctttgaaccgggcagtggacgccacacgggaggcccaggagctcaacagccgcaaccaggagcgcctggaggaagccctgcaaaggaagcaggagctgtcccgggacaatgccaccctgcaggccactctgcatgcggctagggacaccctggccagcgtcttcagattgctgcacagcctggaccaggctaaggaggagctggagcgcctcgccgccagcctggatggggctcggaccccactgctgcagaggatgcagaccttctccccggcgggcagcaagctgcgtctagtggaggccgccgaggcccacgcacagcagctgggccagctggcactcaatctgtccagcatcatcctggacgtcaaccaggaccgcctcacccagagggccatcgaggcctccaacgcctacagccgcatcctgcaggccgtgcaggctgccgaggatgctgctggccaggccctgcagcaggcggaccacacgtgggcgacggtggtgcggcagggcctggtggaccgagcccagcagctcctggccaacagcactgcactagaagaggccatgctccaggaacagcagaggctgggccttgtgtgggctgccctccagggtgccaggacccagctccgagatgtccgggccaagaaggaccagctggaggcgcacatccaggcggcgcaggccatgcttgccatggacacagacgagacaagcaagaagatcgcacatgccaaggctgtggctgctgaagcccaggacaccgccacccgtgtgcagtcccagctgcaggccatgcaggagaatgtggagcggtggcagggccagtacgagggcctgcggggccaggacctgggccaggcagtgcttgacgcaggccactcagtgtccaccctggagaagacgctgccccagctgctggccaagctgagcatcctggagaaccgtggggtgcacaacgccagcctggccctgtccgccagcattggccgcgtgcgagagctcattgcccaggcccggggggctgccagtaaggtcaaggtgcccatgaagttcaacgggcgctcaggggtgcagctgcgcaccccacgggatcttgccgaccttgctgcctacactgccctcaagttctacctgcagggcccagagcctgagcctgggcagggtaccgaggatcgctttgtgatgtacatgggcagccgccaggccactggggactacatgggtgtgtctctgcgtgacaagaaggtgcactgggtgtatcagctgggtgaggcgggccctgcagtcctaagcatcgatgaggacattggggagcagttcgcagctgtcagcctggacaggactctccagtttggccacatgtccgtcacagtggagagacagatgatccaggaaaccaagggtgacacggtggcccctggggcagaggggctgctcaacctgcggccagacgacttcgtcttctacgtcggggggtaccccagtaccttcacgccccctcccctgcttcgcttccccggctaccggggctgcatcgagatggacacgctgaatgaggaggtggtcagcctctacaacttcgagaggaccttccagctggacacggctgtggacaggccttgtgcccgctccaagtcgaccggggacccgtggctcacggacggctcctacctggacggcaccggcttcgcccgcatcagcttcgacagtcagatcagcaccaccaagcgcttcgagcaggagctgcggctcgtgtcctacagcggggtgctcttcttcctgaagcagcagagccagttcctgtgcttggccgtgcaagaaggcagcctcgtgctgttgtatgactttggggctggcctgaaaaaggccgtcccactgcagcccccaccgcccctgacctcggccagcaaggcgatccaggtgttcctgctggggggcagccgcaagcgtgtgctggtgcgtgtggagcgggccacggtgtacagcgtggagcaggacaatgatctggagctggccgacgcctactacctggggggcgtgccgcccgaccagctgcccccgagcctgcgatggctcttccccaccggaggctcagtccgtggctgcgtcaaaggcatcaaggccctgggcaagtatgtggacctcaagcggctgaacacgacaggcgtgagcgccggctgcaccgccgacctgctggtggggcgcgccatgactttccatggccacggcttccttcgcctggcgctctcgaacgtggcaccgctcactggcaacgtctactccggcttcggcttccacagcgcccaggacagtgccctgctctactaccgggcgtccccggatgggctatgccaggtgtccctgcagcagggccgtgtgagcctacagctcctgaggactgaagtgaaaactcaagcgggcttcgccgatggtgccccccattacgtcgccttctacagcaatgccacgggagtctggctgtatgtcgatgaccagctccagcagatgaagccccaccggggaccaccccccgagctccagccgcagcctgaggggcccccgaggctcctcctgggaggcctgcctgagtctggcaccatttacaacttcagtggctgcatcagcaacgtcttcgtgcagcggctcctgggcccacagcgcgtatttgatctgcagcagaacctgggcagcgtcaatgtgagcacgggctgtgcacccgccctgcaagcccagaccccgggcctggggcctagaggactgcaggccaccgcccggaaggcctcccgccgcagccgtcagcccgcccggcatcctgcctgcatgctgcccccacacctcaggaccacccgagactcctaccagtttgggggttccctgtccagtcacctggagtttgtgggcatcctggcccgacataggaactggcccagtctctccatgcacgtcctcccgcgaagctcccgaggcctcctcctcttcactgcccgtctgaggcccggcagcccctccctggcgctcttcctgagcaatggccacttcgttgcacagatggaaggcctcgggactcggctccgcgcccagagccgccagcgctcccggcctggccgctggcacaaggtctccgtgcgctgggagaagaaccggatcctgctggtgacggacggggcccgggcctggagccaggaggggccgcaccggcagcaccagggggcagagcacccccagccccacaccctctttgtgggcggcctcccggccagcagccacagctccaaacttccggtgaccgtcgggttcagcggctgtgtgaagagactgaggctgcacgggaggcccctgggggcccccacacggatggcaggggtcacaccctgcatcttgggccccctggaggcgggcctgttcttcccaggcagcgggggagttatcactttagacctcccaggagctacactgcctgatgtgggcctggaactggaggtgcggcccctggcagtcaccggactgatcttccacttgggccaggcccggacgcccccctacttgcagttgcaggtgaccgagaagcaagtcctgctgcgggcggatgacggagcaggggagttctccacgtcagtgacccgcccctcagtgctgtgtgatggccagtggcaccggctagcggtgatgaaaagcgggaatgtgctccggctggaggtggacgcgcagagcaaccacaccgtgggccccttgctggcggctgcagctggtgccccagcccctctgtacctcgggggcctgcctgagcccatggccgtgcagccctggccccccgcctactgcggctgcatgaggaggctggcggtgaaccggtcccccgtcgccatgactcgctctgtggaggtccacggggcagtgggggccagtggctgcccagccgcctaggacacagccaaccccggcccctggtcaggcccctgcagctgcctcacaccgccccttgtgctcgcctcataggtgtctatttggactctaagctctacgggtgacagatcttgtttctgaagatggtttaagttatagcttcttaaacgaaagaataaaatactgcaaaatgttttta

SEQ ID NO: 406194 - DNA, 11329 bp, Homo sapiens
ggggacgcggcccggagccgggaagatggcgaagcggctctgcgcggggagcgcactgtgtgttcgcggcccccggggccccgcgccgctgctgctggtcgggctggcgctgctgggcgcggcgcgggcgcgggaggaggcgggcggcggcttcagcctgcacccgccctacttcaacctggccgagggcgcccgcatcgccgcctccgcgacctgcggagaggaggccccggcgcgcggctccccgcgccccaccgaggacctttactgcaagctggtagggggccccgtggccggcggcgaccccaaccagaccatccggggccagtactgtgacatctgcacggctgccaacagcaacaaggcacaccccgcgagcaatgccatcgatggcacggagcgctggtggcagagtccaccgctgtcccgcggcctggagtacaacgaggtcaacgtcaccctggacctgggccaggtcttccacgtggcctacgtcctcatcaagtttgccaactcaccccggccggacctctgggtgctggagcggtccatggacttcggccgcacctaccagccctggcagttctttgcctcctccaagagggactgtctggagcggttcgggccacagacgctggagcgcatcacacgggacgacgcggccatctgcaccaccgagtactcacgcatcgtgcccctggagaacggagagatcgtggtgtccctggtgaacggacgtccgggcgccatgaatttctcctactcgccgctgctacgtgagttcaccaaggccaccaacgtccgcctgcgcttcctgcgtaccaacacgctgctgggccatctcatggggaaggcgctgcgggaccccacggtcacccgccggtattattacagcatcaaggatatcagcatcggaggccgctgtgtctgccacggccacgcggatgcctgcgatgccaaagaccccacggacccgttcaggctgcagtgcacctgccagcacaacacctgcgggggcacctgcgaccgctgctgccccggcttcaatcagcagccgtggaagcctgcgactgccaacagtgccaacgagtgccagtcctgtaactgctacggccatgccaccgactgttactacgaccctgaggtggaccggcgccgcgccagccagagcctggatggcacctatcagggtgggggtgtctgtatcgactgccagcaccacaccgccggcgtcaactgtgagcgctgcctgcccggcttctaccgctctcccaaccaccctctcgactcgccccacgtctgccgccgctgcaactgcgagtccgacttcacggatggcacctgcgaggacctgacgggtcgatgctactgccggcccaacttctctggggagcggtgtgacgtgtgtgccgagggcttcacgggcttcccaagctgctacccgacgccctcgtcctccaatgacaccagggagcaggtgctgccagccggccagattgtgaattgtgactgcagcgcggcagggacccagggcaacgcctgccggaaggacccaagggtgggacgctgtctgtgcaaacccaacttccaaggcacccattgtgagctctgcgcgccagggttctacggccccggctgccagccctgccagtgttccagccctggagtggccgatgaccgctgtgaccctgacacaggccagtgcaggtgccgagtgggcttcgagggggccacatgtgatcgctgtgcccccggctactttcacttccctctctgccagttgtgtggctgcagccctgcaggaaccttgcccgagggctgcgatgaggccggccgctgcctatgccagcctgagtttgctggacctcattgtgaccggtgccgccctggctaccatggtttccccaactgccaagcatgcacctgcgaccctcggggagccctggaccagctctgtggggcgggaggtttgtgccgctgccgccccggctacacaggcactgcctgccaggaatgcagccccggctttcacggcttccccagctgtgtcccctgccactgctctgctgaaggctccctgcacgcagcctgtgacccccggagtgggcagtgcagctgccggccccgtgtgacggggctgcggtgtgacacatgtgtgcccggtgcctacaacttcccctactgcgaagctggctcttgccaccctgccggtctggccccagtggatcctgcccttcctgaggcacaggttccctgtatgtgccgggctcacgtggaggggccgagctgtgaccgctgcaaacctgggttctggggactgagccccagcaaccccgagggctgtacccgctgcagctgcgacctcaggggcacactgggtggagttgctgagtgccagccgggcaccggccagtgcttctgcaagccccacgtgtgcggccaggcctgcgcgtcctgcaaggatggcttctttggactggatcaggctgactattttggctgccgcagctgccggtgtgacattggcggtgcactgggccagagctgtgaaccgaggacgggcgtctgccggtgccgccccaacacccagggccccacctgcagcgagcctgcgagggaccactacctcccggacctgcaccacctgcgcctggagctggaggaggctgccacacctgagggtcacgccgtgcgctttggcttcaaccccctcgagttcgagaacttcagctggaggggctacgcgcagatggcacctgtccagcccaggatcgtggccaggctgaacctgacctcccctgaccttttctggctcgtcttccgatacgtcaaccggggggccatgagtgtgagcgggcgggtctctgtgcgagaggagggcaggtcggccacctgcgccaactgcacagcacagagtcagcccgtggccttcccacccagcacggagcctgccttcatcaccgtgccccagaggggcttcggagagccctttgtgctgaaccctggcacctgggccctgcgtgtggaggccgaaggggtgctcctggactacgtggttctgctgcctagcgcatactacgaggcggcgctcctgcagctgcgggtgactgaggcctgcacataccgtccctctgcccagcagtctggcgacaactgcctcctctacacacacctccccctggatggcttcccctcggccgccgggctggaggccctgtgtcgccaggacaacagcctgccccggccctgccccacggagcagctcagcccgtcgcacccgccactgatcacctgcacgggcagtgatgtggacgtccagcttcaagtggcagtgccacagccaggccgctatgccctagtggtggagtacgccaatgaggatgcccgccaggaggtgggcgtggccgtgcacaccccacagcgggccccccagcaggggctgctctccctgcacccctgcctgtacagcaccctgtgccggggcactgcccgggatacccaggaccacctggctgtcttccacctggactcggaggccagcgtgaggctcacagccgagcaggcacgcttcttcctgcacggggtcactctggtgcccattgaggagttcagcccggagttcgtggagccccgggtcagctgcatcagcagccacggcgcctttggccccaacagtgccgcctgtctgccctcgcgcttcccaaagccgccccagcccatcatcctcagggactgccaggtgatcccgctgccgcccggcctcccgctgacccacgcgcaggatctcactccagccatgtccccagctggaccccgacctcggccccccaccgctgtggaccctgatgcagagcccaccctgctgcgtgagccccaggccaccgtggtcttcaccacccatgtgcccacgctgggccgctatgccttcctgctgcacggctaccagccagcccaccccaccttccccgtggaagtcctcatcaacgccggccgcgtgtggcagggccacgccaacgccagcttctgtccacatggctacggctgccgcaccctggtggtgtgtgagggccaggccctgctggacgtgacccacagcgagctcactgtgaccgtgcgtgtgcccgagggccggtggctctggctggattatgtactcgtggtccctgagaacgtctacagctttggctacctccgggaggagcccctggataaatcctatgacttcatcagccactgcgcagcccagggctaccacatcagccccagcagctcatccctgttctgccgaaacgctgctgcttccctctccctcttctataacaacggagcccgtccatgtggctgccacgaagtaggtgctacaggccccacgtgtgagcccttcgggggccagtgtccctgccatgcccatgtcattggccgtgactgctcccgctgtgccaccggatactggggcttccccaactgcaggccctgtgactgcggtgcccgcctctgtgacgagctcacgggccagtgcatctgcccgccacgcaccatcccgcccgactgcctgctgtgccagccccagacctttggctgccaccccctggtcggctgtgaggagtgtaactgctcagggcccggcatccaggagctcacagaccctacctgtgacacagacagcggccagtgcaagtgcagacccaacgtgactgggcgccgctgtgatacctgctctccgggcttccatggctacccccgctgccgcccctgtgactgtcacgaggcgggcactgcgcctggcgtgtgtgaccccctcacagggcagtgctactgtaaggagaacgtgcagggccccaaatgtgaccagtgcagccttgggaccttctcactggatgctgccaaccccaaaggttgcacccgctgcttctgctttggggccacggagcgctgccggagctcgtcctacacccgccaggagttcgtggatatggagggatgggtgctgctgagcactgaccggcaggtggtgccccacgagcggcagccagggacggagatgctccgtgcagacctgcggcacgtgcctgaggctgtgcccgaggctttccccgagctgtactggcaggccccaccctcctacctgggggaccgggtgtcatcctacggtgggaccctccgttatgaactgcactcagagacccagcggggagatgtctttgtccccatggagagcaggccggatgtggtgctgcagggcaaccagatgagcatcacattcctggagccggcataccccacgcctggccacgttcaccgtgggcagctgcagctggtggaggggaacttccggcatacggagactcgcaacactgtgtcccgcgaggagctcatgatggtgctggccagcctggagcagctgcagatccgtgccctcttctcacagatctcctcggctgtctccctgcgcagggtggcactggaggtggccagcccagcaggccagggggccctggccagcaatgtggagctgtgcctgtgccccgccagctaccggggggactcatgccaggaatgtgcccccggcttctatcgggacgtcaaaggtctcttcctgggccgatgtgtcccttgtcagtgccatggacactcagaccgctgcctccctggctctggcgtctgtgtggactgccagcacaacaccgaaggggcccactgtgagcgctgccaggctggcttcatgagcagcagggacgaccccagcgccccctgtgtcagctgcccctgccccctctcagtgccttccaacaacttcgccgagggctgtgtcctgcgaggcggccgcacccagtgcctctgcaaacctggttatgcaggtgcctcctgcgagcggtgtgcgcccggattctttgggaacccactggtgctgggcagctcctgccagccatgcgactgcagcggcaacggtgaccccaacttgctcttcagcgactgcgaccccctgacgggcgcctgccgtggctgcctgcgccacaccactgggccccgctgcgagatctgtgcccccggcttctacggcaacgccctgctgcccggcaactgcacccggtgcgactgtaccccatgtgggacagaggcctgcgacccccacagcgggcactgcctgtgcaaggcgggcgtgactgggcggcgctgtgaccgctgccaggagggacattttggtttcaatggctgcgggggctgccgcccgtgtgcttgtggaccggccgccgagggctccgagtgccacccccagagcggacagtgccactgccgaccagggaccatgggaccccagtgccgcgagtgtgcccctggctactgggggctccctgagcagggctgcaggcgctgccagtgccctgggggccgctgtgaccctcacacgggccgctgcaactgccccccggggctcagcggggagcgctgcgacacctgcagccagcagcatcaggtgcctgttccaggcgggcctgtgggccacagcatccactgtgaagtgtgtgaccactgtgtggtcctgctcctggatgacctggaacgggccggcgccctcctccccgccattcacgagcaactgcgtggcatcaatgccagctccatggcctgggcccgtctgcacaggctgaacgcctccatcgctgacctgcagagccagctccggagccccctgggcccccgccatgagacggcacagcagctggaggtgctggagcagcagagcacaagcctcgggcaggacgcacggcggctaggcggccaggccgtggggacccgagaccaggcgagccaattgctggccggcaccgaggccacactgggccatgcgaagacgctgttggcggccatccgggctgtggaccgcaccctgagcgagctcatgtcccagacgggccacctggggctggccaatgcctcggctccatcaggtgagcagctgctccggacactggccgaggtggagcggctgctctgggagatgcgggcccgggacctgggggccccgcaggcagcagctgaggctgagttggctgcagcacagagattgctggcccgggtgcaggagcagctgagcagcctctgggaggagaaccaggcactggccacacaaacccgcgaccggctggcccagcacgaggccggcctcatggacctgcgagaggctttgaaccgggcagtggacgccacacgggaggcccaggagctcaacagccgcaaccaggagcgcctggaggaagccctgcaaaggaagcaggagctgtcccgggacaatgccaccctgcaggccactctgcatgcggctagggacaccctggccagcgtcttcagattgctgcacagcctggaccaggctaaggaggagctggagcgcctcgccgccagcctggatggggctcggaccccactgctgcagaggatgcagaccttctccccggcgggcagcaagctgcgtctagtggaggccgccgaggcccacgcacagcagctgggccagctggcactcaatctgtccagcatcatcctggacgtcaaccaggaccgcctcacccagagggccatcgaggcctccaacgcctacagccgcatcctgcaggccgtgcaggctgccgaggatgctgctggccaggccctgcagcaggcggaccacacgtgggcgacggtggtgcggcagggcctggtggaccgagcccagcagctcctggccaacagcactgcactagaagaggccatgctccaggaacagcagaggctgggccttgtgtgggctgccctccagggtgccaggacccagctccgagatgtccgggccaagaaggaccagctggaggcgcacatccaggcggcgcaggccatgcttgccatggacacagacgagacaagcaagaagatcgcacatgccaaggctgtggctgctgaagcccaggacaccgccacccgtgtgcagtcccagctgcaggccatgcaggagaatgtggagcggtggcagggccagtacgagggcctgcggggccaggacctgggccaggcagtgcttgacgcaggccactcagtgtccaccctggagaagacgctgccccagctgctggccaagctgagcatcctggagaaccgtggggtgcacaacgccagcctggccctgtccgccagcattggccgcgtgcgagagctcattgcccaggcccggggggctgccagtaaggtcaaggtgcccatgaagttcaacgggcgctcaggggtgcagctgcgcaccccacgggatcttgccgaccttgctgcctacactgccctcaagttctacctgcagggcccagagcctgagcctgggcagggtaccgaggatcgctttgtgatgtacatgggcagccgccaggccactggggactacatgggtgtgtctctgcgtgacaagaaggtgcactgggtgtatcagctgggtgaggcgggccctgcagtcctaagcatcgatgaggacattggggagcagttcgcagctgtcagcctggacaggactctccagtttggccacatgtccgtcacagtggagagacagatgatccaggaaaccaagggtgacacggtggcccctggggcagaggggctgctcaacctgcggccagacgacttcgtcttctacgtcggggggtaccccagtaccttcacgccccctcccctgcttcgcttccccggctaccggggctgcatcgagatggacacgctgaatgaggaggtggtcagcctctacaacttcgagaggaccttccagctggacacggctgtggacaggccttgtgcccgctccaagtcgaccggggacccgtggctcacggacggctcctacctggacggcaccggcttcgcccgcatcagcttcgacagtcagatcagcaccaccaagcgcttcgagcaggagctgcggctcgtgtcctacagcggggtgctcttcttcctgaagcagcagagccagttcctgtgcttggccgtgcaagaaggcagcctcgtgctgttgtatgactttggggctggcctgaaaaaggccgtcccactgcagcccccaccgcccctgacctcggccagcaaggcgatccaggtgttcctgctggggggcagccgcaagcgtgtgctggtgcgtgtggagcgggccacggtgtacagcgtggagcaggacaatgatctggagctggccgacgcctactacctggggggcgtgccgcccgaccagctgcccccgagcctgcgatggctcttccccaccggaggctcagtccgtggctgcgtcaaaggcatcaaggccctgggcaagtatgtggacctcaagcggctgaacacgacaggcgtgagcgccggctgcaccgccgacctgctggtggggcgcgccatgactttccatggccacggcttccttcgcctggcgctctcgaacgtggcaccgctcactggcaacgtctactccggcttcggcttccacagcgcccaggacagtgccctgctctactaccgggcgtccccggatgggctatgccaggtgtccctgcagcagggccgtgtgagcctacagctcctgaggactgaagtgaaaactcaagcgggcttcgccgatggtgccccccattacgtcgccttctacagcaatgccacgggagtctggctgtatgtcgatgaccagctccagcagatgaagccccaccggggaccaccccccgagctccagccgcagcctgaggggcccccgaggctcctcctgggaggcctgcctgagtctggcaccatttacaacttcagtggctgcatcagcaacgtcttcgtgcagcggctcctgggcccacagcgcgtatttgatctgcagcagaacctgggcagcgtcaatgtgagcacgggctgtgcacccgccctgcaagcccagaccccgggcctggggcctagaggactgcaggccaccgcccggaaggcctcccgccgcagccgtcagcccgcccggcatcctgcctgcatgctgcccccacacctcaggaccacccgagactcctaccagtttgggggttccctgtccagtcacctggagtttgtgggcatcctggcccgacataggaactggcccagtctctccatgcacgtcctcccgcgaagctcccgaggcctcctcctcttcactgcccgtctgaggcccggcagcccctccctggcgctcttcctgagcaatggccacttcgttgcacagatggaaggcctcgggactcggctccgcgcccagagccgccagcgctcccggcctggccgctggcacaaggtctccgtgcgctgggagaagaaccggatcctgctggtgacggacggggcccgggcctggagccaggaggggccgcaccggcagcaccagggggcagagcacccccagccccacaccctctttgtgggcggcctcccggccagcagccacagctccaaacttccggtgaccgtcgggttcagcggctgtgtgaagagactgaggctgcacgggaggcccctgggggcccccacacggatggcaggggtcacaccctgcatcttgggccccctggaggcgggcctgttcttcccaggcagcgggggagttatcactttagacctcccaggagctacactgcctgatgtgggcctggaactggaggtgcggcccctggcagtcaccggactgatcttccacttgggccaggcccggacgcccccctacttgcagttgcaggtgaccgagaagcaagtcctgctgcgggcggatgacggagcaggggagttctccacgtcagtgacccgcccctcagtgctgtgtgatggccagtggcaccggctagcggcgtgggccccttgctggcggctgcagctggtgccccagcccctctgtacctcgggggcctgcctgagcccatggccgtgcagccctggccccccgcctactgcggctgcatgaggaggctggcggtgaaccggtcccccgtcgccatgactcgctctgtggaggtccacggggcagtgggggccagtggctgcccagccgcctaggacacagccaaccccggcccctggtcaggcccctgcagctgcctcacaccgccccttgtgctcgcctcataggtgtctatttggactctaagctctacgggtgacagatcttgtttctgaagatggtttaagttatagcttcttaaacgaaagaataaaatactgcaaaatgtttttatatttggcccttccacccatttttaattgtgagagatttgtcaccaatcatcactggttcctccttaaaaattaaaaagtaacttctgtgtaa

SEQ ID NO: 406195 - DNA, 11261 bp, Homo sapiens
ggggacgcggcccggagccgggaagatggcgaagcggctctgcgcggggagcgcactgtgtgttcgcggcccccggggccccgcgccgctgctgctggtcgggctggcgctgctgggcgcggcgcgggcgcgggaggaggcgggcggcggcttcagcctgcacccgccctacttcaacctggccgagggcgcccgcatcgccgcctccgcgacctgcggagaggaggccccggcgcgcggctccccgcgccccaccgaggacctttactgcaagctggtagggggccccgtggccggcggcgaccccaaccagaccatccggggccagtactgtgacatctgcacggctgccaacagcaacaaggcacaccccgcgagcaatgccatcgatggcacggagcgctggtggcagagtccaccgctgtcccgcggcctggagtacaacgaggtcaacgtcaccctggacctgggccaggtcttccacgtggcctacgtcctcatcaagtttgccaactcaccccggccggacctctgggtgctggagcggtccatggacttcggccgcacctaccagccctggcagttctttgcctcctccaagagggactgtctggagcggttcgggccacagacgctggagcgcatcacacgggacgacgcggccatctgcaccaccgagtactcacgcatcgtgcccctggagaacggagagatcgtggtgtccctggtgaacggacgtccgggcgccatgaatttctcctactcgccgctgctacgtgagttcaccaaggccaccaacgtccgcctgcgcttcctgcgtaccaacacgctgctgggccatctcatggggaaggcgctgcgggaccccacggtcacccgccggtattattacagcatcaaggatatcagcatcggaggccgctgtgtctgccacggccacgcggatgcctgcgatgccaaagaccccacggacccgttcaggctgcagtgcacctgccagcacaacacctgcgggggcacctgcgaccgctgctgccccggcttcaatcagcagccgtggaagcctgcgactgccaacagtgccaacgagtgccagtcctgtaactgctacggccatgccaccgactgttactacgaccctgaggtggaccggcgccgcgccagccagagcctggatggcacctatcagggtgggggtgtctgtatcgactgccagcaccacaccgccggcgtcaactgtgagcgctgcctgcccggcttctaccgctctcccaaccaccctctcgactcgccccacgtctgccgccgctgcaactgcgagtccgacttcacggatggcacctgcgaggacctgacgggtcgatgctactgccggcccaacttctctggggagcggtgtgacgtgtgtgccgagggcttcacgggcttcccaagctgctacccgacgccctcgtcctccaatgacaccagggagcaggtgctgccagccggccagattgtgaattgtgactgcagcgcggcagggacccagggcaacgcctgccggaaggacccaagggtgggacgctgtctgtgcaaacccaacttccaaggcacccattgtgagctctgcgcgccagggttctacggccccggctgccagccctgccagtgttccagccctggagtggccgatgaccgctgtgaccctgacacaggccagtgcaggtgccgagtgggcttcgagggggccacatgtgatcgctgtgcccccggctactttcacttccctctctgccagttgtgtggctgcagccctgcaggaaccttgcccgagggctgcgatgaggccggccgctgcctatgccagcctgagtttgctggacctcattgtgaccggtgccgccctggctaccatggtttccccaactgccaagcatgcacctgcgaccctcggggagccctggaccagctctgtggggcgggaggtttgtgccgctgccgccccggctacacaggcactgcctgccaggaatgcagccccggctttcacggcttccccagctgtgtcccctgccactgctctgctgaaggctccctgcacgcagcctgtgacccccggagtgggcagtgcagctgccggccccgtgtgacggggctgcggtgtgacacatgtgtgcccggtgcctacaacttcccctactgcgaagctggctcttgccaccctgccggtctggccccagtggatcctgcccttcctgaggcacaggttccctgtatgtgccgggctcacgtggaggggccgagctgtgaccgctgcaaacctgggttctggggactgagccccagcaaccccgagggctgtacccgctgcagctgcgacctcaggggcacactgggtggagttgctgagtgccagccgggcaccggccagtgcttctgcaagccccacgtgtgcggccaggcctgcgcgtcctgcaaggatggcttctttggactggatcaggctgactattttggctgccgcagctgccggtgtgacattggcggtgcactgggccagagctgtgaaccgaggacgggcgtctgccggtgccgccccaacacccagggccccacctgcagcgagcctgcgagggaccactacctcccggacctgcaccacctgcgcctggagctggaggaggctgccacacctgagggtcacgccgtgcgctttggcttcaaccccctcgagttcgagaacttcagctggaggggctacgcgcagatggcacctgtccagcccaggatcgtggccaggctgaacctgacctcccctgaccttttctggctcgtcttccgatacgtcaaccggggggccatgagtgtgagcgggcgggtctctgtgcgagaggagggcaggtcggccacctgcgccaactgcacagcacagagtcagcccgtggccttcccacccagcacggagcctgccttcatcaccgtgccccagaggggcttcggagagccctttgtgctgaaccctggcacctgggccctgcgtgtggaggccgaaggggtgctcctggactacgtggttctgctgcctagcgcatactacgaggcggcgctcctgcagctgcgggtgactgaggcctgcacataccgtccctctgcccagcagtctggcgacaactgcctcctctacacacacctccccctggatggcttcccctcggccgccgggctggaggccctgtgtcgccaggacaacagcctgccccggccctgccccacggagcagctcagcccgtcgcacccgccactgatcacctgcacgggcagtgatgtggacgtccagcttcaagtggcagtgccacagccaggccgctatgccctagtggtggagtacgccaatgaggatgcccgccaggaggtgggcgtggccgtgcacaccccacagcgggccccccagcaggggctgctctccctgcacccctgcctgtacagcaccctgtgccggggcactgcccgggatacccaggaccacctggctgtcttccacctggactcggaggccagcgtgaggctcacagccgagcaggcacgcttcttcctgcacggggtcactctggtgcccattgaggagttcagcccggagttcgtggagccccgggtcagctgcatcagcagccacggcgcctttggccccaacagtgccgcctgtctgccctcgcgcttcccaaagccgccccagcccatcatcctcagggactgccaggtgatcccgctgccgcccggcctcccgctgacccacgcgcaggatctcactccagccatgtccccagctggaccccgacctcggccccccaccgctgtggaccctgatgcagagcccaccctgctgcgtgagccccaggccaccgtggtcttcaccacccatgtgcccacgctgggccgctatgccttcctgctgcacggctaccagccagcccaccccaccttccccgtggaagtcctcatcaacgccggccgcgtgtggcagggccacgccaacgccagcttctgtccacatggctacggctgccgcaccctggtggtgtgtgagggccaggccctgctggacgtgacccacagcgagctcactgtgaccgtgcgtgtgcccgagggccggtggctctggctggattatgtactcgtggtccctgagaacgtctacagctttggctacctccgggaggagcccctggataaatcctatgacttcatcagccactgcgcagcccagggctaccacatcagccccagcagctcatccctgttctgccgaaacgctgctgcttccctctccctcttctataacaacggagcccgtccatgtggctgccacgaagtaggtgctacaggccccacgtgtgagcccttcgggggccagtgtccctgccatgcccatgtcattggccgtgactgctcccgctgtgccaccggatactggggcttccccaactgcaggccctgtgactgcggtgcccgcctctgtgacgagctcacgggccagtgcatctgcccgccacgcaccatcccgcccgactgcctgctgtgccagccccagacctttggctgccaccccctggtcggctgtgaggagtgtaactgctcagggcccggcatccaggagctcacagaccctacctgtgacacagacagcggccagtgcaagtgcagacccaacgtgactgggcgccgctgtgatacctgctctccgggcttccatggctacccccgctgccgcccctgtgactgtcacgaggcgggcactgcgcctggcgtgtgtgaccccctcacagggcagtgctactgtaaggagaacgtgcagggccccaaatgtgaccagtgcagccttgggaccttctcactggatgctgccaaccccaaaggttgcacccgctgcttctgctttggggccacggagcgctgccggagctcgtcctacacccgccaggagttcgtggatatggagggatgggtgctgctgagcactgaccggcaggtggtgccccacgagcggcagccagggacggagatgctccgtgcagacctgcggcacgtgcctgaggctgtgcccgaggctttccccgagctgtactggcaggccccaccctcctacctgggggaccgggtgtcatcctacggtgggaccctccgttatgaactgcactcagagacccagcggggagatgtctttgtccccatggagagcaggccggatgtggtgctgcagggcaaccagatgagcatcacattcctggagccggcataccccacgcctggccacgttcaccgtgggcagctgcagctggtggaggggaacttccggcatacggagactcgcaacactgtgtcccgcgaggagctcatgatggtgctggccagcctggagcagctgcagatccgtgccctcttctcacagatctcctcggctgtctccctgcgcagggtggcactggaggtggccagcccagcaggccagggggccctggccagcaatgtggagctgtgcctgtgccccgccagctaccggggggactcatgccaggaatgtgcccccggcttctatcgggacgtcaaaggtctcttcctgggccgatgtgtcccttgtcagtgccatggacactcagaccgctgcctccctggctctggcgtctgtgtggactgccagcacaacaccgaaggggcccactgtgagcgctgccaggctggcttcatgagcagcagggacgaccccagcgccccctgtgtcagctgcccctgccccctctcagtgccttccaacaacttcgccgagggctgtgtcctgcgaggcggccgcacccagtgcctctgcaaacctggttatgcaggtgcctcctgcgagcggtgtgcgcccggattctttgggaacccactggtgctgggcagctcctgccagccatgcgactgcagcggcaacggtgaccccaacttgctcttcagcgactgcgaccccctgacgggcgcctgccgtggctgcctgcgccacaccactgggccccgctgcgagatctgtgcccccggcttctacggcaacgccctgctgcccggcaactgcacccggtgcgactgtaccccatgtgggacagaggcctgcgacccccacagcgggcactgcctgtgcaaggcgggcgtgactgggcggcgctgtgaccgctgccaggagggacattttggtttcaatggctgcgggggctgccgcccgtgtgcttgtggaccggccgccgagggctccgagtgccacccccagagcggacagtgccactgccgaccagggaccatgggaccccagtgccgcgagtgtgcccctggctactgggggctccctgagcagggctgcaggcgctgccagtgccctgggggccgctgtgaccctcacacgggccgctgcaactgccccccggggctcagcggggagcgctgcgacacctgcagccagcagcatcaggtgcctgttccaggcgggcctgtgggccacagcatccactgtgaagtgtgtgaccactgtgtggtcctgctcctggatgacctggaacgggccggcgccctcctccccgccattcacgagcaactgcgtggcatcaatgccagctccatggcctgggcccgtctgcacaggctgaacgcctccatcgctgacctgcagagccagctccggagccccctgggcccccgccatgagacggcacagcagctggaggtgctggagcagcagagcacaagcctcgggcaggacgcacggcggctaggcggccaggccgtggggacccgagaccaggcgagccaattgctggccggcaccgaggccacactgggccatgcgaagacgctgttggcggccatccgggctgtggaccgcaccctgagcgagctcatgtcccagacgggccacctggggctggccaatgcctcggctccatcaggtgagcagctgctccggacactggccgaggtggagcggctgctctgggagatgcgggcccgggacctgggggccccgcaggcagcagctgaggctgagttggctgcagcacagagattgctggcccgggtgcaggagcagctgagcagcctctgggaggagaaccaggcactggccacacaaacccgcgaccggctggcccagcacgaggccggcctcatggacctgcgagaggctttgaaccgggcagtggacgccacacgggaggcccaggagctcaacagccgcaaccaggagcgcctggaggaagccctgcaaaggaagcaggagctgtcccgggacaatgccaccctgcaggccactctgcatgcggctagggacaccctggccagcgtcttcagattgctgcacagcctggaccaggctaaggaggagctggagcgcctcgccgccagcctggatggggctcggaccccactgctgcagaggatgcagaccttctccccggcgggcagcaagctgcgtctagtggaggccgccgaggcccacgcacagcagctgggccagctggcactcaatctgtccagcatcatcctggacgtcaaccaggaccgcctcacccagagggccatcgaggcctccaacgcctacagccgcatcctgcaggccgtgcaggctgccgaggatgctgctggccaggccctgcagcaggcggaccacacgtgggcgacggtggtgcggcagggcctggtggaccgagcccagcagctcctggccaacagcactgcactagaagaggccatgctccaggaacagcagaggctgggccttgtgtgggctgccctccagggtgccaggacccagctccgagatgtccgggccaagaaggaccagctggaggcgcacatccaggcggcgcaggccatgcttgccatggacacagacgagacaagcaagaagatcgcacatgccaaggctgtggctgctgaagcccaggacaccgccacccgtgtgcagtcccagctgcaggccatgcaggagaatgtggagcggtggcagggccagtacgagggcctgcggggccaggacctgggccaggcagtgcttgacgcaggccactcagtgtccaccctggagaagacgctgccccagctgctggccaagctgagcatcctggagaaccgtggggtgcacaacgccagcctggccctgtccgccagcattggccgcgtgcgagagctcattgcccaggcccggggggctgccagtaaggtcaaggtgcccatgaagttcaacgggcgctcaggggtgcagctgcgcaccccacgggatcttgccgaccttgctgcctacactgccctcaagttctacctgcagggcccagagcctgagcctgggcagggtaccgaggatcgctttgtgatgtacatgggcagccgccaggccactggggactacatgggtgtgtctctgcgtgacaagaaggtgcactgggtgtatcagctgggtgaggcgggccctgcagtcctaagcatcgatgaggacattggggagcagttcgcagctgtcagcctggacaggactctccagtttggccacatgtccgtcacagtggagagacagatgatccaggaaaccaagggtgacacggtggcccctggggcagaggggctgctcaacctgcggccagacgacttcgtcttctacgtcggggggtaccccagtaccttcacgccccctcccctgcttcgcttccccggctaccggggctgcatcgagatggacacgctgaatgaggaggtggtcagcctctacaacttcgagaggaccttccagctggacacggctgtggacaggccttgtgcccgctccaagtcgaccggggacccgtggctcacggacggctcctacctggacggcaccggcttcgcccgcatcagcttcgacagtcagatcagcaccaccaagcgcttcgagcaggagctgcggctcgtgtcctacagcggggtgctcttcttcctgaagcagcagagccagttcctgtgcttggccgtgcaagaaggcagcctcgtgctgttgtatgactttggggctggcctgaaaaaggccgtcccactgcagcccccaccgcccctgacctcggccagcaaggcgatccaggtgttcctgctggggggcagccgcaagcgtgtgctggtgcgtgtggagcgggccacggtgtacagcgtggagcaggacaatgatctggagctggccgacgcctactacctggggggcgtgccgcccgaccagctgcccccgagcctgcgatggctcttccccaccggaggctcagtccgtggctgcgtcaaaggcatcaaggccctgggcaagtatgtggacctcaagcggctgaacacgacaggcgtgagcgccggctgcaccgccgacctgctggtggggcgcgccatgactttccatggccacggcttccttcgcctggcgctctcgaacgtggcaccgctcactggcaacgtctactccggcttcggcttccacagcgcccaggacagtgccctgctctactaccgggcgtccccggatgggctatgccaggtgtccctgcagcagggccgtgtgagcctacagctcctgaggactgaagtgaaaactcaagcgggcttcgccgatggtgccccccattacgtcgccttctacagcaatgccacgggagtctggctgtatgtcgatgaccagctccagcagatgaagccccaccggggaccaccccccgagctccagccgcagcctgaggggcccccgaggctcctcctgggaggcctgcctgagtctggcaccatttacaacttcagtggctgcatcagcaacgtcttcgtgcagcggctcctgggcccacagcgcgtatttgatctgcagcagaacctgggcagcgtcaatgtgagcacgggctgtgcacccgccctgcaagcccagaccccgggcctggggcctagaggactgcaggccaccgcccggaaggcctcccgccgcagccgtcagcccgcccggcatcctgcctgcatgctgcccccacacctcaggaccacccgagactcctaccagtttgggggttccctgtccagtcacctggagtttgtgggcatcctggcccgacataggaactggcccagtctctccatgcacgtcctcccgcgaagctcccgaggcctcctcctcttcactgcccgtctgaggcccggcagcccctccctggcgctcttcctgagcaatggccacttcgttgcacagatggaaggcctcgggactcggctccgcgcccagagccgccagcgctcccggcctggccgctggcacaaggtctccgtgcgctgggagaagaaccggatcctgctggtgacggacggggcccgggcctggagccaggaggggccgcaccggcagcaccagggggcagagcacccccagccccacaccctctttgtgggcggcctcccggccagcagccacagctccaaacttccggtgaccgtcgggttcagcggctgtgtgaagagactgaggctgcacgggaggcccctgggggcccccacacggatggcaggggtcacaccctgcatcttgggccccctggaggcgggcctgttcttcccaggcagcgggggagttatcactttagacctcccaggagctacactgcctgatgtgggcctggaactggaggtgcggcccctggcagtcaccggactgatcttccacttgggccaggcccggacgcccccctacttgcagttgcaggtgaccgagaagcaagtcctgctgcgggcggatgacggagcaggggagttctccacgtcagtgacccgcccctcagtgctgtgtgatggccagtggcaccggctagcggtgatgaaaagcgggaatgtgctccggctggaggtggacgcgcagagcaaccacaccgtgggccccttgctggcggctgcagctggtgccccagcccctctgtacctcgggggcctgcctggctgcccagccgcctaggacacagccaaccccggcccctggtcaggcccctgcagctgcctcacaccgccccttgtgctcgcctcataggtgtctatttggactctaagctctacgggtgacagatcttgtttctgaagatggtttaagttatagcttcttaaacgaaagaataaaatactgcaaaatgtttttatatttggcccttccacccatttttaattgtgagagatttgtcaccaatcatcactggttcctccttaaaaattaaaaagtaacttctgtgtaa

SEQ ID NO: 406196 - DNA, 10367 bp, Homo sapiens
  misc_feature (10329)..(10329): n is a, c, g, or t
  misc_feature (10353)..(10353): n is a, c, g, or t
  misc_feature (10356)..(10356): n is a, c, g, or t
ggggacgcggcccggagccgggaagatggcgaagcggctctgcgcggggagcgcactgtgtgttcgcggcccccggggccccgcgccgctgctgctggtcgggctggcgctgctgggcgcggcgcgggcgcgggaggaggcgggcggcggcttcagcctgcacccgccctacttcaacctggccgagggcgcccgcatcgccgcctccgcgacctgcggagaggaggccccggcgcgcggctccccgcgccccaccgaggacctttactgcaagctggtagggggccccgtggccggcggcgaccccaaccagaccatccggggccagtactgtgacatctgcacggctgccaacagcaacaaggcacaccccgcgagcaatgccatcgatggcacggagcgctggtggcagagtccaccgctgtcccgcggcctggagtacaacgaggtcaacgtcaccctggacctgggccaggtcttccacgtggcctacgtcctcatcaagtttgccaactcaccccggccggacctctgggtgctggagcggtccatggacttcggccgcacctaccagccctggcagttctttgcctcctccaagagggactgtctggagcggttcgggccacagacgctggagcgcatcacacgggacgacgcggccatctgcaccaccgagtactcacgcatcgtgcccctggagaacggagagatcgtggtgtccctggtgaacggacgtccgggcgccatgaatttctcctactcgccgctgctacgtgagttcaccaaggccaccaacgtccgcctgcgcttcctgcgtaccaacacgctgctgggccatctcatggggaaggcgctgcgggaccccacggtcacccgccggtattattacagcatcaaggatatcagcatcggaggccgctgtgtctgccacggccacgcggatgcctgcgatgccaaagaccccacggacccgttcaggctgcagtgcacctgccagcacaacacctgcgggggcacctgcgaccgctgctgccccggcttcaatcagcagccgtggaagcctgcgactgccaacagtgccaacgagtgccagtcctgtaactgctacggccatgccaccgactgttactacgaccctgaggtggaccggcgccgcgccagccagagcctggatggcacctatcagggtgggggtgtctgtatcgactgccagcaccacaccgccggcgtcaactgtgagcgctgcctgcccggcttctaccgctctcccaaccaccctctcgactcgccccacgtctgccgccgctgcaactgcgagtccgacttcacggatggcacctgcgaggacctgacgggtcgatgctactgccggcccaacttctctggggagcggtgtgacgtgtgtgccgagggcttcacgggcttcccaagctgctacccgacgccctcgtcctccaatgacaccagggagcaggtgctgccagccggccagattgtgaattgtgactgcagcgcggcagggacccagggcaacgcctgccggaaggacccaagggtgggacgctgtctgtgcaaacccaacttccaaggcacccattgtgagctctgcgcgccagggttctacggccccggctgccagccctgccagtgttccagccctggagtggccgatgaccgctgtgaccctgacacaggccagtgcaggtgccgagtgggcttcgagggggccacatgtgatcgctgtgcccccggctactttcacttccctctctgccagttgtgtggctgcagccctgcaggaaccttgcccgagggctgcgatgaggccggccgctgcctatgccagcctgagtttgctggacctcattgtgaccggtgccgccctggctaccatggtttccccaactgccaagcatgcacctgcgaccctcggggagccctggaccagctctgtggggcgggaggtttgtgccgctgccgccccggctacacaggcactgcctgccaggaatgcagccccggctttcacggcttccccagctgtgtcccctgccactgctctgctgaaggctccctgcacgcagcctgtgacccccggagtgggcagtgcagctgccggccccgtgtgacggggctgcggtgtgacacatgtgtgcccggtgcctacaacttcccctactgcgaagctggctcttgccaccctgccggtctggccccagtggatcctgcccttcctgaggcacaggttccctgtatgtgccgggctcacgtggaggggccgagctgtgaccgctgcaaacctgggttctggggactgagccccagcaaccccgagggctgtacccgctgcagctgcgacctcaggggcacactgggtggagttgctgagtgccagccgggcaccggccagtgcttctgcaagccccacgtgtgcggccaggcctgcgcgtcctgcaaggatggcttctttggactggatcaggctgactattttggctgccgcagctgccggtgtgacattggcggtgcactgggccagagctgtgaaccgaggacgggcgtctgccggtgccgccccaacacccagggccccacctgcagcgagcctgcgagggaccactacctcccggacctgcaccacctgcgcctggagctggaggaggctgccacacctgagggtcacgccgtgcgctttggcttcaaccccctcgagttcgagaacttcagctggaggggctacgcgcagatggcacctgtccagcccaggatcgtggccaggctgaacctgacctcccctgaccttttctggctcgtcttccgatacgtcaaccggggggccatgagtgtgagcgggcgggtctctgtgcgagaggagggcaggtcggccacctgcgccaactgcacagcacagagtcagcccgtggccttcccacccagcacggagcctgccttcatcaccgtgccccagaggggcttcggagagccctttgtgctgaaccctggcacctgggccctgcgtgtggaggccgaaggggtgctcctggactacgtggttctgctgcctagcgcatactacgaggcggcgctcctgcagctgcgggtgactgaggcctgcacataccgtccctctgcccagcagtctggcgacaactgcctcctctacacacacctccccctggatggcttcccctcggccgccgggctggaggccctgtgtcgccaggacaacagcctgccccggccctgccccacggagcagctcagcccgtcgcacccgccactgatcacctgcacgggcagtgatgtggacgtccagcttcaagtggcagtgccacagccaggccgctatgccctagtggtggagtacgccaatgaggatgcccgccaggaggtgggcgtggccgtgcacaccccacagcgggccccccagcaggggctgctctccctgcacccctgcctgtacagcaccctgtgccggggcactgcccgggatacccaggaccacctggctgtcttccacctggactcggaggccagcgtgaggctcacagccgagcaggcacgcttcttcctgcacggggtcactctggtgcccattgaggagttcagcccggagttcgtggagccccgggtcagctgcatcagcagccacggcgcctttggccccaacagtgccgcctgtctgccctcgcgcttcccaaagccgccccagcccatcatcctcagggactgccaggtgatcccgctgccgcccggcctcccgctgacccacgcgcaggatctcactccagccatgtccccagctggaccccgacctcggccccccaccgctgtggaccctgatgcagagcccaccctgctgcgtgagccccaggccaccgtggtcttcaccacccatgtgcccacgctgggccgctatgccttcctgctgcacggctaccagccagcccaccccaccttccccgtggaagtcctcatcaacgccggccgcgtgtggcagggccacgccaacgccagcttctgtccacatggctacggctgccgcaccctggtggtgtgtgagggccaggccctgctggacgtgacccacagcgagctcactgtgaccgtgcgtgtgcccgagggccggtggctctggctggattatgtactcgtggtccctgagaacgtctacagctttggctacctccgggaggagcccctggataaatcctatgacttcatcagccactgcgcagcccagggctaccacatcagccccagcagctcatccctgttctgccgaaacgctgctgcttccctctccctcttctataacaacggagcccgtccatgtggctgccacgaagtaggtgctacaggccccacgtgtgagcccttcgggggccagtgtccctgccatgcccatgtcattggccgtgactgctcccgctgtgccaccggatactggggcttccccaactgcaggccctgtgactgcggtgcccgcctctgtgacgagctcacgggccagtgcatctgcccgccacgcaccatcccgcccgactgcctgctgtgccagccccagacctttggctgccaccccctggtcggctgtgaggagtgtaactgctcagggcccggcatccaggagctcacagaccctacctgtgacacagacagcggccagtgcaagtgcagacccaacgtgactgggcgccgctgtgatacctgctctccgggcttccatggctacccccgctgccgcccctgtgactgtcacgaggcgggcactgcgcctggcgtgtgtgaccccctcacagggcagtgctactgtaaggagaacgtgcagggccccaaatgtgaccagtgcagccttgggaccttctcactggatgctgccaaccccaaaggttgcacccgctgcttctgctttggggccacggagcgctgccggagctcgtcctacacccgccaggagttcgtggatatggagggatgggtgctgctgagcactgaccggcaggtggtgccccacgagcggcagccagggacggagatgctccgtgcagacctgcggcacgtgcctgaggctgtgcccgaggctttccccgagctgtactggcaggccccaccctcctacctgggggaccgggtgtcatcctacggtgggaccctccgttatgaactgcactcagagacccagcggggagatgtctttgtccccatggagagcaggccggatgtggtgctgcagggcaaccagatgagcatcacattcctggagccggcataccccacgcctggccacgttcaccgtgggcagctgcagctggtggaggggaacttccggcatacggagactcgcaacactgtgtcccgcgaggagctcatgatggtgctggccagcctggagcagctgcagatccgtgccctcttctcacagatctcctcggctgtctccctgcgcagggtggcactggaggtggccagcccagcaggccagggggccctggccagcaatgtggagctgtgcctgtgccccgccagctaccggggggactcatgccaggaatgtgcccccggcttctatcgggacgtcaaaggtctcttcctgggccgatgtgtcccttgtcagtgccatggacactcagaccgctgcctccctggctctggcgtctgtgtggactgccagcacaacaccgaaggggcccactgtgagcgctgccaggctggcttcatgagcagcagggacgaccccagcgccccctgtgtcagctgcccctgccccctctcagtgccttccaacaacttcgccgagggctgtgtcctgcgaggcggccgcacccagtgcctctgcaaacctggttatgcaggtgcctcctgcgagcggtgtgcgcccggattctttgggaacccactggtgctgggcagctcctgccagccatgcgactgcagcggcaacggtgaccccaacttgctcttcagcgactgcgaccccctgacgggcgcctgccgtggctgcctgcgccacaccactgggccccgctgcgagatctgtgcccccggcttctacggcaacgccctgctgcccggcaactgcacccggtgcgactgtaccccatgtgggacagaggcctgcgacccccacagcgggcactgcctgtgcaaggcgggcgtgactgggcggcgctgtgaccgctgccaggagggacattttggtttcaatggctgcgggggctgccgcccgtgtgcttgtggaccggccgccgagggctccgagtgccacccccagagcggacagtgccactgccgaccagggaccatgggaccccagtgccgcgagtgtgcccctggctactgggggctccctgagcagggctgcaggcgctgccagtgccctgggggccgctgtgaccctcacacgggccgctgcaactgccccccggggctcagcggggagcgctgcgacacctgcagccagcagcatcaggtgcctgttccaggcgggcctgtgggccacagcatccactgtgaagtgtgtgaccactgtgtggtcctgctcctggatgacctggaacgggccggcgccctcctccccgccattcacgagcaactgcgtggcatcaatgccagctccatggcctgggcccgtctgcacaggctgaacgcctccatcgctgacctgcagagccagctccggagccccctgggcccccgccatgagacggcacagcagctggaggtgctggagcagcagagcacaagcctcgggcaggacgcacggcggctaggcggccaggccgtggggacccgagaccaggcgagccaattgctggccggcaccgaggccacactgggccatgcgaagacgctgttggcggccatccgggctgtggaccgcaccctgagcgagctcatgtcccagacgggccacctggggctggccaatgcctcggctccatcaggtgagcagctgctccggacactggccgaggtggagcggctgctctgggagatgcgggcccgggacctgggggccccgcaggcagcagctgaggctgagttggctgcagcacagagattgctggcccgggtgcaggagcagctgagcagcctctgggaggagaaccaggcactggccacacaaacccgcgaccggctggcccagcacgaggccggcctcatggacctgcgagaggctttgaaccgggcagtggacgccacacgggaggcccaggagctcaacagccgcaaccaggagcgcctggaggaagccctgcaaaggaagcaggagctgtcccgggacaatgccaccctgcaggccactctgcatgcggctagggacaccctggccagcgtcttcagattgctgcacagcctggaccaggctaaggaggagctggagcgcctcgccgccagcctggatggggctcggaccccactgctgcagaggatgcagaccttctccccggcgggcagcaagctgcgtctagtggaggccgccgaggcccacgcacagcagctgggccagctggcactcaatctgtccagcatcatcctggacgtcaaccaggaccgcctcacccagagggccatcgaggcctccaacgcctacagccgcatcctgcaggccgtgcaggctgccgaggatgctgctggccaggccctgcagcaggcggaccacacgtgggcgacggtggtgcggcagggcctggtggaccgagcccagcagctcctggccaacagcactgcactagaagaggccatgctccaggaacagcagaggctgggccttgtgtgggctgccctccagggtgccaggacccagctccgagatgtccgggccaagaaggaccagctggaggcgcacatccaggcggcgcaggccatgcttgccatggacacagacgagacaagcaagaagatcgcacatgccaaggctgtggctgctgaagcccaggacaccgccacccgtgtgcagtcccagctgcaggccatgcaggagaatgtggagcggtggcagggccagtacgagggcctgcggggccaggacctgggccaggcagtgcttgacgcaggccactcagtgtccaccctggagaagacgctgccccagctgctggccaagctgagcatcctggagaaccgtggggtgcacaacgccagcctggccctgtccgccagcattggccgcgtgcgagagctcattgcccaggcccggggggctgccagtaaggtcaaggtgcccatgaagttcaacgggcgctcaggggtgcagctgcgcaccccacgggatcttgccgaccttgctgcctacactgccctcaagttctacctgcagggcccagagcctgagcctgggcagggtaccgaggatcgctttgtgatgtacatgggcagccgccaggccactggggactacatgggtgtgtctctgcgtgacaagaaggtgcactgggtgtatcagctgggtgaggcgggccctgcagtcctaagcatcgatgaggacattggggagcagttcgcagctgtcagcctggacaggactctccagtttggccacatgtccgtcacagtggagagacagatgatccaggaaaccaagggtgacacggtggcccctggggcagaggggctgctcaacctgcggccagacgacttcgtcttctacgtcggggggtaccccagtaccttcacgccccctcccctgcttcgcttccccggctaccggggctgcatcgagatggacacgctgaatgaggaggtggtcagcctctacaacttcgagaggaccttccagctggacacggctgtggacaggccttgtgcccgctccaagtcgaccggggacccgtggctcacggacggctcctacctggacggcaccggcttcgcccgcatcagcttcgacagtcagatcagcaccaccaagcgcttcgagcaggagctgcggctcgtgtcctacagcggggtgctcttcttcctgaagcagcagagccagttcctgtgcttggccgtgcaagaaggcagcctcgtgctgttgtatgactttggggctggcctgaaaaaggccgtcccactgcagcccccaccgcccctgacctcggccagcaaggcgatccaggtgttcctgctggggggcagccgcaagcgtgtgctggtgcgtgtggagcgggccacggtgtacagcgtggagcaggacaatgatctggagctggccgacgcctactacctggggggcgtgccgcccgaccagctgcccccgagcctgcgatggctcttccccaccggaggctcagtccgtggctgcgtcaaaggcatcaaggccctgggcaagtatgtggacctcaagcggctgaacacgacaggcgtgagcgccggctgcaccgccgacctgctggtggggcgcgccatgactttccatggccacggcttccttcgcctggcgctctcgaacgtggcaccgctcactggcaacgtctactccggcttcggcttccacagcgcccaggacagtgccctgctctactaccgggcgtccccggatgggctatgccaggtgtccctgcagcagggccgtgtgagcctacagctcctgaggactgaagtgaaaactcaagcgggcttcgccgatggtgccccccattacgtcgccttctacagcaatgccacgggagtctggctgtatgtcgatgaccagctccagcagatgaagccccaccggggaccaccccccgagctccagccgcagcctgaggggcccccgaggctcctcctgggaggcctgcctgagtctggcaccatttacaacttcagtggctgcatcagcaacgtcttcgtgcagcggctcctgggcccacagcgcgtatttgatctgcagcagaacctgggcagcgtcaatgtgagcacgggctgtgcacccgccctgcaagcccagaccccgggcctggggcctagaggactgcaggccaccgcccggaaggcctcccgccgcagccgtcagcccgcccggcatcctgcctgcatgctgcccccacacctcaggaccacccgagactcctaccagtttgggggttccctgtccagtcacctggagtttgtgggcatcctggcccgacataggaactggcccagtctctccatgcacgtcctcccgcgaagctcccgaggcctcctcctcttcactgcccgtctgaggcccggcagcccctccctggcgctcttcctgagcaatggccacttcgttgcacagatggaaggcctcgggactcggctccgcgcccagagccgccagcgctcccggcctggccgctggcacaagtctcgtcgctggagaagaacggntctgtgtacggcgggccggctgancanagggcgacgga

SEQ ID NO: 406197 - DNA, 10088 bp, Homo sapiens
ggggacgcggcccggagccgggaagatggcgaagcggctctgcgcggggagcgcactgtgtgttcgcggcccccggggccccgcgccgctgctgctggtcgggctggcgctgctgggcgcggcgcgggcgcgggaggaggcgggcggcggcttcagcctgcacccgccctacttcaacctggccgagggcgcccgcatcgccgcctccgcgacctgcggagaggaggccccggcgcgcggctccccgcgccccaccgaggacctttactgcaagctggtagggggccccgtggccggcggcgaccccaaccagaccatccggggccagtactgtgacatctgcacggctgccaacagcaacaaggcacaccccgcgagcaatgccatcgatggcacggagcgctggtggcagagtccaccgctgtcccgcggcctggagtacaacgaggtcaacgtcaccctggacctgggccaggtcttccacgtggcctacgtcctcatcaagtttgccaactcaccccggccggacctctgggtgctggagcggtccatggacttcggccgcacctaccagccctggcagttctttgcctcctccaagagggactgtctggagcggttcgggccacagacgctggagcgcatcacacgggacgacgcggccatctgcaccaccgagtactcacgcatcgtgcccctggagaacggagagatcgtggtgtccctggtgaacggacgtccgggcgccatgaatttctcctactcgccgctgctacgtgagttcaccaaggccaccaacgtccgcctgcgcttcctgcgtaccaacacgctgctgggccatctcatggggaaggcgctgcgggaccccacggtcacccgccggtattattacagcatcaaggatatcagcatcggaggccgctgtgtctgccacggccacgcggatgcctgcgatgccaaagaccccacggacccgttcaggctgcagtgcacctgccagcacaacacctgcgggggcacctgcgaccgctgctgccccggcttcaatcagcagccgtggaagcctgcgactgccaacagtgccaacgagtgccagtcctgtaactgctacggccatgccaccgactgttactacgaccctgaggtggaccggcgccgcgccagccagagcctggatggcacctatcagggtgggggtgtctgtatcgactgccagcaccacaccgccggcgtcaactgtgagcgctgcctgcccggcttctaccgctctcccaaccaccctctcgactcgccccacgtctgccgccgctgcaactgcgagtccgacttcacggatggcacctgcgaggacctgacgggtcgatgctactgccggcccaacttctctggggagcggtgtgacgtgtgtgccgagggcttcacgggcttcccaagctgctacccgacgccctcgtcctccaatgacaccagggagcaggtgctgccagccggccagattgtgaattgtgactgcagcgcggcagggacccagggcaacgcctgccggaaggacccaagggtgggacgctgtctgtgcaaacccaacttccaaggcacccattgtgagctctgcgcgccagggttctacggccccggctgccagccctgccagtgttccagccctggagtggccgatgaccgctgtgaccctgacacaggccagtgcaggtgccgagtgggcttcgagggggccacatgtgatcgctgtgcccccggctactttcacttccctctctgccagttgtgtggctgcagccctgcaggaaccttgcccgagggctgcgatgaggccggccgctgcctatgccagcctgagtttgctggacctcattgtgaccggtgccgccctggctaccatggtttccccaactgccaagcatgcacctgcgaccctcggggagccctggaccagctctgtggggcgggaggtttgtgccgctgccgccccggctacacaggcactgcctgccaggaatgcagccccggctttcacggcttccccagctgtgtcccctgccactgctctgctgaaggctccctgcacgcagcctgtgacccccggagtgggcagtgcagctgccggccccgtgtgacggggctgcggtgtgacacatgtgtgcccggtgcctacaacttcccctactgcgaagctggctcttgccaccctgccggtctggccccagtggatcctgcccttcctgaggcacaggttccctgtatgtgccgggctcacgtggaggggccgagctgtgaccgctgcaaacctgggttctggggactgagccccagcaaccccgagggctgtacccgctgcagctgcgacctcaggggcacactgggtggagttgctgagtgccagccgggcaccggccagtgcttctgcaagccccacgtgtgcggccaggcctgcgcgtcctgcaaggatggcttctttggactggatcaggctgactattttggctgccgcagctgccggtgtgacattggcggtgcactgggccagagctgtgaaccgaggacgggcgtctgccggtgccgccccaacacccagggccccacctgcagcgagcctgcgagggaccactacctcccggacctgcaccacctgcgcctggagctggaggaggctgccacacctgagggtcacgccgtgcgctttggcttcaaccccctcgagttcgagaacttcagctggaggggctacgcgcagatggcacctgtccagcccaggatcgtggccaggctgaacctgacctcccctgaccttttctggctcgtcttccgatacgtcaaccggggggccatgagtgtgagcgggcgggtctctgtgcgagaggagggcaggtcggccacctgcgccaactgcacagcacagagtcagcccgtggccttcccacccagcacggagcctgccttcatcaccgtgccccagaggggcttcggagagccctttgtgctgaaccctggcacctgggccctgcgtgtggaggccgaaggggtgctcctggactacgtggttctgctgcctagcgcatactacgaggcggcgctcctgcagctgcgggtgactgaggcctgcacataccgtccctctgcccagcagtctggcgacaactgcctcctctacacacacctccccctggatggcttcccctcggccgccgggctggaggccctgtgtcgccaggacaacagcctgccccggccctgccccacggagcagctcagcccgtcgcacccgccactgatcacctgcacgggcagtgatgtggacgtccagcttcaagtggcagtgccacagccaggccgctatgccctagtggtggagtacgccaatgaggatgcccgccaggaggtgggcgtggccgtgcacaccccacagcgggccccccagcaggggctgctctccctgcacccctgcctgtacagcaccctgtgccggggcactgcccgggatacccaggaccacctggctgtcttccacctggactcggaggccagcgtgaggctcacagccgagcaggcacgcttcttcctgcacggggtcactctggtgcccattgaggagttcagcccggagttcgtggagccccgggtcagctgcatcagcagccacggcgcctttggccccaacagtgccgcctgtctgccctcgcgcttcccaaagccgccccagcccatcatcctcagggactgccaggtgatcccgctgccgcccggcctcccgctgacccacgcgcaggatctcactccagccatgtccccagctggaccccgacctcggccccccaccgctgtggaccctgatgcagagcccaccctgctgcgtgagccccaggccaccgtggtcttcaccacccatgtgcccacgctgggccgctatgccttcctgctgcacggctaccagccagcccaccccaccttccccgtggaagtcctcatcaacgccggccgcgtgtggcagggccacgccaacgccagcttctgtccacatggctacggctgccgcaccctggtggtgtgtgagggccaggccctgctggacgtgacccacagcgagctcactgtgaccgtgcgtgtgcccgagggccggtggctctggctggattatgtactcgtggtccctgagaacgtctacagctttggctacctccgggaggagcccctggataaatcctatgacttcatcagccactgcgcagcccagggctaccacatcagccccagcagctcatccctgttctgccgaaacgctgctgcttccctctccctcttctataacaacggagcccgtccatgtggctgccacgaagtaggtgctacaggccccacgtgtgagcccttcgggggccagtgtccctgccatgcccatgtcattggccgtgactgctcccgctgtgccaccggatactggggcttccccaactgcaggccctgtgactgcggtgcccgcctctgtgacgagctcacgggccagtgcatctgcccgccacgcaccatcccgcccgactgcctgctgtgccagccccagacctttggctgccaccccctggtcggctgtgaggagtgtaactgctcagggcccggcatccaggagctcacagaccctacctgtgacacagacagcggccagtgcaagtgcagacccaacgtgactgggcgccgctgtgatacctgctctccgggcttccatggctacccccgctgccgcccctgtgactgtcacgaggcgggcactgcgcctggcgtgtgtgaccccctcacagggcagtgctactgtaaggagaacgtgcagggccccaaatgtgaccagtgcagccttgggaccttctcactggatgctgccaaccccaaaggttgcacccgctgcttctgctttggggccacggagcgctgccggagctcgtcctacacccgccaggagttcgtggatatggagggatgggtgctgctgagcactgaccggcaggtggtgccccacgagcggcagccagggacggagatgctccgtgcagacctgcggcacgtgcctgaggctgtgcccgaggctttccccgagctgtactggcaggccccaccctcctacctgggggaccgggtgtcatcctacggtgggaccctccgttatgaactgcactcagagacccagcggggagatgtctttgtccccatggagagcaggccggatgtggtgctgcagggcaaccagatgagcatcacattcctggagccggcataccccacgcctggccacgttcaccgtgggcagctgcagctggtggaggggaacttccggcatacggagactcgcaacactgtgtcccgcgaggagctcatgatggtgctggccagcctggagcagctgcagatccgtgccctcttctcacagatctcctcggctgtctccctgcgcagggtggcactggaggtggccagcccagcaggccagggggccctggccagcaatgtggagctgtgcctgtgccccgccagctaccggggggactcatgccaggaatgtgcccccggcttctatcgggacgtcaaaggtctcttcctgggccgatgtgtcccttgtcagtgccatggacactcagaccgctgcctccctggctctggcgtctgtgtggactgccagcacaacaccgaaggggcccactgtgagcgctgccaggctggcttcatgagcagcagggacgaccccagcgccccctgtgtcagctgcccctgccccctctcagtgccttccaacaacttcgccgagggctgtgtcctgcgaggcggccgcacccagtgcctctgcaaacctggttatgcaggtgcctcctgcgagcggtgtgcgcccggattctttgggaacccactggtgctgggcagctcctgccagccatgcgactgcagcggcaacggtgaccccaacttgctcttcagcgactgcgaccccctgacgggcgcctgccgtggctgcctgcgccacaccactgggccccgctgcgagatctgtgcccccggcttctacggcaacgccctgctgcccggcaactgcacccggtgcgactgtaccccatgtgggacagaggcctgcgacccccacagcgggcactgcctgtgcaaggcgggcgtgactgggcggcgctgtgaccgctgccaggagggacattttggtttcaatggctgcgggggctgccgcccgtgtgcttgtggaccggccgccgagggctccgagtgccacccccagagcggacagtgccactgccgaccagggaccatgggaccccagtgccgcgagtgtgcccctggctactgggggctccctgagcagggctgcaggcgctgccagtgccctgggggccgctgtgaccctcacacgggccgctgcaactgccccccggggctcagcggggagcgctgcgacacctgcagccagcagcatcaggtgcctgttccaggcgggcctgtgggccacagcatccactgtgaagtgtgtgaccactgtgtggtcctgctcctggatgacctggaacgggccggcgccctcctccccgccattcacgagcaactgcgtggcatcaatgccagctccatggcctgggcccgtctgcacaggctgaacgcctccatcgctgacctgcagagccagctccggagccccctgggcccccgccatgagacggcacagcagctggaggtgctggagcagcagagcacaagcctcgggcaggacgcacggcggctaggcggccaggccgtggggacccgagaccaggcgagccaattgctggccggcaccgaggccacactgggccatgcgaagacgctgttggcggccatccgggctgtggaccgcaccctgagcgagctcatgtcccagacgggccacctggggctggccaatgcctcggctccatcaggtgagcagctgctccggacactggccgaggtggagcggctgctctgggagatgcgggcccgggacctgggggccccgcaggcagcagctgaggctgagttggctgcagcacagagattgctggcccgggtgcaggagcagctgagcagcctctgggaggagaaccaggcactggccacacaaacccgcgaccggctggcccagcacgaggccggcctcatggacctgcgagaggctttgaaccgggcagtggacgccacacgggaggcccaggagctcaacagccgcaaccaggagcgcctggaggaagccctgcaaaggaagcaggagctgtcccgggacaatgccaccctgcaggccactctgcatgcggctagggacaccctggccagcgtcttcagattgctgcacagcctggaccaggctaaggaggagctggagcgcctcgccgccagcctggatggggctcggaccccactgctgcagaggatgcagaccttctccccggcgggcagcaagctgcgtctagtggaggccgccgaggcccacgcacagcagctgggccagctggcactcaatctgtccagcatcatcctggacgtcaaccaggaccgcctcacccagagggccatcgaggcctccaacgcctacagccgcatcctgcaggccgtgcaggctgccgaggatgctgctggccaggccctgcagcaggcggaccacacgtgggcgacggtggtgcggcagggcctggtggaccgagcccagcagctcctggccaacagcactgcactagaagaggccatgctccaggaacagcagaggctgggccttgtgtgggctgccctccagggtgccaggacccagctccgagatgtccgggccaagaaggaccagctggaggcgcacatccaggcggcgcaggccatgcttgccatggacacagacgagacaagcaagaagatcgcacatgccaaggctgtggctgctgaagcccaggacaccgccacccgtgtgcagtcccagctgcaggccatgcaggagaatgtggagcggtggcagggccagtacgagggcctgcggggccaggacctgggccaggcagtgcttgacgcaggccactcagtgtccaccctggagaagacgctgccccagctgctggccaagctgagcatcctggagaaccgtggggtgcacaacgccagcctggccctgtccgccagcattggccgcgtgcgagagctcattgcccaggcccggggggctgccagtaaggtcaaggtgcccatgaagttcaacgggcgctcaggggtgcagctgcgcaccccacgggatcttgccgaccttgctgcctacactgccctcaagttctacctgcagggcccagagcctgagcctgggcagggtaccgaggatcgctttgtgatgtacatgggcagccgccaggccactggggactacatgggtgtgtctctgcgtgacaagaaggtgcactgggtgtatcagctgggtgaggcgggccctgcagtcctaagcatcgatgaggacattggggagcagttcgcagctgtcagcctggacaggactctccagtttggccacatgtccgtcacagtggagagacagatgatccaggaaaccaagggtgacacggtggcccctggggcagaggggctgctcaacctgcggccagacgacttcgtcttctacgtcggggggtaccccagtaccttcacgccccctcccctgcttcgcttccccggctaccggggctgcatcgagatggacacgctgaatgaggaggtggtcagcctctacaacttcgagaggaccttccagctggacacggctgtggacaggccttgtgcccgctccaagtcgaccggggacccgtggctcacggacggctcctacctggacggcaccggcttcgcccgcatcagcttcgacagtcagatcagcaccaccaagcgcttcgagcaggagctgcggctcgtgtcctacagcggggtgctcttcttcctgaagcagcagagccagttcctgtgcttggccgtgcaagaaggcagcctcgtgctgttgtatgactttggggctggcctgaaaaaggccgtcccactgcagcccccaccgcccctgacctcggccagcaaggcgatccaggtgttcctgctggggggcagccgcaagcgtgtgctggtgcgtgtggagcgggccacggtgtacagcgtggagcaggacaatgatctggagctggccgacgcctactacctggggggcgtgccgcccgaccagctgcccccgagcctgcgatggctcttccccaccggaggctcagtccgtggctgcgtcaaaggcatcaaggccctgggcaagtatgtggacctcaagcggctgaacacgacaggcgtgagcgccggctgcaccgccgacctgctggtggggcgcgccatgactttccatggccacggcttccttcgcctggcgctctcgaacgtggcaccgctcactggcaacgtctactccggcttcggcttccacagcgcccaggacagtgccctgctctactaccgggcgtccccggatgggctatgccaggtgtccctgcagcagggccgtgtgagcctacagctcctgaggactgaagtgaaaactcaagcgggcttcgccgatggtgccccccattacgtcgccttctacagcaatgccacgggagtctggctgtatgtcgatgaccagctccagcagatgaagccccaccggggaccaccccccgagctccagccgcagcctgaggggcccccgaggctcctcctgggaggcctgcctgagtctggcaccatttacaacttcagtggctggcccagcacgaggccggcctcatggacctgcgagaggctttgaaccgggcagtggacgccacacgggaggcccaggagctcaacaggctgcccagccgcctaggacacagccaaccccggcccctggtcaggcccctgcagctgcctcacaccgccccttgtgctcgcctcataggtgtctatttggactctaagctctacgggtgacagatcttgtttctgaagatggtttaagttatagcttcttaaacgaaagaataaaatactgcaaaatgttttta

SEQ ID NO: 406198 - DNA, 9809 bp, Homo sapiens
ggggacgcggcccggagccgggaagatggcgaagcggctctgcgcggggagcgcactgtgtgttcgcggcccccggggccccgcgccgctgctgctggtcgggctggcgctgctgggcgcggcgcgggcgcgggaggaggcgggcggcggcttcagcctgcacccgccctacttcaacctggccgagggcgcccgcatcgccgcctccgcgacctgcggagaggaggccccggcgcgcggctccccgcgccccaccgaggacctttactgcaagctggtagggggccccgtggccggcggcgaccccaaccagaccatccggggccagtactgtgacatctgcacggctgccaacagcaacaaggcacaccccgcgagcaatgccatcgatggcacggagcgctggtggcagagtccaccgctgtcccgcggcctggagtacaacgaggtcaacgtcaccctggacctgggccaggtcttccacgtggcctacgtcctcatcaagtttgccaactcaccccggccggacctctgggtgctggagcggtccatggacttcggccgcacctaccagccctggcagttctttgcctcctccaagagggactgtctggagcggttcgggccacagacgctggagcgcatcacacgggacgacgcggccatctgcaccaccgagtactcacgcatcgtgcccctggagaacggagagatcgtggtgtccctggtgaacggacgtccgggcgccatgaatttctcctactcgccgctgctacgtgagttcaccaaggccaccaacgtccgcctgcgcttcctgcgtaccaacacgctgctgggccatctcatggggaaggcgctgcgggaccccacggtcacccgccggtattattacagcatcaaggatatcagcatcggaggccgctgtgtctgccacggccacgcggatgcctgcgatgccaaagaccccacggacccgttcaggctgcagtgcacctgccagcacaacacctgcgggggcacctgcgaccgctgctgccccggcttcaatcagcagccgtggaagcctgcgactgccaacagtgccaacgagtgccagtcctgtaactgctacggccatgccaccgactgttactacgaccctgaggtggaccggcgccgcgccagccagagcctggatggcacctatcagggtgggggtgtctgtatcgactgccagcaccacaccgccggcgtcaactgtgagcgctgcctgcccggcttctaccgctctcccaaccaccctctcgactcgccccacgtctgccgccgctgcaactgcgagtccgacttcacggatggcacctgcgaggacctgacgggtcgatgctactgccggcccaacttctctggggagcggtgtgacgtgtgtgccgagggcttcacgggcttcccaagctgctacccgacgccctcgtcctccaatgacaccagggagcaggtgctgccagccggccagattgtgaattgtgactgcagcgcggcagggacccagggcaacgcctgccggaaggacccaagggtgggacgctgtctgtgcaaacccaacttccaaggcacccattgtgagctctgcgcgccagggttctacggccccggctgccagccctgccagtgttccagccctggagtggccgatgaccgctgtgaccctgacacaggccagtgcaggtgccgagtgggcttcgagggggccacatgtgatcgctgtgcccccggctactttcacttccctctctgccagttgtgtggctgcagccctgcaggaaccttgcccgagggctgcgatgaggccggccgctgcctatgccagcctgagtttgctggacctcattgtgaccggtgccgccctggctaccatggtttccccaactgccaagcatgcacctgcgaccctcggggagccctggaccagctctgtggggcgggaggtttgtgccgctgccgccccggctacacaggcactgcctgccaggaatgcagccccggctttcacggcttccccagctgtgtcccctgccactgctctgctgaaggctccctgcacgcagcctgtgacccccggagtgggcagtgcagctgccggccccgtgtgacggggctgcggtgtgacacatgtgtgcccggtgcctacaacttcccctactgcgaagctggctcttgccaccctgccggtctggccccagtggatcctgcccttcctgaggcacaggttccctgtatgtgccgggctcacgtggaggggccgagctgtgaccgctgcaaacctgggttctggggactgagccccagcaaccccgagggctgtacccgctgcagctgcgacctcaggggcacactgggtggagttgctgagtgccagccgggcaccggccagtgcttctgcaagccccacgtgtgcggccaggcctgcgcgtcctgcaaggatggcttctttggactggatcaggctgactattttggctgccgcagctgccggtgtgacattggcggtgcactgggccagagctgtgaaccgaggacgggcgtctgccggtgccgccccaacacccagggccccacctgcagcgagcctgcgagggaccactacctcccggacctgcaccacctgcgcctggagctggaggaggctgccacacctgagggtcacgccgtgcgctttggcttcaaccccctcgagttcgagaacttcagctggaggggctacgcgcagatggcacctgtccagcccaggatcgtggccaggctgaacctgacctcccctgaccttttctggctcgtcttccgatacgtcaaccggggggccatgagtgtgagcgggcgggtctctgtgcgagaggagggcaggtcggccacctgcgccaactgcacagcacagagtcagcccgtggccttcccacccagcacggagcctgccttcatcaccgtgccccagaggggcttcggagagccctttgtgctgaaccctggcacctgggccctgcgtgtggaggccgaaggggtgctcctggactacgtggttctgctgcctagcgcatactacgaggcggcgctcctgcagctgcgggtgactgaggcctgcacataccgtccctctgcccagcagtctggcgacaactgcctcctctacacacacctccccctggatggcttcccctcggccgccgggctggaggccctgtgtcgccaggacaacagcctgccccggccctgccccacggagcagctcagcccgtcgcacccgccactgatcacctgcacgggcagtgatgtggacgtccagcttcaagtggcagtgccacagccaggccgctatgccctagtggtggagtacgccaatgaggatgcccgccaggaggtgggcgtggccgtgcacaccccacagcgggccccccagcaggggctgctctccctgcacccctgcctgtacagcaccctgtgccggggcactgcccgggatacccaggaccacctggctgtcttccacctggactcggaggccagcgtgaggctcacagccgagcaggcacgcttcttcctgcacggggtcactctggtgcccattgaggagttcagcccggagttcgtggagccccgggtcagctgcatcagcagccacggcgcctttggccccaacagtgccgcctgtctgccctcgcgcttcccaaagccgccccagcccatcatcctcagggactgccaggtgatcccgctgccgcccggcctcccgctgacccacgcgcaggatctcactccagccatgtccccagctggaccccgacctcggccccccaccgctgtggaccctgatgcagagcccaccctgctgcgtgagccccaggccaccgtggtcttcaccacccatgtgcccacgctgggccgctatgccttcctgctgcacggctaccagccagcccaccccaccttccccgtggaagtcctcatcaacgccggccgcgtgtggcagggccacgccaacgccagcttctgtccacatggctacggctgccgcaccctggtggtgtgtgagggccaggccctgctggacgtgacccacagcgagctcactgtgaccgtgcgtgtgcccgagggccggtggctctggctggattatgtactcgtggtccctgagaacgtctacagctttggctacctccgggaggagcccctggataaatcctatgacttcatcagccactgcgcagcccagggctaccacatcagccccagcagctcatccctgttctgccgaaacgctgctgcttccctctccctcttctataacaacggagcccgtccatgtggctgccacgaagtaggtgctacaggccccacgtgtgagcccttcgggggccagtgtccctgccatgcccatgtcattggccgtgactgctcccgctgtgccaccggatactggggcttccccaactgcaggccctgtgactgcggtgcccgcctctgtgacgagctcacgggccagtgcatctgcccgccacgcaccatcccgcccgactgcctgctgtgccagccccagacctttggctgccaccccctggtcggctgtgaggagtgtaactgctcagggcccggcatccaggagctcacagaccctacctgtgacacagacagcggccagtgcaagtgcagacccaacgtgactgggcgccgctgtgatacctgctctccgggcttccatggctacccccgctgccgcccctgtgactgtcacgaggcgggcactgcgcctggcgtgtgtgaccccctcacagggcagtgctactgtaaggagaacgtgcagggccccaaatgtgaccagtgcagccttgggaccttctcactggatgctgccaaccccaaaggttgcacccgctgcttctgctttggggccacggagcgctgccggagctcgtcctacacccgccaggagttcgtggatatggagggatgggtgctgctgagcactgaccggcaggtggtgccccacgagcggcagccagggacggagatgctccgtgcagacctgcggcacgtgcctgaggctgtgcccgaggctttccccgagctgtactggcaggccccaccctcctacctgggggaccgggtgtcatcctacggtgggaccctccgttatgaactgcactcagagacccagcggggagatgtctttgtccccatggagagcaggccggatgtggtgctgcagggcaaccagatgagcatcacattcctggagccggcataccccacgcctggccacgttcaccgtgggcagctgcagctggtggaggggaacttccggcatacggagactcgcaacactgtgtcccgcgaggagctcatgatggtgctggccagcctggagcagctgcagatccgtgccctcttctcacagatctcctcggctgtctccctgcgcagggtggcactggaggtggccagcccagcaggccagggggccctggccagcaatgtggagctgtgcctgtgccccgccagctaccggggggactcatgccaggaatgtgcccccggcttctatcgggacgtcaaaggtctcttcctgggccgatgtgtcccttgtcagtgccatggacactcagaccgctgcctccctggctctggcgtctgtgtggactgccagcacaacaccgaaggggcccactgtgagcgctgccaggctggcttcatgagcagcagggacgaccccagcgccccctgtgtcagctgcccctgccccctctcagtgccttccaacaacttcgccgagggctgtgtcctgcgaggcggccgcacccagtgcctctgcaaacctggttatgcaggtgcctcctgcgagcggtgtgcgcccggattctttgggaacccactggtgctgggcagctcctgccagccatgcgactgcagcggcaacggtgaccccaacttgctcttcagcgactgcgaccccctgacgggcgcctgccgtggctgcctgcgccacaccactgggccccgctgcgagatctgtgcccccggcttctacggcaacgccctgctgcccggcaactgcacccggtgcgactgtaccccatgtgggacagaggcctgcgacccccacagcgggcactgcctgtgcaaggcgggcgtgactgggcggcgctgtgaccgctgccaggagggacattttggtttcaatggctgcgggggctgccgcccgtgtgcttgtggaccggccgccgagggctccgagtgccacccccagagcggacagtgccactgccgaccagggaccatgggaccccagtgccgcgagtgtgcccctggctactgggggctccctgagcagggctgcaggcgctgccagtgccctgggggccgctgtgaccctcacacgggccgctgcaactgccccccggggctcagcggggagcgctgcgacacctgcagccagcagcatcaggtgcctgttccaggcgggcctgtgggccacagcatccactgtgaagtgtgtgaccactgtgtggtcctgctcctggatgacctggaacgggccggcgccctcctccccgccattcacgagcaactgcgtggcatcaatgccagctccatggcctgggcccgtctgcacaggctgaacgcctccatcgctgacctgcagagccagctccggagccccctgggcccccgccatgagacggcacagcagctggaggtgctggagcagcagagcacaagcctcgggcaggacgcacggcggctaggcggccaggccgtggggacccgagaccaggcgagccaattgctggccggcaccgaggccacactgggccatgcgaagacgctgttggcggccatccgggctgtggaccgcaccctgagcgagctcatgtcccagacgggccacctggggctggccaatgcctcggctccatcaggtgagcagctgctccggacactggccgaggtggagcggctgctctgggagatgcgggcccgggacctgggggccccgcaggcagcagctgaggctgagttggctgcagcacagagattgctggcccgggtgcaggagcagctgagcagcctctgggaggagaaccaggcactggccacacaaacccgcgaccggctggcccagcacgaggccggcctcatggacctgcgagaggctttgaaccgggcagtggacgccacacgggaggcccaggagctcaacagccgcaaccaggagcgcctggaggaagccctgcaaaggaagcaggagctgtcccgggacaatgccaccctgcaggccactctgcatgcggctagggacaccctggccagcgtcttcagattgctgcacagcctggaccaggctaaggaggagctggagcgcctcgccgccagcctggatggggctcggaccccactgctgcagaggatgcagaccttctccccggcgggcagcaagctgcgtctagtggaggccgccgaggcccacgcacagcagctgggccagctggcactcaatctgtccagcatcatcctggacgtcaaccaggaccgcctcacccagagggccatcgaggcctccaacgcctacagccgcatcctgcaggccgtgcaggctgccgaggatgctgctggccaggccctgcagcaggcggaccacacgtgggcgacggtggtgcggcagggcctggtggaccgagcccagcagctcctggccaacagcactgcactagaagaggccatgctccaggaacagcagaggctgggccttgtgtgggctgccctccagggtgccaggacccagctccgagatgtccgggccaagaaggaccagctggaggcgcacatccaggcggcgcaggccatgcttgccatggacacagacgagacaagcaagaagatcgcacatgccaaggctgtggctgctgaagcccaggacaccgccacccgtgtgcagtcccagctgcaggccatgcaggagaatgtggagcggtggcagggccagtacgagggcctgcggggccaggacctgggccaggcagtgcttgacgcaggccactcagtgtccaccctggagaagacgctgccccagctgctggccaagctgagcatcctggagaaccgtggggtgcacaacgccagcctggccctgtccgccagcattggccgcgtgcgagagctcattgcccaggcccggggggctgccagtaaggtcaaggtgcccatgaagttcaacgggcgctcaggggtgcagctgcgcaccccacgggatcttgccgaccttgctgcctacactgccctcaagttctacctgcagggcccagagcctgagcctgggcagggtaccgaggatcgctttgtgatgtacatgggcagccgccaggccactggggactacatgggtgtgtctctgcgtgacaagaaggtgcactgggtgtatcagctgggtgaggcgggccctgcagtcctaagcatcgatgaggacattggggagcagttcgcagctgtcagcctggacaggactctccagtttggccacatgtccgtcacagtggagagacagatgatccaggaaaccaagggtgacacggtggcccctggggcagaggggctgctcaacctgcggccagacgacttcgtcttctacgtcggggggtaccccagtaccttcacgccccctcccctgcttcgcttccccggctaccggggctgcatcgagatggacacgctgaatgaggaggtggtcagcctctacaacttcgagaggaccttccagctggacacggctgtggacaggccttgtgcccgctccaagtcgaccggggacccgtggctcacggacggctcctacctggacggcaccggcttcgcccgcatcagcttcgacagtcagatcagcaccaccaagcgcttcgagcaggagctgcggctcgtgtcctacagcggggtgctcttcttcctgaagcagcagagccagttcctgtgcttggccgtgcaagaaggcagcctcgtgctgttgtatgactttggggctggcctgaaaaaggccgtcccactgcagcccccaccgcccctgacctcggccagcaaggcgatccaggtgttcctgctggggggcagccgcaagcgtgtgctggtgcgtgtggagcgggccacggtgtacagcgtggagcaggacaatgatctggagctggccgacgcctactacctggggggcgtgccgcccgaccagctgcccccgagcctgcgatggctcttccccaccggaggctcagtccgtggctgcgtcaaaggcatcaaggccctgggcaagtatgtggacctcaagcggctgaacacgacaggcgtgagcgccggctgcaccgccgacctgctggtggggcgcgccatgactttccatggccacggcttccttcgcctggcgctctcgaacgtggcaccgctcactggcaacgtctactccggcttcggcttccacagcgcccaggacagtgccctgctctactaccgggcgtccccggatgggctatgccaggtgtccctgcagcagggccgtgtgagcctacagctcctgaggactgaagtgaaaactcaagcgggcttcgccgatggtgccccccattacgtcgccttctacagcaatgccacgggagtctggctgtatgtcgatgaccagcaccagcacgaattcccttagcaccagcacgaattcccttagcaccagcacgaattcccttagcaccagcacgaattcccttagcaccagcacgaattcccttagcaccagcacgaattccctt

SEQ ID NO: 406199 - DNA, 6182 bp, Homo sapiens
ggggacgcggcccggagccgggaagatggcgaagcggctctgcgcggggagcgcactgtgtgttcgcggcccccggggccccgcgccgctgctgctggtcgggctggcgctgctgggcgcggcgcgggcgcgggaggaggcgggcggcggcttcagcctgcacccgccctacttcaacctggccgagggcgcccgcatcgccgcctccgcgacctgcggagaggaggccccggcgcgcggctccccgcgccccaccgaggacctttactgcaagctggtagggggccccgtggccggcggcgaccccaaccagaccatccggggccagtactgtgacatctgcacggctgccaacagcaacaaggcacaccccgcgagcaatgccatcgatggcacggagcgctggtggcagagtccaccgctgtcccgcggcctggagtacaacgaggtcaacgtcaccctggacctgggccaggtcttccacgtggcctacgtcctcatcaagtttgccaactcaccccggccggacctctgggtgctggagcggtccatggacttcggccgcacctaccagccctggcagttctttgcctcctccaagagggactgtctggagcggttcgggccacagacgctggagcgcatcacacgggacgacgcggccatctgcaccaccgagtactcacgcatcgtgcccctggagaacggagagatcgtggtgtccctggtgaacggacgtccgggcgccatgaatttctcctactcgccgctgctacgtgagttcaccaaggccaccaacgtccgcctgcgcttcctgcgtaccaacacgctgctgggccatctcatggggaaggcgctgcgggaccccacggtcacccgccggtattattacagcatcaaggatatcagcatcggaggccgctgtgtctgccacggccacgcggatgcctgcgatgccaaagaccccacggacccgttcaggctgcagtgcacctgccagcacaacacctgcgggggcacctgcgaccgctgctgccccggcttcaatcagcagccgtggaagcctgcgactgccaacagtgccaacgagtgccagtcctgtaactgctacggccatgccaccgactgttactacgaccctgaggtggaccggcgccgcgccagccagagcctggatggcacctatcagggtgggggtgtctgtatcgactgccagcaccacaccgccggcgtcaactgtgagcgctgcctgcccggcttctaccgctctcccaaccaccctctcgactcgccccacgtctgccgccgctgcaactgcgagtccgacttcacggatggcacctgcgaggacctgacgggtcgatgctactgccggcccaacttctctggggagcggtgtgacgtgtgtgccgagggcttcacgggcttcccaagctgctacccgacgccctcgtcctccaatgacaccagggagcaggtgctgccagccggccagattgtgaattgtgactgcagcgcggcagggacccagggcaacgcctgccggaaggacccaagggtgggacgctgtctgtgcaaacccaacttccaaggcacccattgtgagctctgcgcgccagggttctacggccccggctgccagccctgccagtgttccagccctggagtggccgatgaccgctgtgaccctgacacaggccagtgcaggtgccgagtgggcttcgagggggccacatgtgatcgctgtgcccccggctactttcacttccctctctgccagttgtgtggctgcagccctgcaggaaccttgcccgagggctgcgatgaggccggccgctgcctatgccagcctgagtttgctggacctcattgtgaccggtgccgccctggctaccatggtttccccaactgccaagcatgcacctgcgaccctcggggagccctggaccagctctgtggggcgggaggtttgtgccgctgccgccccggctacacaggcactgcctgccaggaatgcagccccggctttcacggcttccccagctgtgtcccctgccactgctctgctgaaggctccctgcacgcagcctgtgacccccggagtgggcagtgcagctgccggccccgtgtgacggggctgcggtgtgacacatgtgtgcccggtgcctacaacttcccctactgcgaagctggctcttgccaccctgccggtctggccccagtggatcctgcccttcctgaggcacaggttccctgtatgtgccgggctcacgtggaggggccgagctgtgaccgctgcaaacctgggttctggggactgagccccagcaaccccgagggctgtacccgctgcagctgcgacctcaggggcacactgggtggagttgctgagtgccagccgggcaccggccagtgcttctgcaagccccacgtgtgcggccaggcctgcgcgtcctgcaaggatggcttctttggactggatcaggctgactattttggctgccgcagctgccggtgtgacattggcggtgcactgggccagagctgtgaaccgaggacgggcgtctgccggtgccgccccaacacccagggccccacctgcagcgagcctgcgagggaccactacctcccggacctgcaccacctgcgcctggagctggaggaggctgccacacctgagggtcacgccgtgcgctttggcttcaaccccctcgagttcgagaacttcagctggaggggctacgcgcagatggcacctgtccagcccaggatcgtggccaggctgaacctgacctcccctgaccttttctggctcgtcttccgatacgtcaaccggggggccatgagtgtgagcgggcgggtctctgtgcgagaggagggcaggtcggccacctgcgccaactgcacagcacagagtcagcccgtggccttcccacccagcacggagcctgccttcatcaccgtgccccagaggggcttcggagagccctttgtgctgaaccctggcacctgggccctgcgtgtggaggccgaaggggtgctcctggactacgtggttctgctgcctagcgcatactacgaggcggcgctcctgcagctgcgggtgactgaggcctgcacataccgtccctctgcccagcagtctggcgacaactgcctcctctacacacacctccccctggatggcttcccctcggccgccgggctggaggccctgtgtcgccaggacaacagcctgccccggccctgccccacggagcagctcagcccgtcgcacccgccactgatcacctgcacgggcagtgatgtggacgtccagcttcaagtggcagtgccacagccaggccgctatgccctagtggtggagtacgccaatgaggatgcccgccaggaggtgggcgtggccgtgcacaccccacagcgggccccccagcaggggctgctctccctgcacccctgcctgtacagcaccctgtgccggggcactgcccgggatacccaggaccacctggctgtcttccacctggactcggaggccagcgtgaggctcacagccgagcaggcacgcttcttcctgcacggggtcactctggtgcccattgaggagttcagcccggagttcgtggagccccgggtcagctgcatcagcagccacggcgcctttggccccaacagtgccgcctgtctgccctcgcgcttcccaaagccgccccagcccatcatcctcagggactgccaggtgatcccgctgccgcccggcctcccgctgacccacgcgcaggatctcactccagccatgtccccagctggaccccgacctcggccccccaccgctgtggaccctgatgcagagcccaccctgctgcgtgagccccaggccaccgtggtcttcaccacccatgtgcccacgctgggccgctatgccttcctgctgcacggctaccagccagcccaccccaccttccccgtggaagtcctcatcaacgccggccgcgtgtggcagggccacgccaacgccagcttctgtccacatggctacggctgccgcaccctggtggtgtgtgagggccaggccctgctggacgtgacccacagcgagctcactgtgaccgtgcgtgtgcccgagggccggtggctctggctggattatgtactcgtggtccctgagaacgtctacagctttggctacctccgggaggagcccctggataaatcctatgacttcatcagccactgcgcagcccagggctaccacatcagccccagcagctcatccctgttctgccgaaacgctgctgcttccctctccctcttctataacaacggagcccgtccatgtggctgccacgaagtaggtgctacaggccccacgtgtgagcccttcgggggccagtgtccctgccatgcccatgtcattggccgtgactgctcccgctgtgccaccggatactggggcttccccaactgcaggcgtgagtaccccagtccttgggcgcccagtggcagggagttggtgccagagcccaaggtggacgggtcgaccagaaagcagggtcaggagaatgttctagagcctggcagggcagcattgctgccccatctgcgggcctgggcccaggacttcagcttgcgggccatgcagaaggtttcagggaccagcaggtggtccacagtctctgacgatgatgttgattctgagcagctgcctccatgtcaggagctgtccaaggctcagcacccggggcaggggtccctgttcttgtctcccccgcccccgtcacactgccacatcccctagggctgcattctgggcctctgagaggggcgggactgggaagaggggtcagtaaaccctgtacccgccccacagcctgtgactgcggtgcccgcctctgtgacgagctcacgggccagtgcatctgcccgccacgcaccatcccgcccgactgcctgctgtgccagccccagacctttggctgccaccccctggtcggctgtgaggagtgtaactgctcagggcccggcatccaggagctcacagaccctacctgtgacacagacagcggccagtgcaagtgcagacccaacgtgactgggcgccgctgtgatacctgctctccgggcttccatggctacccccgctgccgcccctgtgactgtcacgaggcgggcactgcgcctggcgtgtgtgaccccctcacagggcagtgctactgtaaggagaacgtgcagggccccaaatgtgaccagtgcagccttgggaccttctcactggatgctgccaaccccaaaggttgcacccgctgcttctgctttggggccacggagcgctgccggagctcgtcctacacccgccaggagttcgtggatatggagggatgggtgctgctgagcactgaccggcaggtggtgccccacgagcggcagccagggacggagatgctccgtgcagacctgcggcacgtgcctgaggctgtgcccgaggctttccccgagctgtactggcaggccccaccctcctacctgggggaccgggtgtcatcctacggtgggaccctccgttatgaactgcactcagagacccagcggggagatgtctttgtccccatggagagcaggccggatgtggtgctgcagggcaaccagatgagcatcacattcctggagccggcataccccacgcctggccacgttcaccgtgggcagctgcagctggtggaggggaacttccggcatacggagactcgcaacactgtgtcccgcgaggagctcatgatggtgctggccagcctggagcagctgcagatccgtgccctcttctcacagatctcctcggctgtctccctgcgcagggtggcactggaggtggccagcccagcaggccagggggccctggccagcaatgtggagctgtgcctgtgccccgccagctaccggggggactcatgccaggtgaggttaggacagcaccagactgcgaggcggctcacctgtgcacacccttccctccagcatcctccctgtgttcccttccttgctgcctccacttcctgtcaccctactcacctctcttcctgcccctgcttttcgcaggctgctggccaactcatgggcctgcctgtcccctgctgcctgtctgcctgcccctcgtcctgcctgcccctcatccgcctgcccctcca

SEQ ID NO: 406200 - DNA, 1585 bp, Homo sapiens
ggggacgcggcccggagccgggaagatggcgaagcggctctgcgcggggagcgcactgtgtgttcgcggcccccggggccccgcgccgctgctgctggtcgggctggcgctgctgggcgcggcgcgggcgcgggaggaggcgggcggcggcttcagcctgcacccgccctacttcaacctggccgagggcgcccgcatcgccgcctccgcgacctgcggagaggaggccccggcgcgcggctccccgcgccccaccgaggacctttactgcaagctggtagggggccccgtggccggcggcgaccccaaccagaccatccggggccagtactgtgacatctgcacggctgccaacagcaacaaggcacaccccgcgagcaatgccatcgatggcacggagcgctggtggcagagtccaccgctgtcccgcggcctggagtacaacgaggtcaacgtcaccctggacctgggccaggtcttccacgtggcctacgtcctcatcaagtttgccaactcaccccggccggacctctgggtgctggagcggtccatggacttcggccgcacctaccagccctggcagttctttgcctcctccaagagggactgtctggagcggttcgggccacagacgctggagcgcatcacacgggacgacgcggccatctgcaccaccgagtactcacgcatcgtgcccctggagaacggagagatcgtggtgtccctggtgaacggacgtccgggcgccatgaatttctcctactcgccgctgctacgtgagttcaccaaggccaccaacgtccgcctgcgcttcctgcgtaccaacacgctgctgggccatctcatggggaaggcgctgcgggaccccacggtcacccgccggtattattacagcatcaaggatatcagcatcggaggccgctgtgtctgccacggccacgcggatgcctgcgatgccaaagaccccacggacccgttcaggctgcagtgcacctgccagcacaacacctgcgggggcacctgcgaccgctgctgccccggttctaccgctctcccaaccaccctctcgactcgccccacgtctgccgccgctgcaactgcgagtccgacttcacggatggcacctgcgaggacctgacgggtcgatgctactgccggcccaacttctctggggagcggtgtgacgtgtgtgccgagggcttcacgggcttcccaagctgctacccgacgccctcgtcctccaatgacaccagggagcaggtgctgccagccggccagattgtgaatggtgactcgtggaaatgtccacgtggacatttccacgagtcacgatgagtcatgaataatacaaaaacggtggctaattgattatgagatttaggccctcaagacacaacactgggcagaataaagtccagatatgtaaattacagacttaaaagtttaaaatgataaaaatactaactttaacttaaattcccacatcacttaccttctagtgagctaagaaatgcaaattaaaagataacacttttctaccaatatgagctaagttttgaatgactgtctagtggtgactcgtgga

SEQ ID NO: 406201 - DNA, 302 bp, Homo sapiens
gtgcgctgggagaagaaccggatcctgctggtgacggacggggcccgggcctggagccaggaggggccgcaccggcagcaccagggggcagagcacccccagccccacaccctctttgtgggcggcctcccggccagcagccacagctccaaacttccggtgagaaccatcttgccccagcccccactccccacccactgttccctttcagctgccctgggccctgatccctgcccggtctgctcctataggtgaccgtcgggttcagcggctgtgtgaagagactgaggctgcacgggagg

SEQ ID NO: 406202 - DNA, 469 bp, Homo sapiens
gaatgtgcccccggcttctatcgggacgtcaaaggtctcttcctgggccgatgtgtcccttgtcagtgccatggacactcagaccgctgcctccctggctctggcgtctgtgtggtgagtaggggctggtggggccaggggggcagcattcactgaaggcacagtcaagtgtgccagggaagaccaggggctgcacttccaggtcaactgaggtctggggaagggtgttgcccagtgggggaccatctggccttgggcacagagtctgaggcaggggtggtgggagctgcacagactcggcagtaggatgtgggtgtccaccatagctctgactgtccactctgccccaggactgccagcacaacaccgaaggggcccactgtgagcgctgccaggctggcttcatgagcagcagggacgaccccagcgccccctgtgtcagctgcccctgccccctctcagtgccttc

SEQ ID NO: 406203 - DNA, 444 bp, Homo sapiens
tacttgatcagaaaggacctgcctatgttttcttctagaagcttggctgttctctttgtgtatttcaattcttaaggcatctggagctggtttgatgtgtggtgtgaggcagggatctaggtgctggctggcctcatgggagactggtttttctacctgtgtgtacctcctcctgccccatggtctttgtgcccctccatcccctacagggttggggggtctgttctaggctccctgttctgtcccattgagtgtggccccactgaggtgccatcctggacccacaggggaacttccggcatacggagactcgcaacactgtgtcccgcgaggagctcatgatggtgctggccagcctggagcagctgcagatccgtgccctcttctcacagatctcctcggctgtctccctgcgcagggtggcactggaggtggccagcccag

SEQ ID NO: 406204 - DNA, 436 bp, Homo sapiens
gtgagtgagggctgggcccagatctggcctctccctccggcctcatcagctgaaagtgtccttacgggcctttcggggcagctggggcttcctagaagcttttgggagagtcatccccattggcaggtgggtaccaggaacccggggtcaggcacctggcacctgccgaccactctcactgtcctctcatccctaggagaacgtgcagggccccaaatgtgaccagtgcagccttgggaccttctcactggatgctgccaaccccaaaggttgcacccgctgcttctgctttggggccacggagcgctgccggagctcgtcctacacccgccaggaggtgcgcctgcaggactgagggcattgccttctcggggaggtcttaggtgggactggatgcaagatggggccctgtgatgtgtgggcatccacccgtgtg

SEQ ID NO: 406205 - DNA, 770 bp, Homo sapiens
  misc_feature (174)..(174): n is a, c, g, or t
ccgggtacgccctggccgtgatgcccctggccccacccccttggttgtcaaccgccgggtcccgcggctttttattgtggagaacccccctactcctgcccgggtgtcccttgggccgcgcttgccaggttacttaccttctgggcccgcgcgcccacacggattggctttaanaacccttctctcaggtcgtcgggcccgccccaccaacttttttctgttttgtgattgtttttttttttttgagacacagttttgctcttgttgcccaggctggagtgcaatggctcgatctcggcttaccataacctctgcctcccgggttcaagcgattctcctgcctcagcctcctgagtagctgggattacaggcacacgccaccacgcccagctaattttgtatttttagtacagatggggtttctccatgttggtcaggctggtcttgaactcctgacctcaggtgatctgcccatctcagcctcccaaatgctggcccgggtgcaggagcagctgagcagcctctgggaggagaaccaggcactggccacacaaacccgcgaccggctggcccagcacgaggccggcctcatggacctgcgagaggctttgaaccgggcagtggacgccacacgggaggcccaggagctcaacagccgcaaccaggagcgcctggaggaagccctggtgaggaccccggacttgttcttcctcctgctcctcttcccgcctcctccctgcaatccctctcctctccggctcctcccctcc

SEQ ID NO: 406206 - DNA, 12046 bp, Homo sapiens
ggggacgcggcccggagccgggaagatggcgaagcggctctgcgcggggagcgcactgtgtgttcgcggcccccggggccccgcgccgctgctgctggtcgggctggcgctgctgggcgcggcgcgggcgcgggaggaggcgggcggcggcttcagcctgcacccgccctacttcaacctggccgagggcgcccgcatcgccgcctccgcgacctgcggagaggaggccccggcgcgcggctccccgcgccccaccgaggacctttactgcaagctggtagggggccccgtggccggcggcgaccccaaccagaccatccggggccagtactgtgacatctgcacggctgccaacagcaacaaggcacaccccgcgagcaatgccatcgatggcacggagcgctggtggcagagtccaccgctgtcccgcggcctggagtacaacgaggtcaacgtcaccctggacctgggccaggtcttccacgtggcctacgtcctcatcaagtttgccaactcaccccggccggacctctgggtgctggagcggtccatggacttcggccgcacctaccagccctggcagttctttgcctcctccaagagggactgtctggagcggttcgggccacagacgctggagcgcatcacacgggacgacgcggccatctgcaccaccgagtactcacgcatcgtgcccctggagaacggagagatcgtggtgtccctggtgaacggacgtccgggcgccatgaatttctcctactcgccgctgctacgtgagttcaccaaggccaccaacgtccgcctgcgcttcctgcgtaccaacacgctgctgggccatctcatggggaaggcgctgcgggaccccacggtcacccgccggtattattacagcatcaaggatatcagcatcggaggccgctgtgtctgccacggccacgcggatgcctgcgatgccaaagaccccacggacccgttcaggctgcagtgcacctgccagcacaacacctgcgggggcacctgcgaccgctgctgccccggcttcaatcagcagccgtggaagcctgcgactgccaacagtgccaacgagtgccagtcctgtaactgctacggccatgccaccgactgttactacgaccctgaggtggaccggcgccgcgccagccagagcctggatggcacctatcagggtgggggtgtctgtatcgactgccagcaccacaccgccggcgtcaactgtgagcgctgcctgcccggcttctaccgctctcccaaccaccctctcgactcgccccacgtctgccgccgctgcaactgcgagtccgacttcacggatggcacctgcgaggacctgacgggtcgatgctactgccggcccaacttctctggggagcggtgtgacgtgtgtgccgagggcttcacgggcttcccaagctgctacccgacgccctcgtcctccaatgacaccagggagcaggtgctgccagccggccagattgtgaattgtgactgcagcgcggcagggacccagggcaacgcctgccggaaggacccaagggtgggacgctgtctgtgcaaacccaacttccaaggcacccattgtgagctctgcgcgccagggttctacggccccggctgccagccctgccagtgttccagccctggagtggccgatgaccgctgtgaccctgacacaggccagtgcaggtgccgagtgggcttcgagggggccacatgtgatcgctgtgcccccggctactttcacttccctctctgccagttgtgtggctgcagccctgcaggaaccttgcccgagggctgcgatgaggccggccgctgcctatgccagcctgagtttgctggacctcattgtgaccggtgccgccctggctaccatggtttccccaactgccaagcatgcacctgcgaccctcggggagccctggaccagctctgtggggcgggaggtttgtgccgctgccgccccggctacacaggcactgcctgccaggaatgcagccccggctttcacggcttccccagctgtgtcccctgccactgctctgctgaaggctccctgcacgcagcctgtgacccccggagtgggcagtgcagctgccggccccgtgtgacggggctgcggtgtgacacatgtgtgcccggtgcctacaacttcccctactgcgaagctggctcttgccaccctgccggtctggccccagtggatcctgcccttcctgaggcacaggttccctgtatgtgccgggctcacgtggaggggccgagctgtgaccgctgcaaacctgggttctggggactgagccccagcaaccccgagggctgtacccgctgcagctgcgacctcaggggcacactgggtggagttgctgagtgccagccgggcaccggccagtgcttctgcaagccccacgtgtgcggccaggcctgcgcgtcctgcaaggatggcttctttggactggatcaggctgactattttggctgccgcagctgccggtgtgacattggcggtgcactgggccagagctgtgaaccgaggacgggcgtctgccggtgccgccccaacacccagggccccacctgcagcgagcctgcgagggaccactacctcccggacctgcaccacctgcgcctggagctggaggaggctgccacacctgagggtcacgccgtgcgctttggcttcaaccccctcgagttcgagaacttcagctggaggggctacgcgcagatggcacctgtccagcccaggatcgtggccaggctgaacctgacctcccctgaccttttctggctcgtcttccgatacgtcaaccggggggccatgagtgtgagcgggcgggtctctgtgcgagaggagggcaggtcggccacctgcgccaactgcacagcacagagtcagcccgtggccttcccacccagcacggagcctgccttcatcaccgtgccccagaggggcttcggagagccctttgtgctgaaccctggcacctgggccctgcgtgtggaggccgaaggggtgctcctggactacgtggttctgctgcctagcgcatactacgaggcggcgctcctgcagctgcgggtgactgaggcctgcacataccgtccctctgcccagcagtctggcgacaactgcctcctctacacacacctccccctggatggcttcccctcggccgccgggctggaggccctgtgtcgccaggacaacagcctgccccggccctgccccacggagcagctcagcccgtcgcacccgccactgatcacctgcacgggcagtgatgtggacgtccagcttcaagtggcagtgccacagccaggccgctatgccctagtggtggagtacgccaatgaggatgcccgccaggaggtgggcgtggccgtgcacaccccacagcgggccccccagcaggggctgctctccctgcacccctgcctgtacagcaccctgtgccggggcactgcccgggatacccaggaccacctggctgtcttccacctggactcggaggccagcgtgaggctcacagccgagcaggcacgcttcttcctgcacggggtcactctggtgcccattgaggagttcagcccggagttcgtggagccccgggtcagctgcatcagcagccacggcgcctttggccccaacagtgccgcctgtctgccctcgcgcttcccaaagccgccccagcccatcatcctcagggactgccaggtgatcccgctgccgcccggcctcccgctgacccacgcgcaggatctcactccagccatgtccccagctggaccccgacctcggccccccaccgctgtggaccctgatgcagagcccaccctgctgcgtgagccccaggccaccgtggtcttcaccacccatgtgcccacgctgggccgctatgccttcctgctgcacggctaccagccagcccaccccaccttccccgtggaagtcctcatcaacgccggccgcgtgtggcagggccacgccaacgccagcttctgtccacatggctacggctgccgcaccctggtggtgtgtgagggccaggccctgctggacgtgacccacagcgagctcactgtgaccgtgcgtgtgcccgagggccggtggctctggctggattatgtactcgtggtccctgagaacgtctacagctttggctacctccgggaggagcccctggataaatcctatgacttcatcagccactgcgcagcccagggctaccacatcagccccagcagctcatccctgttctgccgaaacgctgctgcttccctctccctcttctataacaacggagcccgtccatgtggctgccacgaagtaggtgctacaggccccacgtgtgagcccttcgggggccagtgtccctgccatgcccatgtcattggccgtgactgctcccgctgtgccaccggatactggggcttccccaactgcaggccctgtgactgcggtgcccgcctctgtgacgagctcacgggccagtgcatctgcccgccacgcaccatcccgcccgactgcctgctgtgccagccccagacctttggctgccaccccctggtcggctgtgaggagtgtaactgctcagggcccggcatccaggagctcacagaccctacctgtgacacagacagcggccagtgcaagtgcagacccaacgtgactgggcgccgctgtgatacctgctctccgggcttccatggctacccccgctgccgcccctgtgactgtcacgaggcgggcactgcgcctggcgtgtgtgaccccctcacagggcagtgctactgtaaggagaacgtgcagggccccaaatgtgaccagtgcagccttgggaccttctcactggatgctgccaaccccaaaggttgcacccgctgcttctgctttggggccacggagcgctgccggagctcgtcctacacccgccaggagttcgtggatatggagggatgggtgctgctgagcactgaccggcaggtggtgccccacgagcggcagccagggacggagatgctccgtgcagacctgcggcacgtgcctgaggctgtgcccgaggctttccccgagctgtactggcaggccccaccctcctacctgggggaccgggtgtcatcctacggtgggaccctccgttatgaactgcactcagagacccagcggggagatgtctttgtccccatggagagcaggccggatgtggtgctgcagggcaaccagatgagcatcacattcctggagccggcataccccacgcctggccacgttcaccgtgggcagctgcagctggtggaggggaacttccggcatacggagactcgcaacactgtgtcccgcgaggagctcatgatggtgctggccagcctggagcagctgcagatccgtgccctcttctcacagatctcctcggctgtctccctgcgcagggtggcactggaggtggccagcccagcaggccagggggccctggccagcaatgtggagctgtgcctgtgccccgccagctaccggggggactcatgccaggaatgtgcccccggcttctatcgggacgtcaaaggtctcttcctgggccgatgtgtcccttgtcagtgccatggacactcagaccgctgcctccctggctctggcgtctgtgtggactgccagcacaacaccgaaggggcccactgtgagcgctgccaggctggcttcatgagcagcagggacgaccccagcgccccctgtgtcagctgcccctgccccctctcagtgccttccaacaacttcgccgagggctgtgtcctgcgaggcggccgcacccagtgcctctgcaaacctggttatgcaggtgcctcctgcgagcggtgtgcgcccggattctttgggaacccactggtgctgggcagctcctgccagccatgcgactgcagcggcaacggtgaccccaacttgctcttcagcgactgcgaccccctgacgggcgcctgccgtggctgcctgcgccacaccactgggccccgctgcgagatctgtgcccccggcttctacggcaacgccctgctgcccggcaactgcacccggtgcgactgtaccccatgtgggacagaggcctgcgacccccacagcgggcactgcctgtgcaaggcgggcgtgactgggcggcgctgtgaccgctgccaggagggacattttggtttcaatggctgcgggggctgccgcccgtgtgcttgtggaccggccgccgagggctccgagtgccacccccagagcggacagtgccactgccgaccagggaccatgggaccccagtgccgcgagtgtgcccctggctactgggggctccctgagcagggctgcaggcgctgccagtgccctgggggccgctgtgaccctcacacgggccgctgcaactgccccccggggctcagcggggagcgctgcgacacctgcagccagcagcatcaggtgcctgttccaggcgggcctgtgggccacagcatccactgtgaagtgtgtgaccactgtgtggtcctgctcctggatgacctggaacgggccggcgccctcctccccgccattcacgagcaactgcgtggcatcaatgccagctccatggcctgggcccgtctgcacaggctgaacgcctccatcgctgacctgcagagccagctccggagccccctgggcccccgccatgagacggcacagcagctggaggtgctggagcagcagagcacaagcctcgggcaggacgcacggcggctaggcggccaggccgtggggacccgagaccaggcgagccaattgctggccggcaccgaggccacactgggccatgcgaagacgctgttggcggccatccgggctgtggaccgcaccctgagcgagctcatgtcccagacgggccacctggggctggccaatgcctcggctccatcaggtgagcagctgctccggacactggccgaggtggagcggctgctctgggagatgcgggcccgggacctgggggccccgcaggcagcagctgaggctgagttggctgcagcacagagattgctggcccgggtgcaggagcagctgagcagcctctgggaggagaaccaggcactggccacacaaacccgcgaccggctggcccagcacgaggccggcctcatggacctgcgagaggctttgaaccgggcagtggacgccacacgggaggcccaggagctcaacagccgcaaccaggagcgcctggaggaagccctgcaaaggaagcaggagctgtcccgggacaatgccaccctgcaggccactctgcatgcggctagggacaccctggccagcgtcttcagattgctgcacagcctggaccaggctaaggaggagctggagcgcctcgccgccagcctggatggggctcggaccccactgctgcagaggatgcagaccttctccccggcgggcagcaagctgcgtctagtggaggccgccgaggcccacgcacagcagctgggccagctggcactcaatctgtccagcatcatcctggacgtcaaccaggaccgcctcacccagagggccatcgaggcctccaacgcctacagccgcatcctgcaggccgtgcaggctgccgaggatgctgctggccaggccctgcagcaggcggaccacacgtgggcgacggtggtgcggcagggcctggtggaccgagcccagcagctcctggccaacagcactgcactagaagaggccatgctccaggaacagcagaggctgggccttgtgtgggctgccctccagggtgccaggacccagctccgagatgtccgggccaagaaggaccagctggaggcgcacatccaggcggcgcaggccatgcttgccatggacacagacgagacaagcaagaagatcgcacatgccaaggctgtggctgctgaagcccaggacaccgccacccgtgtgcagtcccagctgcaggccatgcaggagaatgtggagcggtggcagggccagtacgagggcctgcggggccaggacctgggccaggcagtgcttgacgcaggccactcagtgtccaccctggagaagacgctgccccagctgctggccaagctgagcatcctggagaaccgtggggtgcacaacgccagcctggccctgtccgccagcattggccgcgtgcgagagctcattgcccaggcccggggggctgccagtaaggtcaaggtgcccatgaagttcaacgggcgctcaggggtgcagctgcgcaccccacgggatcttgccgaccttgctgcctacactgccctcaagttctacctgcagggcccagagcctgagcctgggcagggtaccgaggatcgctttgtgatgtacatgggcagccgccaggccactggggactacatgggtgtgtctctgcgtgacaagaaggtgcactgggtgtatcagctgggtgaggcgggccctgcagtcctaagcatcgatgaggacattggggagcagttcgcagctgtcagcctggacaggactctccagtttggccacatgtccgtcacagtggagagacagatgatccaggaaaccaagggtgacacggtggcccctggggcagaggggctgctcaacctgcggccagacgacttcgtcttctacgtcggggggtaccccagtaccttcacgccccctcccctgcttcgcttccccggctaccggggctgcatcgagatggacacgctgaatgaggaggtggtcagcctctacaacttcgagaggaccttccagctggacacggctgtggacaggccttgtgcccgctccaagtcgaccggggacccgtggctcacggacggctcctacctggacggcaccggcttcgcccgcatcagcttcgacagtcagatcagcaccaccaagcgcttcgagcaggagctgcggctcgtgtcctacagcggggtgctcttcttcctgaagcagcagagccagttcctgtgcttggccgtgcaagaaggcagcctcgtgctgttgtatgactttggggctggcctgaaaaaggccgtcccactgcagcccccaccgcccctgacctcggccagcaaggcgatccaggtgttcctgctggggggcagccgcaagcgtgtgctggtgcgtgtggagcgggccacggtgtacagcgtggagcaggacaatgatctggagctggccgacgcctactacctggggggcgtgccgcccgaccagctgcccccgagcctgcgatggctcttccccaccggaggctcagtccgtggctgcgtcaaaggcatcaaggccctgggcaagtatgtggacctcaagcggctgaacacgacaggcgtgagcgccggctgcaccgccgacctgctggtggggcgcgccatgactttccatggccacggcttccttcgcctggcgctctcgaacgtggcaccgctcactggcaacgtctactccggcttcggcttccacagcgcccaggacagtgccctgctctactaccgggcgtccccggatgggctatgccaggtgtccctgcagcagggccgtgtgagcctacagctcctgaggactgaagtgaaaactcaagcgggcttcgccgatggtgccccccattacgtcgccttctacagcaatgccacgggagtctggctgtatgtcgatgaccagctccagcagatgaagccccaccggggaccaccccccgagctccagccgcagcctgaggggcccccgaggctcctcctgggaggcctgcctgagtctggcaccatttacaacttcagtggctgcatcagcaacgtcttcgtgcagcggctcctgggcccacagcgcgtatttgatctgcagcagaacctgggcagcgtcaatgtgagcacgggctgtgcacccgccctgcaagcccagaccccgggcctggggcctagaggactgcaggccaccgcccggaaggcctcccgccgcagccgtcagcccgcccggcatcctgcctgcatgctgcccccacacctcaggaccacccgagactcctaccagtttgggggttccctgtccagtcacctggagtttgtgggcatcctggcccgacataggaactggcccagtctctccatgcacgtcctcccgcgaagctcccgaggcctcctcctcttcactgcccgtctgaggcccggcagcccctccctggcgctcttcctgagcaatggccacttcgttgcacagatggaaggcctcgggactcggctccgcgcccagagccgccagcgctcccggcctggccgctggcacaaggtctccgtgcgctgggagaagaaccggatcctgctggtgacggacggggcccgggcctggagccaggaggggccgcaccggcagcaccagggggcagagcacccccagccccacaccctctttgtgggcggcctcccggccagcagccacagctccaaacttccggtgaccgtcgggttcagcggctgtgtgaagagactgaggctgcacgggaggcccctgggggcccccacacggatggcaggggtcacaccctgcatcttgggccccctggaggcgggcctgttcttcccaggcagcgggggagttatcactttagacctcccaggagctacactgcctgatgtgggcctggaactggaggtgcggcccctggcagtcaccggactgatcttccacttgggccaggcccggacgcccccctacttgcagttgcaggtgaccgagaagcaagtcctgctgcgggcggatgacggagcaggggagttctccacgtcagtgacccgcccctcagtgctgtgtgatggccagtggcaccggctagcggtgatgaaaagcgggaatgtgctccggctggaggtggacgcgcagagcaaccacaccgtgggccccttgctggcggctgcagctggtgccccagcccctctgtacctcgggggcctgcctgagcccatggccgtgcagccctggccccccgcctactgcggctgcatgaggaggctggcggtgaaccggtcccccgtcgccatgactcgctctgtggaggtccacggggcagtgggggccagtggctgcccagccgcctaggacacagccaaccccggcccctggtcaggcccctgcagctgcctcacaccgccccttgtgctcgcctcataggtgtctatttggactctaagctctacgggtgacagatcttgtttctgaagatggtttaagttatagcttcttaaacgaaagaataaaatactgcaaaatgtttttatatttggcccttccacccatttttaattgtgagagatttgtcaccaatcatcactggttcctccttaaaaattaaaaagtaacttctgtgtaaaaaaaaaaaaaaaaaaaaaaaaaaaagggggcgcgccccccctccttagcctcttactatactataattatatttattctcacattttggagctctccccacaactctcaaggggggtacattagaaaaatctcccccccttatacggagggtggcggggttgtcggacccccatatatattcccccgcggcgccggcggtcccctttttcgtccccaataaaaaatgtttcctgtctattaagagaaagggcataagtagaacaccttattctaatatatagttgcgcggagctgcatacagaaagcttgggcgccgtcctattatatatcacccaattatcaattgggagggcccctataaaaaaagagcagatgttaaaccccgtgggcgcagcttataatagagcgtcttattggtagccactacccttccctgaatatgaagctccccatccaataccccataaagaccccaaaaaatgttcggggggccctatatgagagggtgggagctcacccaacacagcgggtgtttacagaccgggaaccacgagacattaagacgaaacgcaacaacacaaagaggggggggggggcgctcccaaaacaaaagtttaccccccggggaggcggcccaacactcatgcacgggagtaccca

SEQ ID NO: 406207 - DNA, 12119 bp, Homo sapiens
ggggacgcggcccggagccgggaagatggcgaagcggctctgcgcggggagcgcactgtgtgttcgcggcccccggggccccgcgccgctgctgctggtcgggctggcgctgctgggcgcggcgcgggcgcgggaggaggcgggcggcggcttcagcctgcacccgccctacttcaacctggccgagggcgcccgcatcgccgcctccgcgacctgcggagaggaggccccggcgcgcggctccccgcgccccaccgaggacctttactgcaagctggtagggggccccgtggccggcggcgaccccaaccagaccatccggggccagtactgtgacatctgcacggctgccaacagcaacaaggcacaccccgcgagcaatgccatcgatggcacggagcgctggtggcagagtccaccgctgtcccgcggcctggagtacaacgaggtcaacgtcaccctggacctgggccaggtcttccacgtggcctacgtcctcatcaagtttgccaactcaccccggccggacctctgggtgctggagcggtccatggacttcggccgcacctaccagccctggcagttctttgcctcctccaagagggactgtctggagcggttcgggccacagacgctggagcgcatcacacgggacgacgcggccatctgcaccaccgagtactcacgcatcgtgcccctggagaacggagagatcgtggtgtccctggtgaacggacgtccgggcgccatgaatttctcctactcgccgctgctacgtgagttcaccaaggccaccaacgtccgcctgcgcttcctgcgtaccaacacgctgctgggccatctcatggggaaggcgctgcgggaccccacggtcacccgccggtattattacagcatcaaggatatcagcatcggaggccgctgtgtctgccacggccacgcggatgcctgcgatgccaaagaccccacggacccgttcaggctgcagtgcacctgccagcacaacacctgcgggggcacctgcgaccgctgctgccccggcttcaatcagcagccgtggaagcctgcgactgccaacagtgccaacgagtgccagtcctgtaactgctacggccatgccaccgactgttactacgaccctgaggtggaccggcgccgcgccagccagagcctggatggcacctatcagggtgggggtgtctgtatcgactgccagcaccacaccgccggcgtcaactgtgagcgctgcctgcccggcttctaccgctctcccaaccaccctctcgactcgccccacgtctgccgccgctgcaactgcgagtccgacttcacggatggcacctgcgaggacctgacgggtcgatgctactgccggcccaacttctctggggagcggtgtgacgtgtgtgccgagggcttcacgggcttcccaagctgctacccgacgccctcgtcctccaatgacaccagggagcaggtgctgccagccggccagattgtgaattgtgactgcagcgcggcagggacccagggcaacgcctgccggaaggacccaagggtgggacgctgtctgtgcaaacccaacttccaaggcacccattgtgagctctgcgcgccagggttctacggccccggctgccagccctgccagtgttccagccctggagtggccgatgaccgctgtgaccctgacacaggccagtgcaggtgccgagtgggcttcgagggggccacatgtgatcgctgtgcccccggctactttcacttccctctctgccagttgtgtggctgcagccctgcaggaaccttgcccgagggctgcgatgaggccggccgctgcctatgccagcctgagtttgctggacctcattgtgaccggtgccgccctggctaccatggtttccccaactgccaagcatgcacctgcgaccctcggggagccctggaccagctctgtggggcgggaggtttgtgccgctgccgccccggctacacaggcactgcctgccaggaatgcagccccggctttcacggcttccccagctgtgtcccctgccactgctctgctgaaggctccctgcacgcagcctgtgacccccggagtgggcagtgcagctgccggccccgtgtgacggggctgcggtgtgacacatgtgtgcccggtgcctacaacttcccctactgcgaagctggctcttgccaccctgccggtctggccccagtggatcctgcccttcctgaggcacaggttccctgtatgtgccgggctcacgtggaggggccgagctgtgaccgctgcaaacctgggttctggggactgagccccagcaaccccgagggctgtacccgctgcagctgcgacctcaggggcacactgggtggagttgctgagtgccagccgggcaccggccagtgcttctgcaagccccacgtgtgcggccaggcctgcgcgtcctgcaaggatggcttctttggactggatcaggctgactattttggctgccgcagctgccggtgtgacattggcggtgcactgggccagagctgtgaaccgaggacgggcgtctgccggtgccgccccaacacccagggccccacctgcagcgagcctgcgagggaccactacctcccggacctgcaccacctgcgcctggagctggaggaggctgccacacctgagggtcacgccgtgcgctttggcttcaaccccctcgagttcgagaacttcagctggaggggctacgcgcagatggcacctgtccagcccaggatcgtggccaggctgaacctgacctcccctgaccttttctggctcgtcttccgatacgtcaaccggggggccatgagtgtgagcgggcgggtctctgtgcgagaggagggcaggtcggccacctgcgccaactgcacagcacagagtcagcccgtggccttcccacccagcacggagcctgccttcatcaccgtgccccagaggggcttcggagagccctttgtgctgaaccctggcacctgggccctgcgtgtggaggccgaaggggtgctcctggactacgtggttctgctgcctagcgcatactacgaggcggcgctcctgcagctgcgggtgactgaggcctgcacataccgtccctctgcccagcagtctggcgacaactgcctcctctacacacacctccccctggatggcttcccctcggccgccgggctggaggccctgtgtcgccaggacaacagcctgccccggccctgccccacggagcagctcagcccgtcgcacccgccactgatcacctgcacgggcagtgatgtggacgtccagcttcaagtggcagtgccacagccaggccgctatgccctagtggtggagtacgccaatgaggatgcccgccaggaggtgggcgtggccgtgcacaccccacagcgggccccccagcaggggctgctctccctgcacccctgcctgtacagcaccctgtgccggggcactgcccgggatacccaggaccacctggctgtcttccacctggactcggaggccagcgtgaggctcacagccgagcaggcacgcttcttcctgcacggggtcactctggtgcccattgaggagttcagcccggagttcgtggagccccgggtcagctgcatcagcagccacggcgcctttggccccaacagtgccgcctgtctgccctcgcgcttcccaaagccgccccagcccatcatcctcagggactgccaggtgatcccgctgccgcccggcctcccgctgacccacgcgcaggatctcactccagccatgtccccagctggaccccgacctcggccccccaccgctgtggaccctgatgcagagcccaccctgctgcgtgagccccaggccaccgtggtcttcaccacccatgtgcccacgctgggccgctatgccttcctgctgcacggctaccagccagcccaccccaccttccccgtggaagtcctcatcaacgccggccgcgtgtggcagggccacgccaacgccagcttctgtccacatggctacggctgccgcaccctggtggtgtgtgagggccaggccctgctggacgtgacccacagcgagctcactgtgaccgtgcgtgtgcccgagggccggtggctctggctggattatgtactcgtggtccctgagaacgtctacagctttggctacctccgggaggagcccctggataaatcctatgacttcatcagccactgcgcagcccagggctaccacatcagccccagcagctcatccctgttctgccgaaacgctgctgcttccctctccctcttctataacaacggagcccgtccatgtggctgccacgaagtaggtgctacaggccccacgtgtgagcccttcgggggccagtgtccctgccatgcccatgtcattggccgtgactgctcccgctgtgccaccggatactggggcttccccaactgcaggccctgtgactgcggtgcccgcctctgtgacgagctcacgggccagtgcatctgcccgccacgcaccatcccgcccgactgcctgctgtgccagccccagacctttggctgccaccccctggtcggctgtgaggagtgtaactgctcagggcccggcatccaggagctcacagaccctacctgtgacacagacagcggccagtgcaagtgcagacccaacgtgactgggcgccgctgtgatacctgctctccgggcttccatggctacccccgctgccgcccctgtgactgtcacgaggcgggcactgcgcctggcgtgtgtgaccccctcacagggcagtgctactgtaaggagaacgtgcagggccccaaatgtgaccagtgcagccttgggaccttctcactggatgctgccaaccccaaaggttgcacccgctgcttctgctttggggccacggagcgctgccggagctcgtcctacacccgccaggagttcgtggatatggagggatgggtgctgctgagcactgaccggcaggtggtgccccacgagcggcagccagggacggagatgctccgtgcagacctgcggcacgtgcctgaggctgtgcccgaggctttccccgagctgtactggcaggccccaccctcctacctgggggaccgggtgtcatcctacggtgggaccctccgttatgaactgcactcagagacccagcggggagatgtctttgtccccatggagagcaggccggatgtggtgctgcagggcaaccagatgagcatcacattcctggagccggcataccccacgcctggccacgttcaccgtgggcagctgcagctggtggaggggaacttccggcatacggagactcgcaacactgtgtcccgcgaggagctcatgatggtgctggccagcctggagcagctgcagatccgtgccctcttctcacagatctcctcggctgtctccctgcgcagggtggcactggaggtggccagcccagcaggccagggggccctggccagcaatgtggagctgtgcctgtgccccgccagctaccggggggactcatgccaggaatgtgcccccggcttctatcgggacgtcaaaggtctcttcctgggccgatgtgtcccttgtcagtgccatggacactcagaccgctgcctccctggctctggcgtctgtgtggactgccagcacaacaccgaaggggcccactgtgagcgctgccaggctggcttcatgagcagcagggacgaccccagcgccccctgtgtcagctgcccctgccccctctcagtgccttccaacaacttcgccgagggctgtgtcctgcgaggcggccgcacccagtgcctctgcaaacctggttatgcaggtgcctcctgcgagcggtgtgcgcccggattctttgggaacccactggtgctgggcagctcctgccagccatgcgactgcagcggcaacggtgaccccaacttgctcttcagcgactgcgaccccctgacgggcgcctgccgtggctgcctgcgccacaccactgggccccgctgcgagatctgtgcccccggcttctacggcaacgccctgctgcccggcaactgcacccggtgcgactgtaccccatgtgggacagaggcctgcgacccccacagcgggcactgcctgtgcaaggcgggcgtgactgggcggcgctgtgaccgctgccaggagggacattttggtttcaatggctgcgggggctgccgcccgtgtgcttgtggaccggccgccgagggctccgagtgccacccccagagcggacagtgccactgccgaccagggaccatgggaccccagtgccgcgagtgtgcccctggctactgggggctccctgagcagggctgcaggcgctgccagtgccctgggggccgctgtgaccctcacacgggccgctgcaactgccccccggggctcagcggggagcgctgcgacacctgcagccagcagcatcaggtgcctgttccaggcgggcctgtgggccacagcatccactgtgaagtgtgtgaccactgtgtggtcctgctcctggatgacctggaacgggccggcgccctcctccccgccattcacgagcaactgcgtggcatcaatgccagctccatggcctgggcccgtctgcacaggctgaacgcctccatcgctgacctgcagagccagctccggagccccctgggcccccgccatgagacggcacagcagctggaggtgctggagcagcagagcacaagcctcgggcaggacgcacggcggctaggcggccaggccgtggggacccgagaccaggcgagccaattgctggccggcaccgaggccacactgggccatgcgaagacgctgttggcggccatccgggctgtggaccgcaccctgagcgagctcatgtcccagacgggccacctggggctggccaatgcctcggctccatcaggtgagcagctgctccggacactggccgaggtggagcggctgctctgggagatgcgggcccgggacctgggggccccgcaggcagcagctgaggctgagttggctgcagcacagagattgctggcccgggtgcaggagcagctgagcagcctctgggaggagaaccaggcactggccacacaaacccgcgaccggctggcccagcacgaggccggcctcatggacctgcgagaggctttgaaccgggcagtggacgccacacgggaggcccaggagctcaacagccgcaaccaggagcgcctggaggaagccctgcaaaggaagcaggagctgtcccgggacaatgccaccctgcaggccactctgcatgcggctagggacaccctggccagcgtcttcagattgctgcacagcctggaccaggctaaggaggagctggagcgcctcgccgccagcctggatggggctcggaccccactgctgcagaggatgcagaccttctccccggcgggcagcaagctgcgtctagtggaggccgccgaggcccacgcacagcagctgggccagctggcactcaatctgtccagcatcatcctggacgtcaaccaggaccgcctcacccagagggccatcgaggcctccaacgcctacagccgcatcctgcaggccgtgcaggctgccgaggatgctgctggccaggccctgcagcaggcggaccacacgtgggcgacggtggtgcggcagggcctggtggaccgagcccagcagctcctggccaacagcactgcactagaagaggccatgctccaggaacagcagaggctgggccttgtgtgggctgccctccagggtgccaggacccagctccgagatgtccgggccaagaaggaccagctggaggcgcacatccaggcggcgcaggccatgcttgccatggacacagacgagacaagcaagaagatcgcacatgccaaggctgtggctgctgaagcccaggacaccgccacccgtgtgcagtcccagctgcaggccatgcaggagaatgtggagcggtggcagggccagtacgagggcctgcggggccaggacctgggccaggcagtgcttgacgcaggccactcagtgtccaccctggagaagacgctgccccagctgctggccaagctgagcatcctggagaaccgtggggtgcacaacgccagcctggccctgtccgccagcattggccgcgtgcgagagctcattgcccaggcccggggggctgccagtaaggtgggtgagagtcccaggggaaggtggacatcagggagggtggtggtggacgctgatggaccgtgccccgcaggtcaaggtgcccatgaagttcaacgggcgctcaggggtgcagctgcgcaccccacgggatcttgccgaccttgctgcctacactgccctcaagttctacctgcagggcccagagcctgagcctgggcagggtaccgaggatcgctttgtgatgtacatgggcagccgccaggccactggggactacatgggtgtgtctctgcgtgacaagaaggtgcactgggtgtatcagctgggtgaggcgggccctgcagtcctaagcatcgatgaggacattggggagcagttcgcagctgtcagcctggacaggactctccagtttggccacatgtccgtcacagtggagagacagatgatccaggaaaccaagggtgacacggtggcccctggggcagaggggctgctcaacctgcggccagacgacttcgtcttctacgtcggggggtaccccagtaccttcacgccccctcccctgcttcgcttccccggctaccggggctgcatcgagatggacacgctgaatgaggaggtggtcagcctctacaacttcgagaggaccttccagctggacacggctgtggacaggccttgtgcccgctccaagtcgaccggggacccgtggctcacggacggctcctacctggacggcaccggcttcgcccgcatcagcttcgacagtcagatcagcaccaccaagcgcttcgagcaggagctgcggctcgtgtcctacagcggggtgctcttcttcctgaagcagcagagccagttcctgtgcttggccgtgcaagaaggcagcctcgtgctgttgtatgactttggggctggcctgaaaaaggccgtcccactgcagcccccaccgcccctgacctcggccagcaaggcgatccaggtgttcctgctggggggcagccgcaagcgtgtgctggtgcgtgtggagcgggccacggtgtacagcgtggagcaggacaatgatctggagctggccgacgcctactacctggggggcgtgccgcccgaccagctgcccccgagcctgcgatggctcttccccaccggaggctcagtccgtggctgcgtcaaaggcatcaaggccctgggcaagtatgtggacctcaagcggctgaacacgacaggcgtgagcgccggctgcaccgccgacctgctggtggggcgcgccatgactttccatggccacggcttccttcgcctggcgctctcgaacgtggcaccgctcactggcaacgtctactccggcttcggcttccacagcgcccaggacagtgccctgctctactaccgggcgtccccggatgggctatgccaggtgtccctgcagcagggccgtgtgagcctacagctcctgaggactgaagtgaaaactcaagcgggcttcgccgatggtgccccccattacgtcgccttctacagcaatgccacgggagtctggctgtatgtcgatgaccagctccagcagatgaagccccaccggggaccaccccccgagctccagccgcagcctgaggggcccccgaggctcctcctgggaggcctgcctgagtctggcaccatttacaacttcagtggctgcatcagcaacgtcttcgtgcagcggctcctgggcccacagcgcgtatttgatctgcagcagaacctgggcagcgtcaatgtgagcacgggctgtgcacccgccctgcaagcccagaccccgggcctggggcctagaggactgcaggccaccgcccggaaggcctcccgccgcagccgtcagcccgcccggcatcctgcctgcatgctgcccccacacctcaggaccacccgagactcctaccagtttgggggttccctgtccagtcacctggagtttgtgggcatcctggcccgacataggaactggcccagtctctccatgcacgtcctcccgcgaagctcccgaggcctcctcctcttcactgcccgtctgaggcccggcagcccctccctggcgctcttcctgagcaatggccacttcgttgcacagatggaaggcctcgggactcggctccgcgcccagagccgccagcgctcccggcctggccgctggcacaaggtctccgtgcgctgggagaagaaccggatcctgctggtgacggacggggcccgggcctggagccaggaggggccgcaccggcagcaccagggggcagagcacccccagccccacaccctctttgtgggcggcctcccggccagcagccacagctccaaacttccggtgaccgtcgggttcagcggctgtgtgaagagactgaggctgcacgggaggcccctgggggcccccacacggatggcaggggtcacaccctgcatcttgggccccctggaggcgggcctgttcttcccaggcagcgggggagttatcactttagacctcccaggagctacactgcctgatgtgggcctggaactggaggtgcggcccctggcagtcaccggactgatcttccacttgggccaggcccggacgcccccctacttgcagttgcaggtgaccgagaagcaagtcctgctgcgggcggatgacggagcaggggagttctccacgtcagtgacccgcccctcagtgctgtgtgatggccagtggcaccggctagcggtgatgaaaagcgggaatgtgctccggctggaggtggacgcgcagagcaaccacaccgtgggccccttgctggcggctgcagctggtgccccagcccctctgtacctcgggggcctgcctgagcccatggccgtgcagccctggccccccgcctactgcggctgcatgaggaggctggcggtgaaccggtcccccgtcgccatgactcgctctgtggaggtccacggggcagtgggggccagtggctgcccagccgcctaggacacagccaaccccggcccctggtcaggcccctgcagctgcctcacaccgccccttgtgctcgcctcataggtgtctatttggactctaagctctacgggtgacagatcttgtttctgaagatggtttaagttatagcttcttaaacgaaagaataaaatactgcaaaatgtttttatatttggcccttccacccatttttaattgtgagagatttgtcaccaatcatcactggttcctccttaaaaattaaaaagtaacttctgtgtaaaaaaaaaaaaaaaaaaaaaaaaaaaagggggcgcgccccccctccttagcctcttactatactataattatatttattctcacattttggagctctccccacaactctcaaggggggtacattagaaaaatctcccccccttatacggagggtggcggggttgtcggacccccatatatattcccccgcggcgccggcggtcccctttttcgtccccaataaaaaatgtttcctgtctattaagagaaagggcataagtagaacaccttattctaatatatagttgcgcggagctgcatacagaaagcttgggcgccgtcctattatatatcacccaattatcaattgggagggcccctataaaaaaagagcagatgttaaaccccgtgggcgcagcttataatagagcgtcttattggtagccactacccttccctgaatatgaagctccccatccaataccccataaagaccccaaaaaatgttcggggggccctatatgagagggtgggagctcacccaacacagcgggtgtttacagaccgggaaccacgagacattaagacgaaacgcaacaacacaaagaggggggggggggcgctcccaaaacaaaagtttaccccccggggaggcggcccaacactcatgcacgggagtaccca

SEQ ID NO: 406208 - DNA, 10875 bp, Homo sapiens
gagaacgcaggtctccatcctgacctgcaggcaagggggactctactgacccctgaggtgccctgtcctaggccccacccggtcagtgcacacctgctccccagtcccgcctccacaaaggccctgtgagaccctgtcctccaccgcctctttccttgtgtccattccctgagcctggggaagttgcgtcagagccacaggctcggggacgctgagtctgggcgagcgcttgctgccggacagctggagaaacagcagcggggggccgtgtccatgtggcaagccaagccatcgaggggatcacaggccccttcagggaagggactgagcacctgccacctgcctccaggatgggcctgatcccccctcctgtgtaccccacaggctgcagtgcacctgccagcacaacacctgcgggggcacctgcgaccgctgctgccccggttctaccgctctcccaaccaccctctcgactcgccccacgtctgccgccgctgcaactgcgagtccgacttcacggatggcacctgcgaggacctgacgggtcgatgctactgccggcccaacttctctggggagcggtgtgacgtgtgtgccgagggcttcacgggcttcccaagctgctacccgacgccctcgtcctccaatgacaccagggagcaggtgctgccagccggccagattgtgaattgtgactgcagcgcggcagggacccagggcaacgcctgccggaaggacccaagggtgggacgctgtctgtgcaaacccaacttccaaggcacccattgtgagctctgcgcgccagggttctacggccccggctgccagccctgccagtgttccagccctggagtggccgatgaccgctgtgaccctgacacaggccagtgcaggtgccgagtgggcttcgagggggccacatgtgatcgctgtgcccccggctactttcacttccctctctgccagttgtgtggctgcagccctgcaggaaccttgcccgagggctgcgatgaggccggccgctgcctatgccagcctgagtttgctggacctcattgtgaccggtgccgccctggctaccatggtttccccaactgccaagcatgcacctgcgaccctcggggagccctggaccagctctgtggggcgggaggtttgtgccgctgccgccccggctacacaggcactgcctgccaggaatgcagccccggctttcacggcttccccagctgtgtcccctgccactgctctgctgaaggctccctgcacgcagcctgtgacccccggagtgggcagtgcagctgccggccccgtgtgacggggctgcggtgtgacacatgtgtgcccggtgcctacaacttcccctactgcgaagctggctcttgccaccctgccggtctggccccagtggatcctgcccttcctgaggcacaggttccctgtatgtgccgggctcacgtggaggggccgagctgtgaccgctgcaaacctgggttctggggactgagccccagcaaccccgagggctgtacccgctgcagctgcgacctcaggggcacactgggtggagttgctgagtgccagccgggcaccggccagtgcttctgcaagccccacgtgtgcggccaggcctgcgcgtcctgcaaggatggcttctttggactggatcaggctgactattttggctgccgcagctgccggtgtgacattggcggtgcactgggccagagctgtgaaccgaggacgggcgtctgccggtgccgccccaacacccagggccccacctgcagcgagcctgcgagggaccactacctcccggacctgcaccacctgcgcctggagctggaggaggctgccacacctgagggtcacgccgtgcgctttggcttcaaccccctcgagttcgagaacttcagctggaggggctacgcgcagatggcacctgtccagcccaggatcgtggccaggctgaacctgacctcccctgaccttttctggctcgtcttccgatacgtcaaccggggggccatgagtgtgagcgggcgggtctctgtgcgagaggagggcaggtcggccacctgcgccaactgcacagcacagagtcagcccgtggccttcccacccagcacggagcctgccttcatcaccgtgccccagaggggcttcggagagccctttgtgctgaaccctggcacctgggccctgcgtgtggaggccgaaggggtgctcctggactacgtggttctgctgcctagcgcatactacgaggcggcgctcctgcagctgcgggtgactgaggcctgcacataccgtccctctgcccagcagtctggcgacaactgcctcctctacacacacctccccctggatggcttcccctcggccgccgggctggaggccctgtgtcgccaggacaacagcctgccccggccctgccccacggagcagctcagcccgtcgcacccgccactgatcacctgcacgggcagtgatgtggacgtccagcttcaagtggcagtgccacagccaggccgctatgccctagtggtggagtacgccaatgaggatgcccgccaggaggtgggcgtggccgtgcacaccccacagcgggccccccagcaggggctgctctccctgcacccctgcctgtacagcaccctgtgccggggcactgcccgggatacccaggaccacctggctgtcttccacctggactcggaggccagcgtgaggctcacagccgagcaggcacgcttcttcctgcacggggtcactctggtgcccattgaggagttcagcccggagttcgtggagccccgggtcagctgcatcagcagccacggcgcctttggccccaacagtgccgcctgtctgccctcgcgcttcccaaagccgccccagcccatcatcctcagggactgccaggtgatcccgctgccgcccggcctcccgctgacccacgcgcaggatctcactccagccatgtccccagctggaccccgacctcggccccccaccgctgtggaccctgatgcagagcccaccctgctgcgtgagccccaggccaccgtggtcttcaccacccatgtgcccacgctgggccgctatgccttcctgctgcacggctaccagccagcccaccccaccttccccgtggaagtcctcatcaacgccggccgcgtgtggcagggccacgccaacgccagcttctgtccacatggctacggctgccgcaccctggtggtgtgtgagggccaggccctgctggacgtgacccacagcgagctcactgtgaccgtgcgtgtgcccgagggccggtggctctggctggattatgtactcgtggtccctgagaacgtctacagctttggctacctccgggaggagcccctggataaatcctatgacttcatcagccactgcgcagcccagggctaccacatcagccccagcagctcatccctgttctgccgaaacgctgctgcttccctctccctcttctataacaacggagcccgtccatgtggctgccacgaagtaggtgctacaggccccacgtgtgagcccttcgggggccagtgtccctgccatgcccatgtcattggccgtgactgctcccgctgtgccaccggatactggggcttccccaactgcaggcgtgagtaccccagtccttgggcgcccagtggcagggagttggtgccagagcccaaggtggacgggtcgaccagaaagcagggtcaggagaatgttctagagcctggcagggcagcattgctgccccatctgcgggcctgggcccaggacttcagcttgcgggccatgcagaaggtttcagggaccagcaggtggtccacagtctctgacgatgatgttgattctgagcagctgcctccatgtcaggagctgtccaaggctcagcacccggggcaggggtccctgttcttgtctcccccgcccccgtcacactgccacatcccctagggctgcattctgggcctctgagaggggcgggactgggaagaggggtcagtaaaccctgtacccgccccacagcctgtgactgcggtgcccgcctctgtgacgagctcacgggccagtgcatctgcccgccacgcaccatcccgcccgactgcctgctgtgccagccccagacctttggctgccaccccctggtcggctgtgaggagtgtaactgctcagggcccggcatccaggagctcacagaccctacctgtgacacagacagcggccagtgcaagtgcagacccaacgtgactgggcgccgctgtgatacctgctctccgggcttccatggctacccccgctgccgcccctgtgactgtcacgaggcgggcactgcgcctggcgtgtgtgaccccctcacagggcagtgctactgtaaggagaacgtgcagggccccaaatgtgaccagtgcagccttgggaccttctcactggatgctgccaaccccaaaggttgcacccgctgcttctgctttggggccacggagcgctgccggagctcgtcctacacccgccaggagttcgtggatatggagggatgggtgctgctgagcactgaccggcaggtggtgccccacgagcggcagccagggacggagatgctccgtgcagacctgcggcacgtgcctgaggctgtgcccgaggctttccccgagctgtactggcaggccccaccctcctacctgggggaccgggtgtcatcctacggtgggaccctccgttatgaactgcactcagagacccagcggggagatgtctttgtccccatggagagcaggccggatgtggtgctgcagggcaaccagatgagcatcacattcctggagccggcataccccacgcctggccacgttcaccgtgggcagctgcagctggtggaggggaacttccggcatacggagactcgcaacactgtgtcccgcgaggagctcatgatggtgctggccagcctggagcagctgcagatccgtgccctcttctcacagatctcctcggctgtctccctgcgcagggtggcactggaggtggccagcccagcaggccagggggccctggccagcaatgtggagctgtgcctgtgccccgccagctaccggggggactcatgccaggaatgtgcccccggcttctatcgggacgtcaaaggtctcttcctgggccgatgtgtcccttgtcagtgccatggacactcagaccgctgcctccctggctctggcgtctgtgtggactgccagcacaacaccgaaggggcccactgtgagcgctgccaggctggcttcatgagcagcagggacgaccccagcgccccctgtgtcagctgcccctgccccctctcagtgccttccaacaacttcgccgagggctgtgtcctgcgaggcggccgcacccagtgcctctgcaaacctggttatgcaggtgcctcctgcgagcggtgtgcgcccggattctttgggaacccactggtgctgggcagctcctgccagccatgcgactgcagcggcaacggtgaccccaacttgctcttcagcgactgcgaccccctgacgggcgcctgccgtggctgcctgcgccacaccactgggccccgctgcgagatctgtgcccccggcttctacggcaacgccctgctgcccggcaactgcacccggtgcgactgtaccccatgtgggacagaggcctgcgacccccacagcgggcactgcctgtgcaaggcgggcgtgactgggcggcgctgtgaccgctgccaggagggacattttggtttcaatggctgcgggggctgccgcccgtgtgcttgtggaccggccgccgagggctccgagtgccacccccagagcggacagtgccactgccgaccagggaccatgggaccccagtgccgcgagtgtgcccctggctactgggggctccctgagcagggctgcaggcgctgccagtgccctgggggccgctgtgaccctcacacgggccgctgcaactgccccccggggctcagcggggagcgctgcgacacctgcagccagcagcatcaggtgcctgttccaggcgggcctgtgggccacagcatccactgtgaagtgtgtgaccactgtgtggtcctgctcctggatgacctggaacgggccggcgccctcctccccgccattcacgagcaactgcgtggcatcaatgccagctccatggcctgggcccgtctgcacaggctgaacgcctccatcgctgacctgcagagccagctccggagccccctgggcccccgccatgagacggcacagcagctggaggtgctggagcagcagagcacaagcctcgggcaggacgcacggcggctaggcggccaggccgtggggacccgagaccaggcgagccaattgctggccggcaccgaggccacactgggccatgcgaagacgctgttggcggccatccgggctgtggaccgcaccctgagcgagctcatgtcccagacgggccacctggggctggccaatgcctcggctccatcaggtgagcagctgctccggacactggccgaggtggagcggctgctctgggagatgcgggcccgggacctgggggccccgcaggcagcagctgaggctgagttggctgcagcacagagattgctggcccgggtgcaggagcagctgagcagcctctgggaggagaaccaggcactggccacacaaacccgcgaccggctggcccagcacgaggccggcctcatggacctgcgagaggctttgaaccgggcagtggacgccacacgggaggcccaggagctcaacagccgcaaccaggagcgcctggaggaagccctgcaaaggaagcaggagctgtcccgggacaatgccaccctgcaggccactctgcatgcggctagggacaccctggccagcgtcttcagattgctgcacagcctggaccaggctaaggaggagctggagcgcctcgccgccagcctggatggggctcggaccccactgctgcagaggatgcagaccttctccccggcgggcagcaagctgcgtctagtggaggccgccgaggcccacgcacagcagctgggccagctggcactcaatctgtccagcatcatcctggacgtcaaccaggaccgcctcacccagagggccatcgaggcctccaacgcctacagccgcatcctgcaggccgtgcaggctgccgaggatgctgctggccaggccctgcagcaggcggaccacacgtgggcgacggtggtgcggcagggcctggtggaccgagcccagcagctcctggccaacagcactgcactagaagaggccatgctccaggaacagcagaggctgggccttgtgtgggctgccctccagggtgccaggacccagctccgagatgtccgggccaagaaggaccagctggaggcgcacatccaggcggcgcaggccatgcttgccatggacacagacgagacaagcaagaagatcgcacatgccaaggctgtggctgctgaagcccaggacaccgccacccgtgtgcagtcccagctgcaggccatgcaggagaatgtggagcggtggcagggccagtacgagggcctgcggggccaggacctgggccaggcagtgcttgacgcaggccactcagtgtccaccctggagaagacgctgccccagctgctggccaagctgagcatcctggagaaccgtggggtgcacaacgccagcctggccctgtccgccagcattggccgcgtgcgagagctcattgcccaggcccggggggctgccagtaaggtcaaggtgcccatgaagttcaacgggcgctcaggggtgcagctgcgcaccccacgggatcttgccgaccttgctgcctacactgccctcaagttctacctgcagggcccagagcctgagcctgggcagggtaccgaggatcgctttgtgatgtacatgggcagccgccaggccactggggactacatgggtgtgtctctgcgtgacaagaaggtgcactgggtgtatcagctgggtgaggcgggccctgcagtcctaagcatcgatgaggacattggggagcagttcgcagctgtcagcctggacaggactctccagtttggccacatgtccgtcacagtggagagacagatgatccaggaaaccaagggtgacacggtggcccctggggcagaggggctgctcaacctgcggccagacgacttcgtcttctacgtcggggggtaccccagtaccttcacgccccctcccctgcttcgcttccccggctaccggggctgcatcgagatggacacgctgaatgaggaggtggtcagcctctacaacttcgagaggaccttccagctggacacggctgtggacaggccttgtgcccgctccaagtcgaccggggacccgtggctcacggacggctcctacctggacggcaccggcttcgcccgcatcagcttcgacagtcagatcagcaccaccaagcgcttcgagcaggagctgcggctcgtgtcctacagcggggtgctcttcttcctgaagcagcagagccagttcctgtgcttggccgtgcaagaaggcagcctcgtgctgttgtatgactttggggctggcctgaaaaaggccgtcccactgcagcccccaccgcccctgacctcggccagcaaggcgatccaggtgttcctgctggggggcagccgcaagcgtgtgctggtgcgtgtggagcgggccacggtgtacagcgtggagcaggacaatgatctggagctggccgacgcctactacctggggggcgtgccgcccgaccagctgcccccgagcctgcgatggctcttccccaccggaggctcagtccgtggctgcgtcaaaggcatcaaggccctgggcaagtatgtggacctcaagcggctgaacacgacaggcgtgagcgccggctgcaccgccgacctgctggtggggcgcgccatgactttccatggccacggcttccttcgcctggcgctctcgaacgtggcaccgctcactggcaacgtctactccggcttcggcttccacagcgcccaggacagtgccctgctctactaccgggcgtccccggatgggctatgccaggtgtccctgcagcagggccgtgtgagcctacagctcctgaggactgaagtgaaaactcaagcgggcttcgccgatggtgccccccattacgtcgccttctacagcaatgccacgggagtctggctgtatgtcgatgaccagctccagcagatgaagccccaccggggaccaccccccgagctccagccgcagcctgaggggcccccgaggctcctcctgggaggcctgcctgagtctggcaccatttacaacttcagtggctgcatcagcaacgtcttcgtgcagcggctcctgggcccacagcgcgtatttgatctgcagcagaacctgggcagcgtcaatgtgagcacgggctgtgcacccgccctgcaagcccagaccccgggcctggggcctagaggactgcaggccaccgcccggaaggcctcccgccgcagccgtcagcccgcccggcatcctgcctgcatgctgcccccacacctcaggaccacccgagactcctaccagtttgggggttccctgtccagtcacctggagtttgtgggcatcctggcccgacataggaactggcccagtctctccatgcacgtcctcccgcgaagctcccgaggcctcctcctcttcactgcccgtctgaggcccggcagcccctccctggcgctcttcctgagcaatggccacttcgttgcacagatggaaggcctcgggactcggctccgcgcccagagccgccagcgctcccggcctggccgctggcacaaggtctccgtgcgctgggagaagaaccggatcctgctggtgacggacggggcccgggcctggagccaggaggggccgcaccggcagcaccagggggcagagcacccccagccccacaccctctttgtgggcggcctcccggccagcagccacagctccaaacttccggtgaccgtcgggttcagcggctgtgtgaagagactgaggctgcacgggaggcccctgggggcccccacacggatggcaggggtcacaccctgcatcttgggccccctggaggcgggcctgttcttcccaggcagcgggggagttatcactttagacctcccaggagctacactgcctgatgtgggcctggaactggaggtgcggcccctggcagtcaccggactgatcttccacttgggccaggcccggacgcccccctacttgcagttgcaggtgaccgagaagcaagtcctgctgcgggcggatgacggagcaggggagttctccacgtcagtgacccgcccctcagtgctgtgtgatggccagtggcaccggctagcggtgatgaaaagcgggaatgtgctccggctggaggtggacgcgcagagcaaccacaccgtgggccccttgctggcggctgcagctggtgccccagcccctctgtacctcgggggcctgcctgagcccatggccgtgcagccctggccccccgcctactgcggctgcatgaggaggctggcggtgaaccggtcccccgtcgccatgactcgctctgtggaggtccacggggcagtgggggccagtggctgcccagccgcctaggacacagccaaccccggcccctggtcaggcccctgcagctgcctcacaccgccccttgtgctcgcctcataggtgtctatttggactctaagctctacgggtgacagatcttgtttctgaagatggtttaagttatagcttcttaaacgaaagaataaaatactgcaaaatgttttta

SEQ ID NO: 406209 - DNA, 6054 bp, Homo sapiens
cctagaaggagtggaaagagtaggccctggtccacatggagtgggtggtcaccagccccaaggcctggtcattcccgagacaggacatccgtgtggctttgagagctatgtcctcaaacagcagccaggtgctggcccacctccagccggccgaggccaggagttcctgaccagcctctgacccagcggtgaccatgctccacgggttcccagtgcctcgtgcctgcaggatccctgagggtctgacttgtgagcttgcagggtggggcccctcgtcctctcaatcgctgatgccacctgcccccgtacaccctcaggaatgtgcccccggcttctatcgggacgtcaaaggtctcttcctgggccgatgtgtcccttgtcagtgccatggacactcagaccgctgcctccctggctctggcgtctgtgtggactgccagcacaacaccgaaggggcccactgtgagcgctgccaggctggcttcatgagcagcagggacgaccccagcgccccctgtgtcagctgcccctgccccctctcagtgccttccaacaacttcgccgagggctgtgtcctgcgaggcggccgcacccagtgcctctgcaaacctggttatgcaggtgcctcctgcgagcggtgtgcgcccggattctttgggaacccactggtgctgggcagctcctgccagccatgcgactgcagcggcaacggtgaccccaacttgctcttcagcgactgcgaccccctgacgggcgcctgccgtggctgcctgcgccacaccactgggccccgctgcgagatctgtgcccccggcttctacggcaacgccctgctgcccggcaactgcacccggtgcgactgtaccccatgtgggacagaggcctgcgacccccacagcgggcactgcctgtgcaaggcgggcgtgactgggcggcgctgtgaccgctgccaggagggacattttggtttcaatggctgcgggggctgccgcccgtgtgcttgtggaccggccgccgagggctccgagtgccacccccagagcggacagtgccactgccgaccagggaccatgggaccccagtgccgcgagtgtgcccctggctactgggggctccctgagcagggctgcaggcgctgccagtgccctgggggccgctgtgaccctcacacgggccgctgcaactgccccccggggctcagcggggagcgctgcgacacctgcagccagcagcatcaggtgcctgttccaggcgggcctgtgggccacagcatccactgtgaagtgtgtgaccactgtgtggtcctgctcctggatgacctggaacgggccggcgccctcctccccgccattcacgagcaactgcgtggcatcaatgccagctccatggcctgggcccgtctgcacaggctgaacgcctccatcgctgacctgcagagccagctccggagccccctgggcccccgccatgagacggcacagcagctggaggtgctggagcagcagagcacaagcctcgggcaggacgcacggcggctaggcggccaggccgtggggacccgagaccaggcgagccaattgctggccggcaccgaggccacactgggccatgcgaagacgctgttggcggccatccgggctgtggaccgcaccctgagcgagctcatgtcccagacgggccacctggggctggccaatgcctcggctccatcaggtgagcagctgctccggacactggccgaggtggagcggctgctctgggagatgcgggcccgggacctgggggccccgcaggcagcagctgaggctgagttggctgcagcacagagattgctggcccgggtgcaggagcagctgagcagcctctgggaggagaaccaggcactggccacacaaacccgcgaccggctggcccagcacgaggccggcctcatggacctgcgagaggctttgaaccgggcagtggacgccacacgggaggcccaggagctcaacagccgcaaccaggagcgcctggaggaagccctgcaaaggaagcaggagctgtcccgggacaatgccaccctgcaggccactctgcatgcggctagggacaccctggccagcgtcttcagattgctgcacagcctggaccaggctaaggaggagctggagcgcctcgccgccagcctggatggggctcggaccccactgctgcagaggatgcagaccttctccccggcgggcagcaagctgcgtctagtggaggccgccgaggcccacgcacagcagctgggccagctggcactcaatctgtccagcatcatcctggacgtcaaccaggaccgcctcacccagagggccatcgaggcctccaacgcctacagccgcatcctgcaggccgtgcaggctgccgaggatgctgctggccaggccctgcagcaggcggaccacacgtgggcgacggtggtgcggcagggcctggtggaccgagcccagcagctcctggccaacagcactgcactagaagaggccatgctccaggaacagcagaggctgggccttgtgtgggctgccctccagggtgccaggacccagctccgagatgtccgggccaagaaggaccagctggaggcgcacatccaggcggcgcaggccatgcttgccatggacacagacgagacaagcaagaagatcgcacatgccaaggctgtggctgctgaagcccaggacaccgccacccgtgtgcagtcccagctgcaggccatgcaggagaatgtggagcggtggcagggccagtacgagggcctgcggggccaggacctgggccaggcagtgcttgacgcaggccactcagtgtccaccctggagaagacgctgccccagctgctggccaagctgagcatcctggagaaccgtggggtgcacaacgccagcctggccctgtccgccagcattggccgcgtgcgagagctcattgcccaggcccggggggctgccagtaaggtcaaggtgcccatgaagttcaacgggcgctcaggggtgcagctgcgcaccccacgggatcttgccgaccttgctgcctacactgccctcaagttctacctgcagggcccagagcctgagcctgggcagggtaccgaggatcgctttgtgatgtacatgggcagccgccaggccactggggactacatgggtgtgtctctgcgtgacaagaaggtgcactgggtgtatcagctgggtgaggcgggccctgcagtcctaagcatcgatgaggacattggggagcagttcgcagctgtcagcctggacaggactctccagtttggccacatgtccgtcacagtggagagacagatgatccaggaaaccaagggtgacacggtggcccctggggcagaggggctgctcaacctgcggccagacgacttcgtcttctacgtcggggggtaccccagtaccttcacgccccctcccctgcttcgcttccccggctaccggggctgcatcgagatggacacgctgaatgaggaggtggtcagcctctacaacttcgagaggaccttccagctggacacggctgtggacaggccttgtgcccgctccaagtcgaccggggacccgtggctcacggacggctcctacctggacggcaccggcttcgcccgcatcagcttcgacagtcagatcagcaccaccaagcgcttcgagcaggagctgcggctcgtgtcctacagcggggtgctcttcttcctgaagcagcagagccagttcctgtgcttggccgtgcaagaaggcagcctcgtgctgttgtatgactttggggctggcctgaaaaaggccgtcccactgcagcccccaccgcccctgacctcggccagcaaggcgatccaggtgttcctgctggggggcagccgcaagcgtgtgctggtgcgtgtggagcgggccacggtgtacagcgtggagcaggacaatgatctggagctggccgacgcctactacctggggggcgtgccgcccgaccagctgcccccgagcctgcgatggctcttccccaccggaggctcagtccgtggctgcgtcaaaggcatcaaggccctgggcaagtatgtggacctcaagcggctgaacacgacaggcgtgagcgccggctgcaccgccgacctgctggtggggcgcgccatgactttccatggccacggcttccttcgcctggcgctctcgaacgtggcaccgctcactggcaacgtctactccggcttcggcttccacagcgcccaggacagtgccctgctctactaccgggcgtccccggatgggctatgccaggtgtccctgcagcagggccgtgtgagcctacagctcctgaggactgaagtgaaaactcaagcgggcttcgccgatggtgccccccattacgtcgccttctacagcaatgccacgggagtctggctgtatgtcgatgaccagctccagcagatgaagccccaccggggaccaccccccgagctccagccgcagcctgaggggcccccgaggctcctcctgggaggcctgcctgagtctggcaccatttacaacttcagtggctgcatcagcaacgtcttcgtgcagcggctcctgggcccacagcgcgtatttgatctgcagcagaacctgggcagcgtcaatgtgagcacgggctgtgcacccgccctgcaagcccagaccccgggcctggggcctagaggactgcaggccaccgcccggaaggcctcccgccgcagccgtcagcccgcccggcatcctgcctgcatgctgcccccacacctcaggaccacccgagactcctaccagtttgggggttccctgtccagtcacctggagtttgtgggcatcctggcccgacataggaactggcccagtctctccatgcacgtcctcccgcgaagctcccgaggcctcctcctcttcactgcccgtctgaggcccggcagcccctccctggcgctcttcctgagcaatggccacttcgttgcacagatggaaggcctcgggactcggctccgcgcccagagccgccagcgctcccggcctggccgctggcacaaggtctccgtgcgctgggagaagaaccggatcctgctggtgacggacggggcccgggcctggagccaggaggggccgcaccggcagcaccagggggcagagcacccccagccccacaccctctttgtgggcggcctcccggccagcagccacagctccaaacttccggtgaccgtcgggttcagcggctgtgtgaagagactgaggctgcacgggaggcccctgggggcccccacacggatggcaggggtcacaccctgcatcttgggccccctggaggcgggcctgttcttcccaggcagcgggggagttatcactttagacctcccaggagctacactgcctgatgtgggcctggaactggaggtgcggcccctggcagtcaccggactgatcttccacttgggccaggcccggacgcccccctacttgcagttgcaggtgaccgagaagcaagtcctgctgcgggcggatgacggagcaggggagttctccacgtcagtgacccgcccctcagtgctgtgtgatggccagtggcaccggctagcggtgatgaaaagcgggaatgtgctccggctggaggtggacgcgcagagcaaccacaccgtgggccccttgctggcggctgcagctggtgccccagcccctctgtacctcgggggcctgcctgagcccatggccgtgcagccctggccccccgcctactgcggctgcatgaggaggctggcggtgaaccggtcccccgtcgccatgactcgctctgtggaggtccacggggcagtgggggccagtggctgcccagccgcctaggacacagccaaccccggcccctggtcaggcccctgcagctgcctcacaccgccccttgtgctcgcctcataggtgtctatttggactctaagctctacgggtgacagatcttgtttctgaagatggtttaagttatagcttcttaaacgaaagaataaaatactgcaaaatgttttta

SEQ ID NO: 406210 - DNA, 10943 bp, Homo sapiens
ggggacgcggcccggagccgggaagatggcgaagcggctctgcgcggggagcgcactgtgtgttcgcggcccccggggccccgcgccgctgctgctggtcgggctggcgctgctgggcgcggcgcgggcgcgggaggaggcgggcggcggcttcagcctgcacccgccctacttcaacctggccgagggcgcccgcatcgccgcctccgcgacctgcggagaggaggccccggcgcgcggctccccgcgccccaccgaggacctttactgcaagctggtagggggccccgtggccggcggcgaccccaaccagaccatccggggccagtactgtgacatctgcacggctgccaacagcaacaaggcacaccccgcgagcaatgccatcgatggcacggagcgctggtggcagagtccaccgctgtcccgcggcctggagtacaacgaggtcaacgtcaccctggacctgggccaggtcttccacgtggcctacgtcctcatcaagtttgccaactcaccccggccggacctctgggtgctggagcggtccatggacttcggccgcacctaccagccctggcagttctttgcctcctccaagagggactgtctggagcggttcgggccacagacgctggagcgcatcacacgggacgacgcggccatctgcaccaccgagtactcacgcatcgtgcccctggagaacggagagatcgtggtgtccctggtgaacggacgtccgggcgccatgaatttctcctactcgccgctgctacgtgagttcaccaaggccaccaacgtccgcctgcgcttcctgcgtaccaacacgctgctgggccatctcatggggaaggcgctgcgggaccccacggtcacccgccggtattattacagcatcaaggatatcagcatcggaggccgctgtgtctgccacggccacgcggatgcctgcgatgccaaagaccccacggacccgttcaggctgcagtgcacctgccagcacaacacctgcgggggcacctgcgaccgctgctgccccggcttcaatcagcagccgtggaagcctgcgactgccaacagtgccaacgagtgccagtcctgtaactgctacggccatgccaccgactgttactacgaccctgaggtggaccggcgccgcgccagccagagcctggatggcacctatcagggtgggggtgtctgtatcgactgccagcaccacaccgccggcgtcaactgtgagcgctgcctgcccggcttctaccgctctcccaaccaccctctcgactcgccccacgtctgccgccgctgcaactgcgagtccgacttcacggatggcacctgcgaggacctgacgggtcgatgctactgccggcccaacttctctggggagcggtgtgacgtgtgtgccgagggcttcacgggcttcccaagctgctacccgacgccctcgtcctccaatgacaccagggagcaggtgctgccagccggccagattgtgaattgtgactgcagcgcggcagggacccagggcaacgcctgccggaaggacccaagggtgggacgctgtctgtgcaaacccaacttccaaggcacccattgtgagctctgcgcgccagggttctacggccccggctgccagccctgccagtgttccagccctggagtggccgatgaccgctgtgaccctgacacaggccagtgcaggtgccgagtgggcttcgagggggccacatgtgatcgctgtgcccccggctactttcacttccctctctgccagttgtgtggctgcagccctgcaggaaccttgcccgagggctgcgatgaggccggccgctgcctatgccagcctgagtttgctggacctcattgtgaccggtgccgccctggctaccatggtttccccaactgccaagcatgcacctgcgaccctcggggagccctggaccagctctgtggggcgggaggtttgtgccgctgccgccccggctacacaggcactgcctgccaggaatgcagccccggctttcacggcttccccagctgtgtcccctgccactgctctgctgaaggctccctgcacgcagcctgtgacccccggagtgggcagtgcagctgccggccccgtgtgacggggctgcggtgtgacacatgtgtgcccggtgcctacaacttcccctactgcgaagctggctcttgccaccctgccggtctggccccagtggatcctgcccttcctgaggcacaggttccctgtatgtgccgggctcacgtggaggggccgagctgtgaccgctgcaaacctgggttctggggactgagccccagcaaccccgagggctgtacccgctgcagctgcgacctcaggggcacactgggtggagttgctgagtgccagccgggcaccggccagtgcttctgcaagccccacgtgtgcggccaggcctgcgcgtcctgcaaggatggcttctttggactggatcaggctgactattttggctgccgcagctgccggtgtgacattggcggtgcactgggccagagctgtgaaccgaggacgggcgtctgccggtgccgccccaacacccagggccccacctgcagcgagcctgcgagggaccactacctcccggacctgcaccacctgcgcctggagctggaggaggctgccacacctgagggtcacgccgtgcgctttggcttcaaccccctcgagttcgagaacttcagctggaggggctacgcgcagatggcacctgtccagcccaggatcgtggccaggctgaacctgacctcccctgaccttttctggctcgtcttccgatacgtcaaccggggggccatgagtgtgagcgggcgggtctctgtgcgagaggagggcaggtcggccacctgcgccaactgcacagcacagagtcagcccgtggccttcccacccagcacggagcctgccttcatcaccgtgccccagaggggcttcggagagccctttgtgctgaaccctggcacctgggccctgcgtgtggaggccgaaggggtgctcctggactacgtggttctgctgcctagcgcatactacgaggcggcgctcctgcagctgcgggtgactgaggcctgcacataccgtccctctgcccagcagtctggcgacaactgcctcctctacacacacctccccctggatggcttcccctcggccgccgggctggaggccctgtgtcgccaggacaacagcctgccccggccctgccccacggagcagctcagcccgtcgcacccgccactgatcacctgcacgggcagtgatgtggacgtccagcttcaagtggcagtgccacagccaggccgctatgccctagtggtggagtacgccaatgaggatgcccgccaggaggtgggcgtggccgtgcacaccccacagcgggccccccagcaggggctgctctccctgcacccctgcctgtacagcaccctgtgccggggcactgcccgggatacccaggaccacctggctgtcttccacctggactcggaggccagcgtgaggctcacagccgagcaggcacgcttcttcctgcacggggtcactctggtgcccattgaggagttcagcccggagttcgtggagccccgggtcagctgcatcagcagccacggcgcctttggccccaacagtgccgcctgtctgccctcgcgcttcccaaagccgccccagcccatcatcctcagggactgccaggtgatcccgctgccgcccggcctcccgctgacccacgcgcaggatctcactccagccatgtccccagctggaccccgacctcggccccccaccgctgtggaccctgatgcagagcccaccctgctgcgtgagccccaggccaccgtggtcttcaccacccatgtgcccacgctgggccgctatgccttcctgctgcacggctaccagccagcccaccccaccttccccgtggaagtcctcatcaacgccggccgcgtgtggcagggccacgccaacgccagcttctgtccacatggctacggctgccgcaccctggtggtgtgtgagggccaggccctgctggacgtgacccacagcgagctcactgtgaccgtgcgtgtgcccgagggccggtggctctggctggattatgtactcgtggtccctgagaacgtctacagctttggctacctccgggaggagcccctggataaatcctatgacttcatcagccactgcgcagcccagggctaccacatcagccccagcagctcatccctgttctgccgaaacgctgctgcttccctctccctcttctataacaacggagcccgtccatgtggctgccacgaagtaggtgctacaggccccacgtgtgagcccttcgggggccagtgtccctgccatgcccatgtcattggccgtgactgctcccgctgtgccaccggatactggggcttccccaactgcaggccctgtgactgcggtgcccgcctctgtgacgagctcacgggccagtgcatctgcccgccacgcaccatcccgcccgactgcctgctgtgccagccccagacctttggctgccaccccctggtcggctgtgaggagtgtaactgctcagggcccggcatccaggagctcacagaccctacctgtgacacagacagcggccagtgcaagtgcagacccaacgtgactgggcgccgctgtgatacctgctctccgggcttccatggctacccccgctgccgcccctgtgactgtcacgaggcgggcactgcgcctggcgtgtgtgaccccctcacagggcagtgctactgtaaggagaacgtgcagggccccaaatgtgaccagtgcagccttgggaccttctcactggatgctgccaaccccaaaggttgcacccgctgcttctgctttggggccacggagcgctgccggagctcgtcctacacccgccaggagttcgtggatatggagggatgggtgctgctgagcactgaccggcaggtggtgccccacgagcggcagccagggacggagatgctccgtgcagacctgcggcacgtgcctgaggctgtgcccgaggctttccccgagctgtactggcaggccccaccctcctacctgggggaccgggtgtcatcctacggtgggaccctccgttatgaactgcactcagagacccagcggggagatgtctttgtccccatggagagcaggccggatgtggtgctgcagggcaaccagatgagcatcacattcctggagccggcataccccacgcctggccacgttcaccgtgggcagctgcagctggtggaggggaacttccggcatacggagactcgcaacactgtgtcccgcgaggagctcatgatggtgctggccagcctggagcagctgcagatccgtgccctcttctcacagatctcctcggctgtctccctgcgcagggtggcactggaggtggccagcccagcaggccagggggccctggccagcaatgtggagctgtgcctgtgccccgccagctaccggggggactcatgccaggaatgtgcccccggcttctatcgggacgtcaaaggtctcttcctgggccgatgtgtcccttgtcagtgccatggacactcagaccgctgcctccctggctctggcgtctgtgtggactgccagcacaacaccgaaggggcccactgtgagcgctgccaggctggcttcatgagcagcagggacgaccccagcgccccctgtgtcagctgcccctgccccctctcagtgccttccaacaacttcgccgagggctgtgtcctgcgaggcggccgcacccagtgcctctgcaaacctggttatgcaggtgcctcctgcgagcggtgtgcgcccggattctttgggaacccactggtgctgggcagctcctgccagccatgcgactgcagcggcaacggtgaccccaacttgctcttcagcgactgcgaccccctgacgggcgcctgccgtggctgcctgcgccacaccactgggccccgctgcgagatctgtgcccccggcttctacggcaacgccctgctgcccggcaactgcacccggtgcgactgtaccccatgtgggacagaggcctgcgacccccacagcgggcactgcctgtgcaaggcgggcgtgactgggcggcgctgtgaccgctgccaggagggacattttggtttcaatggctgcgggggctgccgcccgtgtgcttgtggaccggccgccgagggctccgagtgccacccccagagcggacagtgccactgccgaccagggaccatgggaccccagtgccgcgagtgtgcccctggctactgggggctccctgagcagggctgcaggcgctgccagtgccctgggggccgctgtgaccctcacacgggccgctgcaactgccccccggggctcagcggggagcgctgcgacacctgcagccagcagcatcaggtgcctgttccaggcgggcctgtgggccacagcatccactgtgaagtgtgtgaccactgtgtggtcctgctcctggatgacctggaacgggccggcgccctcctccccgccattcacgagcaactgcgtggcatcaatgccagctccatggcctgggcccgtctgcacaggctgaacgcctccatcgctgacctgcagagccagctccggagccccctgggcccccgccatgagacggcacagcagctggaggtgctggagcagcagagcacaagcctcgggcaggacgcacggcggctaggcggccaggccgtggggacccgagaccaggcgagccaattgctggccggcaccgaggccacactgggccatgcgaagacgctgttggcggccatccgggctgtggaccgcaccctgagcgagctcatgtcccagacgggccacctggggctggccaatgcctcggctccatcaggtgagcagctgctccggacactggccgaggtggagcggctgctctgggagatgcgggcccgggacctgggggccccgcaggcagcagctgaggctgagttggctgcagcacagagattgctggcccgggtgcaggagcagctgagcagcctctgggaggagaaccaggcactggccacacaaacccgcgaccggctggcccagcacgaggccggcctcatggacctgcgagaggctttgaaccgggcagtggacgccacacgggaggcccaggagctcaacagccgcaaccaggagcgcctggaggaagccctgcaaaggaagcaggagctgtcccgggacaatgccaccctgcaggccactctgcatgcggctagggacaccctggccagcgtcttcagattgctgcacagcctggaccaggctaaggaggagctggagcgcctcgccgccagcctggatggggctcggaccccactgctgcagaggatgcagaccttctccccggcgggcagcaagctgcgtctagtggaggccgccgaggcccacgcacagcagctgggccagctggcactcaatctgtccagcatcatcctggacgtcaaccaggaccgcctcacccagagggccatcgaggcctccaacgcctacagccgcatcctgcaggccgtgcaggctgccgaggatgctgctggccaggccctgcagcaggcggaccacacgtgggcgacggtggtgcggcagggcctggtggaccgagcccagcagctcctggccaacagcactgcactagaagaggccatgctccaggaacagcagaggctgggccttgtgtgggctgccctccagggtgccaggacccagctccgagatgtccgggccaagaaggaccagctggaggcgcacatccaggcggcgcaggccatgcttgccatggacacagacgagacaagcaagaagatcgcacatgccaaggctgtggctgctgaagcccaggacaccgccacccgtgtgcagtcccagctgcaggccatgcaggagaatgtggagcggtggcagggccagtacgagggcctgcggggccaggacctgggccaggcagtgcttgacgcaggccactcagtgtccaccctggagaagacgctgccccagctgctggccaagctgagcatcctggagaaccgtggggtgcacaacgccagcctggccctgtccgccagcattggccgcgtgcgagagctcattgcccaggcccggggggctgccagtaaggtcaaggtgcccatgaagttcaacgggcgctcaggggtgcagctgcgcaccccacgggatcttgccgaccttgctgcctacactgccctcaagttctacctgcagggcccagagcctgagcctgggcagggtaccgaggatcgctttgtgatgtacatgggcagccgccaggccactggggactacatgggtgtgtctctgcgtgacaagaaggtgcactgggtgtatcagctgggtgaggcgggccctgcagtcctaagcatcgatgaggacattggggagcagttcgcagctgtcagcctggacaggactctccagtttggccacatgtccgtcacagtggagagacagatgatccaggaaaccaagggtgacacggtggcccctggggcagaggggctgctcaacctgcggccagacgacttcgtcttctacgtcggggggtaccccagtaccttcacgccccctcccctgcttcgcttccccggctaccggggctgcatcgagatggacacgctgaatgaggaggtggtcagcctctacaacttcgagaggaccttccagctggacacggctgtggacaggccttgtgcccgctccaagtcgaccggggacccgtggctcacggacggctcctacctggacggcaccggcttcgcccgcatcagcttcgacagtcagatcagcaccaccaagcgcttcgagcaggagctgcggctcgtgtcctacagcggggtgctcttcttcctgaagcagcagagccagttcctgtgcttggccgtgcaagaaggcagcctcgtgctgttgtatgactttggggctggcctgaaaaaggccgtcccactgcagcccccaccgcccctgacctcggccagcaaggcgatccaggtgttcctgctggggggcagccgcaagcgtgtgctggtgcgtgtggagcgggccacggtgtacagcgtggagcaggacaatgatctggagctggccgacgcctactacctggggggcgtgccgcccgaccagctgcccccgagcctgcgatggctcttccccaccggaggctcagtccgtggctgcgtcaaaggcatcaaggccctgggcaagtatgtggacctcaagcggctgaacacgacaggcgtgagcgccggctgcaccgccgacctgctggtggggcgcgccatgactttccatggccacggcttccttcgcctggcgctctcgaacgtggcaccgctcactggcaacgtctactccggcttcggcttccacagcgcccaggacagtgccctgctctactaccgggcgtccccggatgggctatgccaggtgtccctgcagcagggccgtgtgagcctacagctcctgaggactgaagtgaaaactcaagcgggcttcgccgatggtgccccccattacgtcgccttctacagcaatgccacgggagtctggctgtatgtcgatgaccagctccagcagatgaagccccaccggggaccaccccccgagctccagccgcagcctgaggggcccccgaggctcctcctgggaggcctgcctgagtctggcaccatttacaacttcagtggctgcatcagcaacgtcttcgtgcagcggctcctgggcccacagcgcgtatttgatctgcagcagaacctgggcagcgtcaatgtgagcacgggctgtgcacccgccctgcaagcccagaccccgggcctggggcctagaggactgcaggccaccgcccggaaggcctcccgccgcagccgtcagcccgcccggcatcctgcctgcatgctgcccccacacctcaggaccacccgagactcctaccagtttgggggttccctgtccagtcacctggagtttgtgggcatcctggcccgacataggaactggcccagtctctccatgcacgtcctcccgcgaagctcccgaggcctcctcctcttcactgcccgtctgaggcccggcagcccctccctggcgctcttcctgagcaatggccacttcgttgcacagatggaaggcctcgggactcggctccgcgcccagagccgccagcgctcccggcctggccgctggcacaaggtctccgtgcgctgggagaagaaccggatcctgctggtgacggacggggcccgggcctggagccaggaggggccgcaccggcagcaccagggggcagagcacccccagccccacaccctctttgtgggcggcctcccggccagcagccacagctccaaacttccggtgaccgtcgggttcagcggctgtgtgaagagactgaggctgcacgggaggcccctgggggcccccacacggatggcaggggtcacaccctgcatcttgggccccctggaggcgggcctgttcttcccaggcagcgggggagttatcactttagagcccatggccgtgcagccctggccccccgcctactgcggctgcatgaggaggctggcggtgaaccggtcccccgtcgccatgactcgctctgtggaggtccacggggcagtgggggccagtggctgcccagccgcctaggacacagccaaccccggcccctggtcaggcccctgcagctgcctcacaccgccccttgtgctcgcctcataggtgtctatttggactctaagctctacgggtgacagatcttgtttctgaagatggtttaagttatagcttcttaaacgaaagaataaaatactgcaaaatgttttta

SEQ ID NO: 406211 - DNA, 2821 bp, Homo sapiens
gccgcgggttcttttggtatcttgcctcagtccgtcctgctgtagtctgaagtccccttggtccatcctggaggggaggcgcctcaggccaggtgccctgacccagccctgtgcccacagccccctcccctgcttcgcttccccggctaccggggctgcatcgagatggacacgctgaatgaggaggtggtcagcctctacaacttcgagaggaccttccagctggacacggctgtggacaggccttgtgcccgctccaagtcgaccggggacccgtggctcacggacggctcctacctggacggcaccggcttcgcccgcatcagcttcgacagtcagatcagcaccaccaagcgcttcgagcaggagctgcggctcgtgtcctacagcggggtgctcttcttcctgaagcagcagagccagttcctgtgcttggccgtgcaagaaggcagcctcgtgctgttgtatgactttggggctggcctgaaaaaggccgtcccactgcagcccccaccgcccctgacctcggccagcaaggcgatccaggtgttcctgctggggggcagccgcaagcgtgtgctggtgcgtgtggagcgggccacggtgtacagcgtggagcaggacaatgatctggagctggccgacgcctactacctggggggcgtgccgcccgaccagctgcccccgagcctgcgatggctcttccccaccggaggctcagtccgtggctgcgtcaaaggcatcaaggccctgggcaagtatgtggacctcaagcggctgaacacgacaggcgtgagcgccggctgcaccgccgacctgctggtggggcgcgccatgactttccatggccacggcttccttcgcctggcgctctcgaacgtggcaccgctcactggcaacgtctactccggcttcggcttccacagcgcccaggacagtgccctgctctactaccgggcgtccccggatgggctatgccaggtgtccctgcagcagggccgtgtgagcctacagctcctgaggactgaagtgaaaactcaagcgggcttcgccgatggtgccccccattacgtcgccttctacagcaatgccacgggagtctggctgtatgtcgatgaccagctccagcagatgaagccccaccggggaccaccccccgagctccagccgcagcctgaggggcccccgaggctcctcctgggaggcctgcctgagtctggcaccatttacaacttcagtggctgcatcagcaacgtcttcgtgcagcggctcctgggcccacagcgcgtatttgatctgcagcagaacctgggcagcgtcaatgtgagcacgggctgtgcacccgccctgcaagcccagaccccgggcctggggcctagaggactgcaggccaccgcccggaaggcctcccgccgcagccgtcagcccgcccggcatcctgcctgcatgctgcccccacacctcaggaccacccgagactcctaccagtttgggggttccctgtccagtcacctggagtttgtgggcatcctggcccgacataggaactggcccagtctctccatgcacgtcctcccgcgaagctcccgaggcctcctcctcttcactgcccgtctgaggcccggcagcccctccctggcgctcttcctgagcaatggccacttcgttgcacagatggaaggcctcgggactcggctccgcgcccagagccgccagcgctcccggcctggccgctggcacaaggtctccgtgcgctgggagaagaaccggatcctgctggtgacggacggggcccgggcctggagccaggaggggccgcaccggcagcaccagggggcagagcacccccagccccacaccctctttgtgggcggcctcccggccagcagccacagctccaaacttccggtgaccgtcgggttcagcggctgtgtgaagagactgaggctgcacgggaggcccctgggggcccccacacggatggcaggggtcacaccctgcatcttgggccccctggaggcgggcctgttcttcccaggcagcgggggagttatcactttagacctcccaggagctacactgcctgatgtgggcctggaactggaggtgcggcccctggcagtcaccggactgatcttccacttgggccaggcccggacgcccccctacttgcagttgcaggtgaccgagaagcaagtcctgctgcgggcggatgacggagcaggggagttctccacgtcagtgacccgcccctcagtgctgtgtgatggccagtggcaccggctagcggtgatgaaaagcgggaatgtgctccggctggaggtggacgcgcagagcaaccacaccgtgggccccttgctggcggctgcagctggtgccccagcccctctgtacctcgggggcctgcctgagcccatggccgtgcagccctggccccccgcctactgcggctgcatgaggaggctggcggtgaaccggtcccccgtcgccatgactcgctctgtggaggtccacggggcagtgggggccagtggctgcccagccgcctaggacacagccaaccccggcccctggtcaggcccctgcagctgcctcacaccgccccttgtgctcgcctcataggtgtctatttggactctaagctctacgggtgacagatcttgtttctgaagatggtttaagttatagcttcttaaacgaaagaataaaatactgcaaaatgtttttatatttggcccttccacccatttttaattgtgagagatttgtcaccaatcatcactggttcctccttaaaaattaaaaagtaacttctgtgtaa

SEQ ID NO: 406212 - DNA, 8639 bp, Homo sapiens
ggggacgcggcccggagccgggaagatggcgaagcggctctgcgcggggagcgcactgtgtgttcgcggcccccggggccccgcgccgctgctgctggtcgggctggcgctgctgggcgcggcgcgggcgcgggaggaggcgggcggcggcttcagcctgcacccgccctacttcaacctggccgagggcgcccgcatcgccgcctccgcgacctgcggagaggaggccccggcgcgcggctccccgcgccccaccgaggacctttactgcaagctggtagggggccccgtggccggcggcgaccccaaccagaccatccggggccagtactgtgacatctgcacggctgccaacagcaacaaggcacaccccgcgagcaatgccatcgatggcacggagcgctggtggcagagtccaccgctgtcccgcggcctggagtacaacgaggtcaacgtcaccctggacctgggccaggtcttccacgtggcctacgtcctcatcaagtttgccaactcaccccggccggacctctgggtgctggagcggtccatggacttcggccgcacctaccagccctggcagttctttgcctcctccaagagggactgtctggagcggttcgggccacagacgctggagcgcatcacacgggacgacgcggccatctgcaccaccgagtactcacgcatcgtgcccctggagaacggagagatcgtggtgtccctggtgaacggacgtccgggcgccatgaatttctcctactcgccgctgctacgtgagttcaccaaggccaccaacgtccgcctgcgcttcctgcgtaccaacacgctgctgggccatctcatggggaaggcgctgcgggaccccacggtcacccgccggtattattacagcatcaaggatatcagcatcggaggccgctgtgtctgccacggccacgcggatgcctgcgatgccaaagaccccacggacccgttcaggctgcagtgcacctgccagcacaacacctgcgggggcacctgcgaccgctgctgccccggcttcaatcagcagccgtggaagcctgcgactgccaacagtgccaacgagtgccagtcctgtaactgctacggccatgccaccgactgttactacgaccctgaggtggaccggcgccgcgccagccagagcctggatggcacctatcagggtgggggtgtctgtatcgactgccagcaccacaccgccggcgtcaactgtgagcgctgcctgcccggcttctaccgctctcccaaccaccctctcgactcgccccacgtctgccgccgctgcaactgcgagtccgacttcacggatggcacctgcgaggacctgacgggtcgatgctactgccggcccaacttctctggggagcggtgtgacgtgtgtgccgagggcttcacgggcttcccaagctgctacccgacgccctcgtcctccaatgacaccagggagcaggtgctgccagccggccagattgtgaattgtgactgcagcgcggcagggacccagggcaacgcctgccggaaggacccaagggtgggacgctgtctgtgcaaacccaacttccaaggcacccattgtgagctctgcgcgccagggttctacggccccggctgccagccctgccagtgttccagccctggagtggccgatgaccgctgtgaccctgacacaggccagtgcaggtgccgagtgggcttcgagggggccacatgtgatcgctgtgcccccggctactttcacttccctctctgccagttgtgtggctgcagccctgcaggaaccttgcccgagggctgcgatgaggccggccgctgcctatgccagcctgagtttgctggacctcattgtgaccggtgccgccctggctaccatggtttccccaactgccaagcatgcacctgcgaccctcggggagccctggaccagctctgtggggcgggaggtttgtgccgctgccgccccggctacacaggcactgcctgccaggaatgcagccccggctttcacggcttccccagctgtgtcccctgccactgctctgctgaaggctccctgcacgcagcctgtgacccccggagtgggcagtgcagctgccggccccgtgtgacggggctgcggtgtgacacatgtgtgcccggtgcctacaacttcccctactgcgaagctggctcttgccaccctgccggtctggccccagtggatcctgcccttcctgaggcacaggttccctgtatgtgccgggctcacgtggaggggccgagctgtgaccgctgcaaacctgggttctggggactgagccccagcaaccccgagggctgtacccgctgcagctgcgacctcaggggcacactgggtggagttgctgagtgccagccgggcaccggccagtgcttctgcaagccccacgtgtgcggccaggcctgcgcgtcctgcaaggatggcttctttggactggatcaggctgactattttggctgccgcagctgccggtgtgacattggcggtgcactgggccagagctgtgaaccgaggacgggcgtctgccggtgccgccccaacacccagggccccacctgcagcgagcctgcgagggaccactacctcccggacctgcaccacctgcgcctggagctggaggaggctgccacacctgagggtcacgccgtgcgctttggcttcaaccccctcgagttcgagaacttcagctggaggggctacgcgcagatggcacctgtccagcccaggatcgtggccaggctgaacctgacctcccctgaccttttctggctcgtcttccgatacgtcaaccggggggccatgagtgtgagcgggcgggtctctgtgcgagaggagggcaggtcggccacctgcgccaactgcacagcacagagtcagcccgtggccttcccacccagcacggagcctgccttcatcaccgtgccccagaggggcttcggagagccctttgtgctgaaccctggcacctgggccctgcgtgtggaggccgaaggggtgctcctggactacgtggttctgctgcctagcgcatactacgaggcggcgctcctgcagctgcgggtgactgaggcctgcacataccgtccctctgcccagcagtctggcgacaactgcctcctctacacacacctccccctggatggcttcccctcggccgccgggctggaggccctgtgtcgccaggacaacagcctgccccggccctgccccacggagcagctcagcccgtcgcacccgccactgatcacctgcacgggcagtgatgtggacgtccagcttcaagtggcagtgccacagccaggccgctatgccctagtggtggagtacgccaatgaggatgcccgccaggaggtgggcgtggccgtgcacaccccacagcgggccccccagcaggggctgctctccctgcacccctgcctgtacagcaccctgtgccggggcactgcccgggatacccaggaccacctggctgtcttccacctggactcggaggccagcgtgaggctcacagccgagcaggcacgcttcttcctgcacggggtcactctggtgcccattgaggagttcagcccggagttcgtggagccccgggtcagctgcatcagcagccacggcgcctttggccccaacagtgccgcctgtctgccctcgcgcttcccaaagccgccccagcccatcatcctcagggactgccaggtgatcccgctgccgcccggcctcccgctgacccacgcgcaggatctcactccagccatgtccccagctggaccccgacctcggccccccaccgctgtggaccctgatgcagagcccaccctgctgcgtgagccccaggccaccgtggtcttcaccacccatgtgcccacgctgggccgctatgccttcctgctgcacggctaccagccagcccaccccaccttccccgtggaagtcctcatcaacgccggccgcgtgtggcagggccacgccaacgccagcttctgtccacatggctacggctgccgcaccctggtggtgtgtgagggccaggccctgctggacgtgacccacagcgagctcactgtgaccgtgcgtgtgcccgagggccggtggctctggctggattatgtactcgtggtccctgagaacgtctacagctttggctacctccgggaggagcccctggataaatcctatgacttcatcagccactgcgcagcccagggctaccacatcagccccagcagctcatccctgttctgccgaaacgctgctgcttccctctccctcttctataacaacggagcccgtccatgtggctgccacgaagtaggtgctacaggccccacgtgtgagcccttcgggggccagtgtccctgccatgcccatgtcattggccgtgactgctcccgctgtgccaccggatactggggcttccccaactgcaggccctgtgactgcggtgcccgcctctgtgacgagctcacgggccagtgcatctgcccgccacgcaccatcccgcccgactgcctgctgtgccagccccagacctttggctgccaccccctggtcggctgtgaggagtgtaactgctcagggcccggcatccaggagctcacagaccctacctgtgacacagacagcggccagtgcaagtgcagacccaacgtgactgggcgccgctgtgatacctgctctccgggcttccatggctacccccgctgccgcccctgtgactgtcacgaggcgggcactgcgcctggcgtgtgtgaccccctcacagggcagtgctactgtaaggagaacgtgcagggccccaaatgtgaccagtgcagccttgggaccttctcactggatgctgccaaccccaaaggttgcacccgctgcttctgctttggggccacggagcgctgccggagctcgtcctacacccgccaggagttcgtggatatggagggatgggtgctgctgagcactgaccggcaggtggtgccccacgagcggcagccagggacggagatgctccgtgcagacctgcggcacgtgcctgaggctgtgcccgaggctttccccgagctgtactggcaggccccaccctcctacctgggggaccgggtgtcatcctacggtgggaccctccgttatgaactgcactcagagacccagcggggagatgtctttgtccccatggagagcaggccggatgtggtgctgcagggcaaccagatgagcatcacattcctggagccggcataccccacgcctggccacgttcaccgtgggcagctgcagctggtggaggggaacttccggcatacggagactcgcaacactgtgtcccgcgaggagctcatgatggtgctggccagcctggagcagctgcagatccgtgccctcttctcacagatctcctcggctgtctccctgcgcagggtggcactggaggtggccagcccagcaggccagggggccctggccagcaatgtggagctgtgcctgtgccccgccagctaccggggggactcatgccaggaatgtgcccccggcttctatcgggacgtcaaaggtctcttcctgggccgatgtgtcccttgtcagtgccatggacactcagaccgctgcctccctggctctggcgtctgtgtggactgccagcacaacaccgaaggggcccactgtgagcgctgccaggctggcttcatgagcagcagggacgaccccagcgccccctgtgtcagctgcccctgccccctctcagtgccttccaacaacttcgccgagggctgtgtcctgcgaggcggccgcacccagtgcctctgcaaacctggttatgcaggtgcctcctgcgagcggtgtgcgcccggattctttgggaacccactggtgctgggcagctcctgccagccatgcgactgcagcggcaacggtgaccccaacttgctcttcagcgactgcgaccccctgacgggcgcctgccgtggctgcctgcgccacaccactgggccccgctgcgagatctgtgcccccggcttctacggcaacgccctgctgcccggcaactgcacccggtgcgactgtaccccatgtgggacagaggcctgcgacccccacagcgggcactgcctgtgcaaggcgggcgtgactgggcggcgctgtgaccgctgccaggagggacattttggtttcaatggctgcgggggctgccgcccgtgtgcttgtggaccggccgccgagggctccgagtgccacccccagagcggacagtgccactgccgaccagggaccatgggaccccagtgccgcgagtgtgcccctggctactgggggctccctgagcagggctgcaggcgctgccagtgccctgggggccgctgtgaccctcacacgggccgctgcaactgccccccggggctcagcggggagcgctgcgacacctgcagccagcagcatcaggtgcctgttccaggcgggcctgtgggccacagcatccactgtgaagtgtgtgaccactgtgtggtcctgctcctggatgacctggaacgggccggcgccctcctccccgccattcacgagcaactgcgtggcatcaatgccagctccatggcctgggcccgtctgcacaggctgaacgcctccatcgctgacctgcagagccagctccggagccccctgggcccccgccatgagacggcacagcagctggaggtgctggagcagcagagcacaagcctcgggcaggacgcacggcggctaggcggccaggccgtggggacccgagaccaggcgagccaattgctggccggcaccgaggccacactgggccatgcgaagacgctgttggcggccatccgggctgtggaccgcaccctgagcgagctcatgtcccagacgggccacctggggctggccaatgcctcggctccatcaggtgagcagctgctccggacactggccgaggtggagcggctgctctgggagatgcgggcccgggacctgggggccccgcaggcagcagctgaggctgagttggctgcagcacagagattgctggcccgggtgcaggagcagctgagcagcctctgggaggagaaccaggcactggccacacaaacccgcgaccggctggcccagcacgaggccggcctcatggacctgcgagaggctttgaaccgggcagtggacgccacacgggaggcccaggagctcaacagccgcaaccaggagcgcctggaggaagccctgcaaaggaagcaggagctgtcccgggacaatgccaccctgcaggccactctgcatgcggctagggacaccctggccagcgtcttcagattgctgcacagcctggaccaggctaaggaggagctggagcgcctcgccgccagcctggatggggctcggaccccactgctgcagaggatgcagaccttctccccggcgggcagcaagctgcgtctagtggaggccgccgaggcccacgcacagcagctgggccagctggcactcaatctgtccagcatcatcctggacgtcaaccaggaccgcctcacccagagggccatcgaggcctccaacgcctacagccgcatcctgcaggccgtgcaggctgccgaggatgctgctggccaggccctgcagcaggcggaccacacgtgggcgacggtggtgcggcagggcctggtggaccgagcccagcagctcctggccaacagcactgcactagaagaggccatgctccaggaacagcagaggctgggccttgtgtgggctgccctccagggtgccaggacccagctccgagatgtccgggccaagaaggaccagctggaggcgcacatccaggcggcgcaggccatgcttgccatggacacagacgagacaagcaagaagatcgcacatgccaaggctgtggctgctgaagcccaggacaccgccacccgtgtgcagtcccagctgcaggccatgcaggagaatgtggagcggtggcagggccagtacgagggcctgcggggccaggacctgggccaggcagtgcttgacgcaggccactcagtgtccaccctggagaagacgctgccccagctgctggccaagctgagcatcctggagaaccgtggggtgcacaacgccagcctggccctgtccgccagcattggccgcgtgcgagagctcattgcccaggcccggggggctgccagtaaggtcaaggtgcccatgaagttcaacgggcgctcaggggtgcagctgcgcaccccacgggatcttgccgaccttgctgcctacactgccctcaagttctacctgcagggcccagagcctgagcctgggcagggtaccgaggatcgctttgtgatgtacatgggcagccgccaggccactggggactacatgggtgtgtctctgcgtgacaagaaggtgcactgggtgtatcagctgggtgaggcgggccctgcagtcctaagcatcgatgaggacattggggagcagttcgcagctgtcagcctggacaggtgggaggcccaggagagaggccggatgcctccaactgcagggcccttgcccgttcgccatctctcccctctccgtgtgcacccaccacccttcacctctccatgcccac

SEQ ID NO: 406213 - DNA, 3976 bp, Homo sapiens
ggggacgcggcccggagccgggaagatggcgaagcggctctgcgcggggagcgcactgtgtgttcgcggcccccggggccccgcgccgctgctgctggtcgggctggcgctgctgggcgcggcgcgggcgcgggaggaggcgggcggcggcttcagcctgcacccgccctacttcaacctggccgagggcgcccgcatcgccgcctccgcgacctgcggagaggaggccccggcgcgcggctccccgcgccccaccgaggacctttactgcaagctggtagggggccccgtggccggcggcgaccccaaccagaccatccggggccagtactgtgacatctgcacggctgccaacagcaacaaggcacaccccgcgagcaatgccatcgatggcacggagcgctggtggcagagtccaccgctgtcccgcggcctggagtacaacgaggtcaacgtcaccctggacctgggccaggtcttccacgtggcctacgtcctcatcaagtttgccaactcaccccggccggacctctgggtgctggagcggtccatggacttcggccgcacctaccagccctggcagttctttgcctcctccaagagggactgtctggagcggttcgggccacagacgctggagcgcatcacacgggacgacgcggccatctgcaccaccgagtactcacgcatcgtgcccctggagaacggagagatcgtggtgtccctggtgaacggacgtccgggcgccatgaatttctcctactcgccgctgctacgtgagttcaccaaggccaccaacgtccgcctgcgcttcctgcgtaccaacacgctgctgggccatctcatggggaaggcgctgcgggaccccacggtcacccgccggtattattacagcatcaaggatatcagcatcggaggccgctgtgtctgccacggccacgcggatgcctgcgatgccaaagaccccacggacccgttcaggctgcagtgcacctgccagcacaacacctgcgggggcacctgcgaccgctgctgccccggcttcaatcagcagccgtggaagcctgcgactgccaacagtgccaacgagtgccagtcctgtaactgctacggccatgccaccgactgttactacgaccctgaggtggaccggcgccgcgccagccagagcctggatggcacctatcagggtgggggtgtctgtatcgactgccagcaccacaccgccggcgtcaactgtgagcgctgcctgcccggcttctaccgctctcccaaccaccctctcgactcgccccacgtctgccgccgctgcaactgcgagtccgacttcacggatggcacctgcgaggacctgacgggtcgatgctactgccggcccaacttctctggggagcggtgtgacgtgtgtgccgagggcttcacgggcttcccaagctgctacccgacgccctcgtcctccaatgacaccagggagcaggtgctgccagccggccagattgtgaattgtgactgcagcgcggcagggacccagggcaacgcctgccggaaggacccaagggtgggacgctgtctgtgcaaacccaacttccaaggcacccattgtgagctctgcgcgccagggttctacggccccggctgccagccctgccagtgttccagccctggagtggccgatgaccgctgtgaccctgacacaggccagtgcaggtgccgagtgggcttcgagggggccacatgtgatcgctgtgcccccggctactttcacttccctctctgccagttgtgtggctgcagccctgcaggaaccttgcccgagggctgcgatgaggccggccgctgcctatgccagcctgagtttgctggacctcattgtgaccggtgccgccctggctaccatggtttccccaactgccaagcatgcacctgcgaccctcggggagccctggaccagctctgtggggcgggaggtttgtgccgctgccgccccggctacacaggcactgcctgccaggaatgcagccccggctttcacggcttccccagctgtgtcccctgccactgctctgctgaaggctccctgcacgcagcctgtgacccccggagtgggcagtgcagctgccggccccgtgtgacggggctgcggtgtgacacatgtgtgcccggtgcctacaacttcccctactgcgaagctggctcttgccaccctgccggtctggccccagtggatcctgcccttcctgaggcacaggttccctgtatgtgccgggctcacgtggaggggccgagctgtgaccgctgcaaacctgggttctggggactgagccccagcaaccccgagggctgtacccgctgcagctgcgacctcaggggcacactgggtggagttgctgagtgccagccgggcaccggccagtgcttctgcaagccccacgtgtgcggccaggcctgcgcgtcctgcaaggatggcttctttggactggatcaggctgactattttggctgccgcagctgccggtgtgacattggcggtgcactgggccagagctgtgaaccgaggacgggcgtctgccggtgccgccccaacacccagggccccacctgcagcgagcctgcgagggaccactacctcccggacctgcaccacctgcgcctggagctggaggaggctgccacacctgagggtcacgccgtgcgctttggcttcaaccccctcgagttcgagaacttcagctggaggggctacgcgcagatggcacctgtccagcccaggatcgtggccaggctgaacctgacctcccctgaccttttctggctcgtcttccgatacgtcaaccggggggccatgagtgtgagcgggcgggtctctgtgcgagaggagggcaggtcggccacctgcgccaactgcacagcacagagtcagcccgtggccttcccacccagcacggagcctgccttcatcaccgtgccccagaggggcttcggagagccctttgtgctgaaccctggcacctgggccctgcgtgtggaggccgaaggggtgctcctggactacgtggttctgctgcctagcgcatactacgaggcggcgctcctgcagctgcgggtgactgaggcctgcacataccgtccctctgcccagcagtctggcgacaactgcctcctctacacacacctccccctggatggcttcccctcggccgccgggctggaggccctgtgtcgccaggacaacagcctgccccggccctgccccacggagcagctcagcccgtcgcacccgccactgatcacctgcacgggcagtgatgtggacgtccagcttcaagtggcagtgccacagccaggccgctatgccctagtggtggagtacgccaatgaggatgcccgccaggaggtgggcgtggccgtgcacaccccacagcgggccccccagcaggggctgctctccctgcacccctgcctgtacagcaccctgtgccggggcactgcccgggatacccaggaccacctggctgtcttccacctggactcggaggccagcgtgaggctcacagccgagcaggcacgcttcttcctggtaaggacccctcaggtccccaccccaaggggtcagcttctttcagaagatttgaaacatgcatgagaggggagaggacagttggggtcccaggtccccaaggcggccacactcgctcatgcccagcccagcatgtttcttctggaacccctcctgcaagcgttttgtggattcagtcccttttgacgtacccccgagctgttccatgtgctcaggaaagcacctgcagtcacagctccctggccccagggcagccacctcctggcacagacagcgttggttgcctgttctggaactttcttttcttgttctgagagcctctctctataaaaaagaaagagatgaagagcaggatatcataacagagcctgcagtcagcccgtgtactgccagtgttgg

SEQ ID NO: 406214 - DNA, 271 bp, Homo sapiens
gctccatgggggtccgtgagggtgcccaggccctgtcccggtagggaatgagcgcaagtatccaggcccagcacagggctctgtgctgggggtgcccagaccactgctgacgggctctgagcctgtggccagagtctggccaggtcacctctgtctgtcctgcctccaggtgtcatcctacggtgggaccctccgttatgaactgcactcagagacccagcggggagatgtctttgtccccatggagagcaggccggatgtggtgctgcag

SEQ ID NO: 406215 - DNA, 837 bp, Homo sapiens
gctcagaagctggctgagcagactggtgtcagggtgttggaggcactgcaggaggtgagggccgggcaggtgaggcagctgtggcctttcgccaggtgctctaggggccacccaggtgcgctcaggttccgggcccctggcctgccaaggatggcagggctggggtcttgggcttggaagccagcaggcagaggtgcactagtacgggcggccccaggctctgacgaacccctgccccacagagctcatgtcccagacgggccacctggggctggccaatgcctcggctccatcaggtgagcagctgctccggacactggccgaggtggagcggctgctctgggagatgcgggcccgggacctgggggccccgcaggcagcagctgaggctgagttggctgcagcacagagatgtgagtggtgttgtccctggcaggcggggtggggagaggcagggacctgggagctccaagggggaggtcagcatggagtggcatcaggtgggcatcacggggcagatggatctggcgggcaccaagtggagaccaggggtcatgaaggggcctggcttccagagtgaccaccctcaccctggtctcggctagtgctgctggcccgggtgcaggagcagctgagcagcctctgggaggagaaccaggcactggccacacaaacccgcgaccggctggcccagcacgaggccggcctcatggacctgcgagaggctttgaaccgggcagtggacgccacacgggaggcccaggagctcaacagccgcaaccaggagcgcctggaggaagccctggtgaggaccccggacttgttcttcctcctgct

SEQ ID NO: 406216 - DNA, 247 bp, Homo sapiens
gtgctgggattaccggcgtgagccaccgcacccagcctaacatccccacctctttgaccatttcttcccttgtaacaggcctgaggacctgaggtcccttttttcctcagaagatagttgctaccattcactttataaccaggactctttcttaagcctgggaggacagtgggatgtatcctgccaggccctttcctctccttttgttcattgtagacaagagacagagaatgataataaggatata

SEQ ID NO: 406217 - DNA, 170 bp, Homo sapiens
taatattgatactatcactgcccataataagagaacaatggcttaaaaagttaaatgacttttccaagggcacacacatcagatttgtctgcctataaaatctctgcttctggcattgtttctctgaggccaatgattttcctttgtctcttgggtgtctctaggctgca

SEQ ID NO: 406218 - DNA, 528 bp, Homo sapiens
caagccagtgagttttgcagtatgcctgagatttggtgtgctggcttagacaaaaactcaaaggatttttttttccctttcacttcttggttgtcagctgagttcaagttgttggagatcatgactttccaggtaagtcgggtgttaccgaagaatgggactgataaaagatattttctgaggctgttatttgtattgtaggttgtcttaccatcagcgtatattagatattgttcctcctaccttctcagctctgtgtcctgcaaacccaacctgcatttacaagtatggagatgaaagtagcagtaagtaatgaaactaatccctctgtctttaaaaggtaccagttcaagtatatctgaagttagttgtttaaagtggagaaattgaactttttcttttcttggggtttatatttcctgtatttgaaaggtggtcgacgcggccgcgaatttagtagtagtagggggccccctaaaaggatccaggcttacgtaggggtgcatggcaaggccatagtccttctaa

SEQ ID NO: 406219 - DNA, 614 bp, Homo sapiens
ctggtaagggatggaaataagaaaaatgactacacagtgctgccctcagggggctcgcctgaatctaatgggtgtgaagatagatacttgcacaatttacaataaaagaccaatttgtaagtattgctggagaaagatgactaattcagccccaaggacagaaggctgtatcagctgttaagaatgaaattacaaaagttgaaagattttattttctgtaaccatagcttgacatacagtaaccaaatgccatatttctttaagattgtttgtttgggaaattttgcactctacaattcgtaagatgaacaaacatgtcctgaagatccagaaagagctggaagaagctaaagagaaacttgctaggcaacacaaacgggtaagttttgtgtaaacttgtaagtagttaaagaaaatataccagaaactctggagaggattcagagttcattatcttgatgatatttcattttttctgagcccaaattaatgcagagcagaaatttttctgagcccaatttaatgcagaagcagaagaggaggaaggagcaggtagtgtgttgtgtgctgttacactgcatgatgaaccagttcaggaagccacaaacttcact

SEQ ID NO: 406220 - DNA, 6270 bp, Homo sapiens
ggagcacatacccgccagtcctgatcctttctaaggtctctcttccctgcactgtctccgcctagcaattgtcactgctcaccgccctcgagcctattcccccgccgcgtatttgggtagaaaagctcgctcgtgacgtcaccaagctccggaagtctcctggcgtcggcgcaagggccgccgggaaaaccattgagaggccaccgggaaaccattgagaagccccggaggaccggcctgagcggaggcggagactagagcggccgccggcacgacccgccttcaggcgtacgacgaccgcggcccgggggctctgagtggccaaagcggcggcactttctgcgtggccccggaaggacatagagcggaaggcgggagaaagaagtagccggcaggcggaggcagcccgagggggcggttgcatgtgtgccagacgttcgtagcccactgagcttcctcacgccggctgtcgcagcgcctagccccacccggcggcctctcctgcgcttccggggccgtggcgagctagtgcgcctgcgtgccggcccatccgcgcgccttgcagctgtccttgcgtcggccagcggccagacagttcctgcagcgcttaccgcctggcctctcggttccgcggcgcaccggagggcagcatgtcgcggcggcggcacagcgacgagaacgacggtgggcagcctcacaaaaggagaaagacctctgatgcaaatgaaactgaagatcatttggaatctttaatatgtaaagtaggagaaaagagtgcctgctctttggagagcaacctagaaggcttggctggtgttttggaagctgatcttcctaactacaagagcaagatcttaaggcttctttgtacagttgcacgcctattacctgagaagctgacaatttatacaacattagttggactactgaatgccaggaattacaattttggtggagaatttgtagaagccatgattcgtcaacttaaagaatcattgaaagcaaacaattataatgaagccgtgtatttggtccgttttttatctgatcttgtgaattgtcatgtgattgccgccccatcaatggttgctatgtttgaaaattttgtaagcgtaactcaggaagaagatgtacctcaggtgcgacgagattggtatgtgtatgcatttctgtcatctttgccctgggttggaaaggagttgtacgaaaagaaagatgcagagatggaccgcatctttgccaacactgaaagctatcttaaaagacgccaaaagactcatgtacccatgttacaggtatggactgctgataaaccacatccacaagaagagtatttagattgcctgtgggcccagattcagaaattgaaaaaggatcgctggcaggaacggcacatcctaagaccttatcttgcctttgacagcatcctgtgtgaagcactgcagcacaatctgcctccttttacaccacctcctcacactgaagattcagtgtacccaatgccaagggtcatcttcagaatgtttgattacacagatgatcccgagggtcctgtcatgccagggagtcattcagtggaaagatttgtaatagaagagaatcttcactgcatcattaagtcccactggaaggaaaggaagacttgtgctgcacagttagtgagctatccagggaagaacaagatccccttgaactaccacatagttgaggtgatctttgcagagctgtttcaacttccagcaccccctcacattgatgtgatgtacacaacactcctcattgaactgtgcaaacttcaacctggctctctaccccaagttcttgcacaggcaactgaaatgctatacatgcgtttggacacaatgaacactacctgtgtagacaggtttattaattggttttctcatcatctaagtaacttccagttccgttggagctgggaagattggtcagattgtcttagtcaagatcctgaaagtcccaaaccgaagtttgtaagagaagttctagaaaaatgtatgaggttgtcttaccatcagcgtatattagatattgttcctcctaccttctcagctctgtgtcctgcaaacccaacctgcatttacaagtatggagatgaaagtagcaattctcttcctggacattctgttgccctctgtttagctgttgcctttaaaagtaaggcaaccaatgatgaaatcttcagcattctgaaagatgtaccaaatcctaaccaggatgatgacgacgatgaaggattcagttttaacccattgaaaatagaagtctttgtacagactctgctacacttggcagccaaatcattcagccactccttcagtgctcttgcaaagtttcatgaagtcttcaaaaccctagctgaaagtgatgaaggaaagttacatgtgctaagagttatgtttgaggtctggaggaaccatccacagatgattgctgtactagtggataagatgattcgtacacaaatagttgattgtgctgccgtagcaaattggatcttctcttcagaactatctcgtgactttaccagattgtttgtttgggaaattttgcactctacaattcgtaagatgaacaaacatgtcctgaagatccagaaagagctggaagaagctaaagagaaacttgctaggcaacacaaacggcgaagtgatgatgacgacagaagcagtgacaggaaagacggggttcttgaggaacaaatagaacgacttcaggaaaaagtggaatctgctcagagtgaacaaaagaatcttttcctcgttatatttcagcggtttatcatgatcttgaccgagcacctagtacgatgcgaaactgatgggaccagtgtattaacaccatggtataagaactgtatagagaggctgcagcagatcttcctacagcatcaccaaataatccagcagtacatggtgaccctggagaaccttctcttcactgctgaattagaccctcatatcttggccgtgttccagcagttctgtgccctgcaggcctaagggtcattttttcctcatgtcaaggttttttttgatatcttaaaataatttgtcttattttttgatggtttgaatgcttgctttcttgtagtatcctttcacttcttaaaggaaacaaaggggaagaggacagtgaatgaacatggcattacttttaattgccctgaaaagcaaatacttcctaacggcagtaatgtgactatgaccatgatatattatatatgtgacagatacaaattctctgtgatcagtttgttattttttttctccttaaggcacaaaataattggtttgaggtatgtgaaacactagaggtcaaccttacatagtatatagaactgatgggtttacccagctacccagtagcataacttttcacagctcggggatgaattaacatggctgaaataaaactaaaagtatggtttttaaactttggcatttcatgatttatcatctcactctactctaaaactggtggtttcttactgaaggtgttctccatttgaaattttatcttcaaagtatttttaagtagtatctttaagacatgacttgttagtaataaaagtgttactagttggaagagtagctctcaaatttgtcttaatgtaaatcacctgggaatctttcaagttattttgaaatttaaaccaccgtctgggggtggaacgcagacatcctcagtaatccttaaagtttccccaggtgattccaggtttggtcaccattatcttagagcatctactcacttcctctagccttggggttatttgtccaaggtcttgtagtgagttacagaatactaaagtggatgtagaagtggtcagattgactgaaactataccctgaattagatgtgagtttagattttgtttatatggaacctgatccaaaaaactacgaagtcctgagcttgtttcctgtatagtactgatgctgaaataagatgacagcagtttgtaaaataatacacaaatatgaggaattgtctgacattccaaatttcgaggatttttagacttttttcattaaaccttagaaaaaaattaccagtaatcctacaactactggtagtgttgttgtgcatttgcacaaaataggtataattttttcttattacatcccaagtttatgatgcattaagcgttttgcatattttgatatatttttgctttggtttaccatacattttagtggctacagaatgtagtctgcttaataaatgggaattcctagaatgtttaaataccatactatttaagacaaaatacaaaatatccagaaaaatccaggttgcgtggctggttagtaaaggactaaaacccaggttcttggctaaatgttttcgtttatactgtttatctttcccattgcttaagcacagcacaaactatgtaattatatataattacagttgacccttgaacaacatgggtttgaactgtgtgagtctccttacacacaggttttcttccacccctgagatggcaagaccagccccttgtcttcctcagcctgctcaacgtgaagatgatgaggatgaagacctttatgatgatccacttctacttattaaatagtaaatatatttttttcttatgattttattttcttttctctagcttcataagaatatagcatatgggctgggcgcagtggctcacgcctgtaatcccagcactttgggaggctgaggcgggcggatcacaaggtcaggagattgagaccatcctggctaacacagtgaaaccctgtctctactaaaaacacaaaaacttagccaggcgtggtggtacatggctgtagtcccagctacttgggaggctgagacaggagaatcgcttgaacctgggaggtggaggtttcagtgagccaagattgtgccactgcactccagcctgggtgatggagcgaggctctgtctcaaaaaagaaaaaaaatatatagcatataacatacaaaatgagtttatcaactgtttgttattggtaagtcagcagtgggctattggtggttaagttttgggggagtcaaaagttacatgcaaattttttactgtgcggggtgtcagcatccctaaccccatgttgttcaagggtcaactgtagtttaaaatgactcctgtctcaaaaaaccaaaggataacctttaagggattggtaactttgactcaaaactgctttgtaatcttttcacaatgtactgaaaagtgtggctagttatgtttgatccacattctagagaaatttgtaggttttaatttcttttctcttggtcctctcttcatgtataatggttgcttttaacagctgttcgctgatgtggtcctgctctgtcccagtctagcagctttagtgtatggaaaaattgaactaggaattgagttttgaagaaataaaggtgtaagagcaaacattcaacagttgctgtccccagtaatgaagttcatacagacaaaagatggcatgtcactgtacatcataccttgcaataaatattctgttaaattgtgctggtgcaatttaacatgcttttgtcaaagtaaacatactgttttcctaatttataactgtacttgaaaatgaaagatgaggaagggaccttgccaacctatgtagagcaggtttagctgttagtgatttctggataccaggattgtcttaaactggtaagggtgtagagggtgaatagaagcatcccttaactagacaaatctattttctgtaacatagtggccttggtaatacatgctcattaactagtggttattatgtgccaggtgctataggttcaccctattaactacttcaaacagtcctttgagatgattatgccctctttacagataaaaacaggttttggagtaatttacccacggtccacagctagtaagtggaatttgaacctagatccagttggcccaagagctccttccccgcccccataatgctcttacaacaacctgaacccctagttattctgttgtcatcatctgttgtcatcaagctgaaagcttttttccccagagacatcttgctgcccattcagaatcaatttttactaagctgtaatatttagcatagcacgtattagtcattgagtgtgaaggtgtttaaaaaaaaatcaaacttgaaaaatacacaaacatttctgtgtagtctgaattatttggacatgacttgttttgacttagcctttctccaagcataatctccattaaagaaaaaaaaatggaaatgttaaa

SEQ ID NO: 406221 - DNA, 5537 bp, Homo sapiens
ggagcacatacccgccagtcctgatcctttctaaggtctctcttccctgcactgtctccgcctagcaattgtcactgctcaccgccctcgagcctattcccccgccgcgtatttgggtagaaaagctcgctcgtgacgtcaccaagctccggaagtctcctggcgtcggcgcaagggccgccgggaaaaccattgagaggccaccgggaaaccattgagaagccccggaggaccggcctgagcggaggcggagactagagcggccgccggcacgacccgccttcaggcgtacgacgaccgcggcccgggggctctgagtggccaaagcggcggcactttctgcgtggccccggaaggacatagagcggaaggcgggagaaagaagtagccggcaggcggaggcagcccgagggggcggttgcatgtgtgccagacgttcgtagcccactgagcttcctcacgccggctgtcgcagcgcctagccccacccggcggcctctcctgcgcttccggggccgtggcgagctagtgcgcctgcgtgccggcccatccgcgcgccttgcagctgtccttgcgtcggccagcggccagacagttcctgcagcgcttaccgcctggcctctcggttccgcggcgcaccggagggcagcatgtcgcggcggcggcacagcgacgagaacgacggtgggcagcctcacaaaaggagaaagacctctgatgcaaatgaaactgaagatcatttggaatctttaatatgtaaagtaggagaaaagagtgcctgctctttggagagcaacctagaaggcttggctggtgttttggaagctgatcttcctaactacaagagcaagatcttaaggcttctttgtacagttgcacgcctattacctgagaagctgacaatttatacaacattagttggactactgaatgccaggaattacaattttggtggagaatttgtagaagccatgattcgtcaacttaaagaatcattgaaagcaaacaattataatgaagccgtgtatttggtccgttttttatctgatcttgtgaattgtcatgtgattgccgccccatcaatggttgctatgtttgaaaattttgtaagcgtaactcaggaagaagatgtacctcaggtgcgacgagattggtatgtgtatgcatttctgtcatctttgccctgggttggaaaggagttgtacgaaaagaaagatgcagagatggaccgcatctttgccaacactgaaagctatcttaaaagacgccaaaagactcatgtacccatgttacaggtatggactgctgataaaccacatccacaagaagagtatttagattgcctgtgggcccagattcagaaattgaaaaaggatcgctggcaggaacggcacatcctaagaccttatcttgcctttgacagcatcctgtgtgaagcactgcagcacaatctgcctccttttacaccacctcctcacactgaagattcagtgtacccaatgccaagggtcatcttcagaatgtttgattacacagatgatcccgagggtcctgtcatgccagggagtcattcagtggaaagatttgtaatagaagagaatcttcactgcatcattaagtcccactggaaggaaaggaagacttgtgctgcacagttagtgagctatccagggaagaacaagatccccttgaactaccacatagttgaggtgatctttgcagagctgtttcaacttccagcaccccctcacattgatgtgatgtacacaacactcctcattgaactgtgcaaacttcaacctggctctctaccccaagttcttgcacaggcaactgaaatgctatacatgcgtttggacacaatgaacactacctgtgtagacaggtttattaattggttttctcatcatctaagtaacttccagttccgttggagctgggaagattggtcagattgtcttagtcaagatcctgaaagtcccaaaccgaagtttgtaagagaagttctagaaaaatgtatgaggttgtcttaccatcagcgtatattagatattgttcctcctaccttctcagctctgtgtcctgcaaacccaacctgcatttacaagtatggagatgaaagtagcaattctcttcctggacattctgttgccctctgtttagctgttgcctttaaaagtaaggcaaccaatgatgaaatcttcagcattctgaaagatgtaccaaatcctaaccaggatgatgacgacgatgaaggattcagttttaacccattgaaaatagaagtctttgtacagactctgctacacttggcagccaaatcattcagccactccttcagtgctcttgcaaagtttcatgaagtcttcaaaaccctagctgaaagtgatgaaggaaagttacatgtgctaagagttatgtttgaggtctggaggaaccatccacagatgattgctgtactagtggataagatgattcgtacacaaatagttgattgtgctgccgtagcaaattggatcttctcttcagaactatctcgtgactttaccagattgtttgtttgggaaattttgcactctacaattcgtaagatgaacaaacatgtcctgaagatccagaaagagctggaagaagctaaagagaaacttgctaggcaacacaaacggcgaagtgatgatgacgacagaagcagtgacaggaaagacggggttcttgaggaacaaatagaacgacttcaggaaaaagtggaatctgctcagagtgaacaaaagaatcttttcctcgttatatttcagcggtttatcatgatcttgaccgagcacctagtacgatgcgaaactgatgggaccagtgtattaacaccatggtataagaactgtatagagaggctgcagcagatcttcctacagcatcaccaaataatccagcagtacatggtgaccctggagaaccttctcttcactgctgaattagaccctcatatcttggccgtgttccagcagttctgtgccctgcaggcctaagggtcattttttcctcatgtcaaggttttttttgatatcttaaaataatttgtcttattttttgatggtttgaatgcttgctttcttgtagtatcctttcacttcttaaaggaaacaaaggggaagaggacagtgaatgaacatggcattacttttaattgccctgaaaagcaaatacttcctaacggcagtaatgtgactatgaccatgatatattatatatgtgacagatacaaattctctgtgatcagtttgttattttttttctccttaaggcacaaaataattggtttgaggtatgtgaaacactagaggtcaaccttacatagtatatagaactgatgggtttacccagctacccagtagcataacttttcacagctcggggatgaattaacatggctgaaataaaactaaaagtatggtttttaaactttggcatttcatgatttatcatctcactctactctaaaactggtggtttcttactgaaggtgttctccatttgaaattttatcttcaaagtatttttaagtagtatctttaagacatgacttgttagtaataaaagtgttactagttggaagagtagctctcaaatttgtcttaatgtaaatcacctgggaatctttcaagttattttgaaatttaaaccaccgtctgggggtggaacgcagacatcctcagtaatccttaaagtttccccaggtgattccaggtttggtcaccattatcttagagcatctactcacttcctctagccttggggttatttgtccaaggtcttgtagtgagttacagaatactaaagtggatgtagaagtggtcagattgactgaaactataccctgaattagatgtgagtttagattttgtttatatggaacctgatccaaaaaactacgaagtcctgagcttgtttcctgtatagtactgatgctgaaataagatgacagcagtttgtaaaataatacacaaatatgaggaattgtctgacattccaaatttcgaggatttttagacttttttcattaaaccttagaaaaaaattaccagtaatcctacaactactggtagtgttgttgtgcatttgcacaaaataggtataattttttcttattacatcccaagtttatgatgcattaagcgttttgcatattttgatatatttttgctttggtttaccatacattttagtggctacagaatgtagtctgcttaataaatgggaattcctagaatgtttaaataccatactatttaagacaaaatacaaaatatccagaaaaatccaggttgcgtggctggttagtaaaggactaaaacccaggttcttggctaaatgttttcgtttatactgtttatctttcccattgcttaagcacagcacaaactatgtaattatatataattacagttgacccttgaacaacatgggtttgaactgtgtgagtctccttacacacaggttttcttccacccctgagatggcaagaccagccccttgtcttcctcagcctgctcaacgtgaagatgatgaggatgaagacctttatgatgatccacttctacttattaaatagtaaatatatttttttcttatgattttattttcttttctctagcttcataagaatatagcatatgggctgggcgcagtggctcacgcctgtaatcccagcactttgggaggctgaggcgggcggatcacaaggtcaggagattgagaccatcctggctaacacagtgaaaccctgtctctactaaaaacacaaaaacttagccaggcgtggtggtacatggctgtagtcccagctacttgggaggctgagacaggagaatcgcttgaacctgggaggtggaggtttcagtgagccaagattgtgccactgcactccagcctgggtgatggagcgaggctctgtctcaaaaaagaaaaaaaatatatagcatataacatacaaaatgagtttatcaactgtttgttattggtaagtcagcagtgggctattggtggttaagttttgggggagtcaaaagttacatgcaaattttttactgtgcggggtgtcagcatccctaaccccatgttgttcaagggtcaactgtagtttaaaatgactcctgtctcaaaaaaccaaaggataacctttaagggattggtaactttgactcaaaactgctttgtaatcttttcacaatgtactgaaaagtgtggctagttatgtttgatccacattctagagaaatttgtaggttttaatttcttttctcttggtcctctcttcatgtataatggttgcttttaacagctgttcgctgatgtggtcctgctctgtcccagtctagcagctttagtgtatggaaaaattgaactaggaattgagttttgaagaaataaaggtgtaagagcaaacattcaacagttgctgtccccagtaatgaagttcatacagacaaaagatggcatgtcactgtacatcataccttgcaataaatattctgttaaattgt

SEQ ID NO: 406222 - DNA, 5540 bp, Homo sapiens
ggagcacatacccgccagtcctgatcctttctaaggtctctcttccctgcactgtctccgcctagcaattgtcactgctcaccgccctcgagcctattcccccgccgcgtatttgggtagaaaagctcgctcgtgacgtcaccaagctccggaagtctcctggcgtcggcgcaagggccgccgggaaaaccattgagaggccaccgggaaaccattgagaagccccggaggaccggcctgagcggaggcggagactagagcggccgccggcacgacccgccttcaggcgtacgacgaccgcggcccgggggctctgagtggccaaagcggcggcactttctgcgtggccccggaaggacatagagcggaaggcgggagaaagaagtagccggcaggcggaggcagcccgagggggcggttgcatgtgtgccagacgttcgtagcccactgagcttcctcacgccggctgtcgcagcgcctagccccacccggcggcctctcctgcgcttccggggccgtggcgagctagtgcgcctgcgtgccggcccatccgcgcgccttgcagctgtccttgcgtcggccagcggccagacagttcctgcagcgcttaccgcctggcctctcggttccgcggcgcaccggagggcagcatgtcgcggcggcggcacagcgacgagaacgacggtgggcagcctcacaaaaggagaaagacctctgatgcaaatgaaactgaagatcatttggaatctttaatatgtaaagtaggagaaaagagtgcctgctctttggagagcaacctagaaggcttggctggtgttttggaagctgatcttcctaactacaagagcaagatcttaaggcttctttgtacagttgcacgcctattacctgagaagctgacaatttatacaacattagttggactactgaatgccaggaattacaattttggtggagaatttgtagaagccatgattcgtcaacttaaagaatcattgaaagcaaacaattataatgaagccgtgtatttggtccgttttttatctgatcttgtgaattgtcatgtgattgccgccccatcaatggttgctatgtttgaaaattttgtaagcgtaactcaggaagaagatgtacctcaggtgcgacgagattggtatgtgtatgcatttctgtcatctttgccctgggttggaaaggagttgtacgaaaagaaagatgcagagatggaccgcatctttgccaacactgaaagctatcttaaaagacgccaaaagactcatgtacccatgttacaggtatggactgctgataaaccacatccacaagaagagtatttagattgcctgtgggcccagattcagaaattgaaaaaggatcgctggcaggaacggcacatcctaagaccttatcttgcctttgacagcatcctgtgtgaagcactgcagcacaatctgcctccttttacaccacctcctcacactgaagattcagtgtacccaatgccaagggtcatcttcagaatgtttgattacacagatgatcccgagggtcctgtcatgccagggagtcattcagtggaaagatttgtaatagaagagaatcttcactgcatcattaagtcccactggaaggaaaggaagacttgtgctgcacagttagtgagctatccagggaagaacaagatccccttgaactaccacatagttgaggtgatctttgcagagctgtttcaacttccagcaccccctcacattgatgtgatgtacacaacactcctcattgaactgtgcaaacttcaacctggctctctaccccaagttcttgcacaggcaactgaaatgctatacatgcgtttggacacaatgaacactacctgtgtagacaggtttattaattggttttctcatcatctaagtaacttccagttccgttggagctgggaagattggtcagattgtcttagtcaagatcctgaaagtcccaaaccgaagtttgtaagagaagttctagaaaaatgtatgaggttgtcttaccatcagcgtatattagatattgttcctcctaccttctcagctctgtgtcctgcaaacccaacctgcatttacaagtatggagatgaaagtagcaattctcttcctggacattctgttgccctctgtttagctgttgcctttaaaagtaaggcaaccaatgatgaaatcttcagcattctgaaagatgtaccaaatcctaaccaggatgatgacgacgatgaaggattcagttttaacccattgaaaatagaagtctttgtacagactctgctacacttggcagccaaatcattcagccactccttcagtgctcttgcaaagtttcatgaagtcttcaaaaccctagctgaaagtgatgaaggaaagttacatgtgctaagagttatgtttgaggtctggaggaaccatccacagatgattgctgtactagtggataagatgattcgtacacaaatagttgattgtgctgccgtagcaaattggatcttctcttcagaactatctcgtgactttaccagattgtttgtttgggaaattttgcactctacaattcgtaagatgaacaaacatgtcctgaagatccagaaagagctggaagaagctaaagagaaacttgctaggcaacacaaacggcgaagtgatgatgacgacagaagcagtgacaggaaagacggggttcttgaggaacaaatagaacgacttcaggaaaaagtggaatctgctcagagtgaacaaaagaatcttttcctcgttatatttcagcggtttatcatgatcttgaccgagcacctagtacgatgcgaaactgatgggaccagtgtattaacaccatggtataagaactgtatagagaggctgcagcagatcttcctacagcatcaccaaataatccagcagtacatggtgaccctggagaaccttctcttcactgctgaattagaccctcatatcttggccgtgttccagcagttctgtgccctgcaggcctaagggtcattttttcctcatgtcaaggttttttttgatatcttaaaataatttgtcttattttttgatggtttgaatgcttgctttcttgtagtatcctttcacttcttaaaggaaacaaaggggaagaggacagtgaatgaacatggcattacttttaattgccctgaaaagcaaatacttcctaacggcagtaatgtgactatgaccatgatatattatatatgtgacagatacaaattctctgtgatcagtttgttattttttttctccttaaggcacaaaataattggtttgaggtatgtgaaacactagaggtcaaccttacatagtatatagaactgatgggtttacccagctacccagtagcataacttttcacagctcggggatgaattaacatggctgaaataaaactaaaagtatggtttttaaactttggcatttcatgatttatcatctcactctactctaaaactggtggtttcttactgaaggtgttctccatttgaaattttatcttcaaagtatttttaagtagtatctttaagacatgacttgttagtaataaaagtgttactagttggaagagtagctctcaaatttgtcttaatgtaaatcacctgggaatctttcaagttattttgaaatttaaaccaccgtctgggggtggaacgcagacatcctcagtaatccttaaagtttccccaggtgattccaggtttggtcaccattatcttagagcatctactcacttcctctagccttggggttatttgtccaaggtcttgtagtgagttacagaatactaaagtggatgtagaagtggtcagattgactgaaactataccctgaattagatgtgagtttagattttgtttatatggaacctgatccaaaaaactacgaagtcctgagcttgtttcctgtatagtactgatgctgaaataagatgacagcagtttgtaaaataatacacaaatatgaggaattgtctgacattccaaatttcgaggatttttagacttttttcattaaaccttagaaaaaaattaccagtaatcctacaactactggtagtgttgttgtgcatttgcacaaaataggtataattttttcttattacatcccaagtttatgatgcattaagcgttttgcatattttgatatatttttgctttggtttaccatacattttagtggctacagaatgtagtctgcttaataaatgggaattcctagaatgtttaaataccatactatttaagacaaaatacaaaatatccagaaaaatccaggttgcgtggctggttagtaaaggactaaaacccaggttcttggctaaatgttttcgtttatactgtttatctttcccattgcttaagcacagcacaaactatgtaattatatataattacagttgacccttgaacaacatgggtttgaactgtgtgagtctccttacacacaggttttcttccacccctgagatggcaagaccagccccttgtcttcctcagcctgctcaacgtgaagatgatgaggatgaagacctttatgatgatccacttctacttattaaatactgttcgctgatgtggtcctgctctgtcccagtctagcagctttagtgtatggaaaaattgaactaggaattgagttttgaagaaataaaggtgtaagagcaaacattcaacagttgctgtccccagtaatgaagttcatacagacaaaagatggcatgtcactgtacatcataccttgcaataaatattctgttaaattgtgctggtgcaatttaacatgcttttgtcaaagtaaacatactgttttcctaatttataactgtacttgaaaatgaaagatgaggaagggaccttgccaacctatgtagagcaggtttagctgttagtgatttctggataccaggattgtcttaaactggtaagggtgtagagggtgaatagaagcatcccttaactagacaaatctattttctgtaacatagtggccttggtaatacatgctcattaactagtggttattatgtgccaggtgctataggttcaccctattaactacttcaaacagtcctttgagatgattatgccctctttacagataaaaacaggttttggagtaatttacccacggtccacagctagtaagtggaatttgaacctagatccagttggcccaagagctccttccccgcccccataatgctcttacaacaacctgaacccctagttattctgttgtcatcatctgttgtcatcaagctgaaagcttttttccccagagacatcttgctgcccattcagaatcaatttttactaagctgtaatatttagcatagcacgtattagtcattgagtgtgaaggtgtttaaaaaaaaatcaaacttgaaaaatacacaaacatttctgtgtagtctgaattatttggacatgacttgttttgacttagcctttctccaagcataatctccattaaagaaaaaaaaatggaaatgttaaa

SEQ ID NO: 406223 - DNA, 6299 bp, Homo sapiens
ggagcacatacccgccagtcctgatcctttctaaggtctctcttccctgcactgtctccgcctagcaattgtcactgctcaccgccctcgagcctattcccccgccgcgtatttgggtagaaaagctcgctcgtgacgtcaccaagctccggaagtctcctggcgtcggcgcaagggccgccgggaaaaccattgagaggccaccgggaaaccattgagaagccccggaggaccggcctgagcggaggcggagactagagcggccgccggcacgacccgccttcaggcgtacgacgaccgcggcccgggggctctgagtggccaaagcggcggcactttctgcgtggccccggaaggacatagagcggaaggcgggagaaagaagtagccggcaggcggaggcagcccgagggggcggttgcatgtgtgccagacgttcgtagcccactgagcttcctcacgccggctgtcgcagcgcctagccccacccggcggcctctcctgcgcttccggggccgtggcgagctagtgcgcctgcgtgccggcccatccgcgcgccttgcagctgtccttgcgtcggccagcggccagacagttcctgcagcgcttaccgcctggcctctcggttccgcggcgcaccggagggcagcatgtcgcggcggcggcacagcgacgagaacgacggtgggcagcctcacaaaaggagaaagacctctgatgcaaatgaaactgaagatcatttggaatctttaatatgtaaagtaggagaaaagagtgcctgctctttggagagcaacctagaaggcttggctggtgttttggaagctgatcttcctaactacaagagcaagatcttaaggcttctttgtacagtgtatgtatgcaaaagatttatgaatccagtgcacgcctattacctgagaagctgacaatttatacaacattagttggactactgaatgccaggaattacaattttggtggagaatttgtagaagccatgattcgtcaacttaaagaatcattgaaagcaaacaattataatgaagccgtgtatttggtccgttttttatctgatcttgtgaattgtcatgtgattgccgccccatcaatggttgctatgtttgaaaattttgtaagcgtaactcaggaagaagatgtacctcaggtgcgacgagattggtatgtgtatgcatttctgtcatctttgccctgggttggaaaggagttgtacgaaaagaaagatgcagagatggaccgcatctttgccaacactgaaagctatcttaaaagacgccaaaagactcatgtacccatgttacaggtatggactgctgataaaccacatccacaagaagagtatttagattgcctgtgggcccagattcagaaattgaaaaaggatcgctggcaggaacggcacatcctaagaccttatcttgcctttgacagcatcctgtgtgaagcactgcagcacaatctgcctccttttacaccacctcctcacactgaagattcagtgtacccaatgccaagggtcatcttcagaatgtttgattacacagatgatcccgagggtcctgtcatgccagggagtcattcagtggaaagatttgtaatagaagagaatcttcactgcatcattaagtcccactggaaggaaaggaagacttgtgctgcacagttagtgagctatccagggaagaacaagatccccttgaactaccacatagttgaggtgatctttgcagagctgtttcaacttccagcaccccctcacattgatgtgatgtacacaacactcctcattgaactgtgcaaacttcaacctggctctctaccccaagttcttgcacaggcaactgaaatgctatacatgcgtttggacacaatgaacactacctgtgtagacaggtttattaattggttttctcatcatctaagtaacttccagttccgttggagctgggaagattggtcagattgtcttagtcaagatcctgaaagtcccaaaccgaagtttgtaagagaagttctagaaaaatgtatgaggttgtcttaccatcagcgtatattagatattgttcctcctaccttctcagctctgtgtcctgcaaacccaacctgcatttacaagtatggagatgaaagtagcaattctcttcctggacattctgttgccctctgtttagctgttgcctttaaaagtaaggcaaccaatgatgaaatcttcagcattctgaaagatgtaccaaatcctaaccaggatgatgacgacgatgaaggattcagttttaacccattgaaaatagaagtctttgtacagactctgctacacttggcagccaaatcattcagccactccttcagtgctcttgcaaagtttcatgaagtcttcaaaaccctagctgaaagtgatgaaggaaagttacatgtgctaagagttatgtttgaggtctggaggaaccatccacagatgattgctgtactagtggataagatgattcgtacacaaatagttgattgtgctgccgtagcaaattggatcttctcttcagaactatctcgtgactttaccagattgtttgtttgggaaattttgcactctacaattcgtaagatgaacaaacatgtcctgaagatccagaaagagctggaagaagctaaagagaaacttgctaggcaacacaaacggcgaagtgatgatgacgacagaagcagtgacaggaaagacggggttcttgaggaacaaatagaacgacttcaggaaaaagtggaatctgctcagagtgaacaaaagaatcttttcctcgttatatttcagcggtttatcatgatcttgaccgagcacctagtacgatgcgaaactgatgggaccagtgtattaacaccatggtataagaactgtatagagaggctgcagcagatcttcctacagcatcaccaaataatccagcagtacatggtgaccctggagaaccttctcttcactgctgaattagaccctcatatcttggccgtgttccagcagttctgtgccctgcaggcctaagggtcattttttcctcatgtcaaggttttttttgatatcttaaaataatttgtcttattttttgatggtttgaatgcttgctttcttgtagtatcctttcacttcttaaaggaaacaaaggggaagaggacagtgaatgaacatggcattacttttaattgccctgaaaagcaaatacttcctaacggcagtaatgtgactatgaccatgatatattatatatgtgacagatacaaattctctgtgatcagtttgttattttttttctccttaaggcacaaaataattggtttgaggtatgtgaaacactagaggtcaaccttacatagtatatagaactgatgggtttacccagctacccagtagcataacttttcacagctcggggatgaattaacatggctgaaataaaactaaaagtatggtttttaaactttggcatttcatgatttatcatctcactctactctaaaactggtggtttcttactgaaggtgttctccatttgaaattttatcttcaaagtatttttaagtagtatctttaagacatgacttgttagtaataaaagtgttactagttggaagagtagctctcaaatttgtcttaatgtaaatcacctgggaatctttcaagttattttgaaatttaaaccaccgtctgggggtggaacgcagacatcctcagtaatccttaaagtttccccaggtgattccaggtttggtcaccattatcttagagcatctactcacttcctctagccttggggttatttgtccaaggtcttgtagtgagttacagaatactaaagtggatgtagaagtggtcagattgactgaaactataccctgaattagatgtgagtttagattttgtttatatggaacctgatccaaaaaactacgaagtcctgagcttgtttcctgtatagtactgatgctgaaataagatgacagcagtttgtaaaataatacacaaatatgaggaattgtctgacattccaaatttcgaggatttttagacttttttcattaaaccttagaaaaaaattaccagtaatcctacaactactggtagtgttgttgtgcatttgcacaaaataggtataattttttcttattacatcccaagtttatgatgcattaagcgttttgcatattttgatatatttttgctttggtttaccatacattttagtggctacagaatgtagtctgcttaataaatgggaattcctagaatgtttaaataccatactatttaagacaaaatacaaaatatccagaaaaatccaggttgcgtggctggttagtaaaggactaaaacccaggttcttggctaaatgttttcgtttatactgtttatctttcccattgcttaagcacagcacaaactatgtaattatatataattacagttgacccttgaacaacatgggtttgaactgtgtgagtctccttacacacaggttttcttccacccctgagatggcaagaccagccccttgtcttcctcagcctgctcaacgtgaagatgatgaggatgaagacctttatgatgatccacttctacttattaaatagtaaatatatttttttcttatgattttattttcttttctctagcttcataagaatatagcatatgggctgggcgcagtggctcacgcctgtaatcccagcactttgggaggctgaggcgggcggatcacaaggtcaggagattgagaccatcctggctaacacagtgaaaccctgtctctactaaaaacacaaaaacttagccaggcgtggtggtacatggctgtagtcccagctacttgggaggctgagacaggagaatcgcttgaacctgggaggtggaggtttcagtgagccaagattgtgccactgcactccagcctgggtgatggagcgaggctctgtctcaaaaaagaaaaaaaatatatagcatataacatacaaaatgagtttatcaactgtttgttattggtaagtcagcagtgggctattggtggttaagttttgggggagtcaaaagttacatgcaaattttttactgtgcggggtgtcagcatccctaaccccatgttgttcaagggtcaactgtagtttaaaatgactcctgtctcaaaaaaccaaaggataacctttaagggattggtaactttgactcaaaactgctttgtaatcttttcacaatgtactgaaaagtgtggctagttatgtttgatccacattctagagaaatttgtaggttttaatttcttttctcttggtcctctcttcatgtataatggttgcttttaacagctgttcgctgatgtggtcctgctctgtcccagtctagcagctttagtgtatggaaaaattgaactaggaattgagttttgaagaaataaaggtgtaagagcaaacattcaacagttgctgtccccagtaatgaagttcatacagacaaaagatggcatgtcactgtacatcataccttgcaataaatattctgttaaattgtgctggtgcaatttaacatgcttttgtcaaagtaaacatactgttttcctaatttataactgtacttgaaaatgaaagatgaggaagggaccttgccaacctatgtagagcaggtttagctgttagtgatttctggataccaggattgtcttaaactggtaagggtgtagagggtgaatagaagcatcccttaactagacaaatctattttctgtaacatagtggccttggtaatacatgctcattaactagtggttattatgtgccaggtgctataggttcaccctattaactacttcaaacagtcctttgagatgattatgccctctttacagataaaaacaggttttggagtaatttacccacggtccacagctagtaagtggaatttgaacctagatccagttggcccaagagctccttccccgcccccataatgctcttacaacaacctgaacccctagttattctgttgtcatcatctgttgtcatcaagctgaaagcttttttccccagagacatcttgctgcccattcagaatcaatttttactaagctgtaatatttagcatagcacgtattagtcattgagtgtgaaggtgtttaaaaaaaaatcaaacttgaaaaatacacaaacatttctgtgtagtctgaattatttggacatgacttgttttgacttagcctttctccaagcataatctccattaaagaaaaaaaaatggaaatgttaaa

SEQ ID NO: 406224 - DNA, 5991 bp, Homo sapiens
ggagcacatacccgccagtcctgatcctttctaaggtctctcttccctgcactgtctccgcctagcaattgtcactgctcaccgccctcgagcctattcccccgccgcgtatttgggtagaaaagctcgctcgtgacgtcaccaagctccggaagtctcctggcgtcggcgcaagggccgccgggaaaaccattgagaggccaccgggaaaccattgagaagccccggaggaccggcctgagcggaggcggagactagagcggccgccggcacgacccgccttcaggcgtacgacgaccgcggcccgggggctctgagtggccaaagcggcggcactttctgcgtggccccggaaggacatagagcggaaggcgggagaaagaagtagccggcaggcggaggcagcccgagggggcggttgcatgtgtgccagacgttcgtagcccactgagcttcctcacgccggctgtcgcagcgcctagccccacccggcggcctctcctgcgcttccggggccgtggcgagctagtgcgcctgcgtgccggcccatccgcgcgccttgcagctgtccttgcgtcggccagcggccagacagttcctgcagcgcttaccgcctggcctctcggttccgcggcgcaccggagggcagcatgtcgcggcggcggcacagcgacgagaacgacggtgggcagcctcacaaaaggagaaagacctctgatgcaaatgaaactgaagatcatttggaatctttaatatgtaaagtaggagaaaagagtgcctgctctttggagagcaacctagaaggcttggctggtgttttggaagctgatcttcctaactacaagagcaagatcttaaggcttctttgtacagtgtccgttttttatctgatcttgtgaattgtcatgtgattgccgccccatcaatggttgctatgtttgaaaattttgtaagcgtaactcaggaagaagatgtacctcagaagacgccaaaagactcatgtacccatgttacaggtatggactgctgataaaccacatccacaagaagagtatttagattgcctgtgggcccagattcagaaattgaaaaaggatcgctggcaggaacggcacatcctaagaccttatcttgcctttgacagcatcctgtgtgaagcactgcagcacaatctgcctccttttacaccacctcctcacactgaagattcagtgtacccaatgccaagggtcatcttcagaatgtttgattacacagatgatcccgagggtcctgtcatgccagggagtcattcagtggaaagatttgtaatagaagagaatcttcactgcatcattaagtcccactggaaggaaaggaagacttgtgctgcacagttagtgagctatccagggaagaacaagatccccttgaactaccacatagttgaggtgatctttgcagagctgtttcaacttccagcaccccctcacattgatgtgatgtacacaacactcctcattgaactgtgcaaacttcaacctggctctctaccccaagttcttgcacaggcaactgaaatgctatacatgcgtttggacacaatgaacactacctgtgtagacaggtttattaattggttttctcatcatctaagtaacttccagttccgttggagctgggaagattggtcagattgtcttagtcaagatcctgaaagtcccaaaccgaagtttgtaagagaagttctagaaaaatgtatgaggttgtcttaccatcagcgtatattagatattgttcctcctaccttctcagctctgtgtcctgcaaacccaacctgcatttacaagtatggagatgaaagtagcaattctcttcctggacattctgttgccctctgtttagctgttgcctttaaaagtaaggcaaccaatgatgaaatcttcagcattctgaaagatgtaccaaatcctaaccaggatgatgacgacgatgaaggattcagttttaacccattgaaaatagaagtctttgtacagactctgctacacttggcagccaaatcattcagccactccttcagtgctcttgcaaagtttcatgaagtcttcaaaaccctagctgaaagtgatgaaggaaagttacatgtgctaagagttatgtttgaggtctggaggaaccatccacagatgattgctgtactagtggataagatgattcgtacacaaatagttgattgtgctgccgtagcaaattggatcttctcttcagaactatctcgtgactttaccagattgtttgtttgggaaattttgcactctacaattcgtaagatgaacaaacatgtcctgaagatccagaaagagctggaagaagctaaagagaaacttgctaggcaacacaaacggcgaagtgatgatgacgacagaagcagtgacaggaaagacggggttcttgaggaacaaatagaacgacttcaggaaaaagtggaatctgctcagagtgaacaaaagaatcttttcctcgttatatttcagcggtttatcatgatcttgaccgagcacctagtacgatgcgaaactgatgggaccagtgtattaacaccatggtataagaactgtatagagaggctgcagcagatcttcctacagcatcaccaaataatccagcagtacatggtgaccctggagaaccttctcttcactgctgaattagaccctcatatcttggccgtgttccagcagttctgtgccctgcaggcctaagggtcattttttcctcatgtcaaggttttttttgatatcttaaaataatttgtcttattttttgatggtttgaatgcttgctttcttgtagtatcctttcacttcttaaaggaaacaaaggggaagaggacagtgaatgaacatggcattacttttaattgccctgaaaagcaaatacttcctaacggcagtaatgtgactatgaccatgatatattatatatgtgacagatacaaattctctgtgatcagtttgttattttttttctccttaaggcacaaaataattggtttgaggtatgtgaaacactagaggtcaaccttacatagtatatagaactgatgggtttacccagctacccagtagcataacttttcacagctcggggatgaattaacatggctgaaataaaactaaaagtatggtttttaaactttggcatttcatgatttatcatctcactctactctaaaactggtggtttcttactgaaggtgttctccatttgaaattttatcttcaaagtatttttaagtagtatctttaagacatgacttgttagtaataaaagtgttactagttggaagagtagctctcaaatttgtcttaatgtaaatcacctgggaatctttcaagttattttgaaatttaaaccaccgtctgggggtggaacgcagacatcctcagtaatccttaaagtttccccaggtgattccaggtttggtcaccattatcttagagcatctactcacttcctctagccttggggttatttgtccaaggtcttgtagtgagttacagaatactaaagtggatgtagaagtggtcagattgactgaaactataccctgaattagatgtgagtttagattttgtttatatggaacctgatccaaaaaactacgaagtcctgagcttgtttcctgtatagtactgatgctgaaataagatgacagcagtttgtaaaataatacacaaatatgaggaattgtctgacattccaaatttcgaggatttttagacttttttcattaaaccttagaaaaaaattaccagtaatcctacaactactggtagtgttgttgtgcatttgcacaaaataggtataattttttcttattacatcccaagtttatgatgcattaagcgttttgcatattttgatatatttttgctttggtttaccatacattttagtggctacagaatgtagtctgcttaataaatgggaattcctagaatgtttaaataccatactatttaagacaaaatacaaaatatccagaaaaatccaggttgcgtggctggttagtaaaggactaaaacccaggttcttggctaaatgttttcgtttatactgtttatctttcccattgcttaagcacagcacaaactatgtaattatatataattacagttgacccttgaacaacatgggtttgaactgtgtgagtctccttacacacaggttttcttccacccctgagatggcaagaccagccccttgtcttcctcagcctgctcaacgtgaagatgatgaggatgaagacctttatgatgatccacttctacttattaaatagtaaatatatttttttcttatgattttattttcttttctctagcttcataagaatatagcatatgggctgggcgcagtggctcacgcctgtaatcccagcactttgggaggctgaggcgggcggatcacaaggtcaggagattgagaccatcctggctaacacagtgaaaccctgtctctactaaaaacacaaaaacttagccaggcgtggtggtacatggctgtagtcccagctacttgggaggctgagacaggagaatcgcttgaacctgggaggtggaggtttcagtgagccaagattgtgccactgcactccagcctgggtgatggagcgaggctctgtctcaaaaaagaaaaaaaatatatagcatataacatacaaaatgagtttatcaactgtttgttattggtaagtcagcagtgggctattggtggttaagttttgggggagtcaaaagttacatgcaaattttttactgtgcggggtgtcagcatccctaaccccatgttgttcaagggtcaactgtagtttaaaatgactcctgtctcaaaaaaccaaaggataacctttaagggattggtaactttgactcaaaactgctttgtaatcttttcacaatgtactgaaaagtgtggctagttatgtttgatccacattctagagaaatttgtaggttttaatttcttttctcttggtcctctcttcatgtataatggttgcttttaacagctgttcgctgatgtggtcctgctctgtcccagtctagcagctttagtgtatggaaaaattgaactaggaattgagttttgaagaaataaaggtgtaagagcaaacattcaacagttgctgtccccagtaatgaagttcatacagacaaaagatggcatgtcactgtacatcataccttgcaataaatattctgttaaattgtgctggtgcaatttaacatgcttttgtcaaagtaaacatactgttttcctaatttataactgtacttgaaaatgaaagatgaggaagggaccttgccaacctatgtagagcaggtttagctgttagtgatttctggataccaggattgtcttaaactggtaagggtgtagagggtgaatagaagcatcccttaactagacaaatctattttctgtaacatagtggccttggtaatacatgctcattaactagtggttattatgtgccaggtgctataggttcaccctattaactacttcaaacagtcctttgagatgattatgccctctttacagataaaaacaggttttggagtaatttacccacggtccacagctagtaagtggaatttgaacctagatccagttggcccaagagctccttccccgcccccataatgctcttacaacaacctgaacccctagttattctgttgtcatcatctgttgtcatcaagctgaaagcttttttccccagagacatcttgctgcccattcagaatcaatttttactaagctgtaatatttagcatagcacgtattagtcattgagtgtgaaggtgtttaaaaaaaaatcaaacttgaaaaatacacaaacatttctgtgtagtctgaattatttggacatgacttgttttgacttagcctttctccaagcataatctccattaaagaaaaaaaaatggaaatgttaaa

SEQ ID NO: 406225 - DNA, 4096 bp, Homo sapiens
ggagcacatacccgccagtcctgatcctttctaaggtctctcttccctgcactgtctccgcctagcaattgtcactgctcaccgccctcgagcctattcccccgccgcgtatttgggtagaaaagctcgctcgtgacgtcaccaagctccggaagtctcctggcgtcggcgcaagggccgccgggaaaaccattgagaggccaccgggaaaccattgagaagccccggaggaccggcctgagcggaggcggagactagagcggccgccggcacgacccgccttcaggcgtacgacgaccgcggcccgggggctctgagtggccaaagcggcggcactttctgcgtggccccggaaggacatagagcggaaggcgggagaaagaagtagccggcaggcggaggcagcccgagggggcggttgcatgtgtgccagacgttcgtagcccactgagcttcctcacgccggctgtcgcagcgcctagccccacccggcggcctctcctgcgcttccggggccgtggcgagctagtgcgcctgcgtgccggcccatccgcgcgccttgcagctgtccttgcgtcggccagcggccagacagttcctgcagcgcttaccgcctggcctctcggttccgcggcgcaccggagggcagcatgtcgcggcggcggcacagcgacgagaacgacggtgggcagcctcacaaaaggagaaagacctctgatgcaaatgaaactgaagatcatttggaatctttaatatgtaaagtaggagaaaagagtgcctgctctttggagagcaacctagaaggcttggctggtgttttggaagctgatcttcctaactacaagagcaagatcttaaggcttctttgtacagttgcacgcctattacctgagaagctgacaatttatacaacattagttggactactgaatgccaggaattacaattttggtggagaatttgtagaagccatgattcgtcaacttaaagaatcattgaaagcaaacaattataatgaagccgtgtatttggtccgttttttatctgatcttgtgaattgtcatgtgattgccgccccatcaatggttgctatgtttgaaaattttgtaagcgtaactcaggaagaagatgtacctcaggtgcgacgagattggtatgtgtatgcatttctgtcatctttgccctgggttggaaaggagttgtacgaaaagaaagatgcagagatggaccgcatctttgccaacactgaaagctatcttaaaagacgccaaaagactcatgtacccatgttacaggtatggactgctgataaaccacatccacaagaagagtatttagattgcctgtgggcccagattcagaaattgaaaaaggatcgctggcaggaacggcacatcctaagaccttatcttgcctttgacagcatcctgtgtgaagcactgcagcacaatctgcctccttttacaccacctcctcacactgaagattcagtgtacccaatgccaagggtcatcttcagaatgtttgattacacagatgatcccgagggtcctgtcatgccagggagtcattcagtggaaagatttgtaatagaagagaatcttcactgcatcattaagtcccactggaaggaaaggaagacttgtgctgcacagttagtgagctatccagggaagaacaagatccccttgaactaccacatagttgaggtgatctttgcagagctgtttcaacttccagcaccccctcacattgatgtgatgtacacaacactcctcattgaactgtgcaaacttcaacctggctctctaccccaagttcttgcacaggcaactgaaatgctatacatgcgtttggacacaatgaacactacctgtgtagacaggtttattaattggttttctcatcatctaagtaacttccagttccgttggagctgggaagattggtcagattgtcttagtcaagatcctgaaagtcccaaaccgaagtttgtaagagaagttctagaaaaatgtatgaggttgtcttaccatcagcgtatattagatattgttcctcctaccttctcagctctgtgtcctgcaaacccaacctgcatttacaagtatggagatgaaagtagcaattctcttcctggacattctgttgccctctgtttagctgttgcctttaaaagtaaggcaaccaatgatgaaatcttcagcattctgaaagatgtaccaaatcctaaccaggatgatgacgacgatgaaggattcagttttaacccattgaaaatagaagtctttgtacagactctgctacacttggcagccaaatcattcagccactccttcagtgctcttgcaaagtttcatgaagtcttcaaaaccctagctgaaagtgatgaaggaaagttacatgtgctaagagttatgtttgaggtctggaggaaccatccacagatgattgctgtactagtggataagatgattcgtacacaaatagttgattgtgctgccgtagcaaattggatcttctcttcagaactatctcgtgactttaccagattgtttgtttgggaaattttgcactctacaattcgtaagatgaacaaacatgtcctgaagatccagaaagagctggaagaagctaaagagaaacttgctaggcaacacaaacggcgaagtgatgatgacgacagaagcagtgacaggaaagacggggttcttgaggaacaaatagaacgacttcaggaaaaagtggaatctgctcagagtgaacaaaagaatcttttcctcgttatatttcagcggtttatcatgatcttgaccgagcacctagtacgatgcgaaactgatgggaccagtgtattaacaccatggtataagaactgtatagagaggctgcagcagatcttcctacagcatcaccaaataatccagcagtacatggtgaccctggagaaccttctcttcactgctgaattagaccctcatatcttggccgtgttccagcagttctgtgccctgcaggcctaagggtcattttttcctcatgtcaaggttttcttccacccctgagatggcaagaccagccccttgtcttcctcagcctgctcaacgtgaagatgatgaggatgaagacctttatgatgatccacttctacttattaaatactgttcgctgatgtggtcctgctctgtcccagtctagcagctttagtgtatggaaaaattgaactaggaattgagttttgaagaaataaaggtgtaagagcaaacattcaacagttgctgtccccagtaatgaagttcatacagacaaaagatggcatgtcactgtacatcataccttgcaataaatattctgttaaattgtgctggtgcaatttaacatgcttttgtcaaagtaaacatactgttttcctaatttataactgtacttgaaaatgaaagatgaggaagggaccttgccaacctatgtagagcaggtttagctgttagtgatttctggataccaggattgtcttaaactggtaagggtgtagagggtgaatagaagcatcccttaactagacaaatctattttctgtaacatagtggccttggtaatacatgctcattaactagtggttattatgtgccaggtgctataggttcaccctattaactacttcaaacagtcctttgagatgattatgccctctttacagataaaaacaggttttggagtaatttacccacggtccacagctagtaagtggaatttgaacctagatccagttggcccaagagctccttccccgcccccataatgctcttacaacaacctgaacccctagttattctgttgtcatcatctgttgtcatcaagctgaaagcttttttccccagagacatcttgctgcccattcagaatcaatttttactaagctgtaatatttagcatagcacgtattagtcattgagtgtgaaggtgtttaaaaaaaaatcaaacttgaaaaatacacaaacatttctgtgtagtctgaattatttggacatgacttgttttgacttagcctttctccaagcataatctccattaaagaaaaaaaaatggaaatgttaaa

SEQ ID NO: 406226 - DNA, 3362 bp, Homo sapiens
ggagcacatacccgccagtcctgatcctttctaaggtctctcttccctgcactgtctccgcctagcaattgtcactgctcaccgccctcgagcctattcccccgccgcgtatttgggtagaaaagctcgctcgtgacgtcaccaagctccggaagtctcctggcgtcggcgcaagggccgccgggaaaaccattgagaggccaccgggaaaccattgagaagccccggaggaccggcctgagcggaggcggagactagagcggccgccggcacgacccgccttcaggcgtacgacgaccgcggcccgggggctctgagtggccaaagcggcggcactttctgcgtggccccggaaggacatagagcggaaggcgggagaaagaagtagccggcaggcggaggcagcccgagggggcggttgcatgtgtgccagacgttcgtagcccactgagcttcctcacgccggctgtcgcagcgcctagccccacccggcggcctctcctgcgcttccggggccgtggcgagctagtgcgcctgcgtgccggcccatccgcgcgccttgcagctgtccttgcgtcggccagcggccagacagttcctgcagcgcttaccgcctggcctctcggttccgcggcgcaccggagggcagcatgtcgcggcggcggcacagcgacgagaacgacggtgggcagcctcacaaaaggagaaagacctctgatgcaaatgaaactgaagatcatttggaatctttaatatgtaaagtaggagaaaagagtgcctgctctttggagagcaacctagaaggcttggctggtgttttggaagctgatcttcctaactacaagagcaagatcttaaggcttctttgtacagttgcacgcctattacctgagaagctgacaatttatacaacattagttggactactgaatgccaggaattacaattttggtggagaatttgtagaagccatgattcgtcaacttaaagaatcattgaaagcaaacaattataatgaagccgtgtatttggtccgttttttatctgatcttgtgaattgtcatgtgattgccgccccatcaatggttgctatgtttgaaaattttgtaagcgtaactcaggaagaagatgtacctcaggtgcgacgagattggtatgtgtatgcatttctgtcatctttgccctgggttggaaaggagttgtacgaaaagaaagatgcagagatggaccgcatctttgccaacactgaaagctatcttaaaagacgccaaaagactcatgtacccatgttacaggtatggactgctgataaaccacatccacaagaagagtatttagattgcctgtgggcccagattcagaaattgaaaaaggatcgctggcaggaacggcacatcctaagaccttatcttgcctttgacagcatcctgtgtgaagcactgcagcacaatctgcctccttttacaccacctcctcacactgaagattcagtgtacccaatgccaagggtcatcttcagaatgtttgattacacagatgatcccgagggtcctgtcatgccagggagtcattcagtggaaagatttgtaatagaagagaatcttcactgcatcattaagtcccactggaaggaaaggaagacttgtgctgcacagttagtgagctatccagggaagaacaagatccccttgaactaccacatagttgaggtgatctttgcagagctgtttcaacttccagcaccccctcacattgatgtgatgtacacaacactcctcattgaactgtgcaaacttcaacctggctctctaccccaagttcttgcacaggcaactgaaatgctatacatgcgtttggacacaatgaacactacctgtgtagacaggtttattaattggttttctcatcatctaagtaacttccagttccgttggagctgggaagattggtcagattgtcttagtcaagatcctgaaagtcccaaaccgaagtttgtaagagaagttctagaaaaatgtatgaggttgtcttaccatcagcgtatattagatattgttcctcctaccttctcagctctgtgtcctgcaaacccaacctgcatttacaagtatggagatgaaagtagcaattctcttcctggacattctgttgccctctgtttagctgttgcctttaaaagtaaggcaaccaatgatgaaatcttcagcattctgaaagatgtaccaaatcctaaccaggatgatgacgacgatgaaggattcagttttaacccattgaaaatagaagtctttgtacagactctgctacacttggcagccaaatcattcagccactccttcagtgctcttgcaaagtttcatgaagtcttcaaaaccctagctgaaagtgatgaaggaaagttacatgtgctaagagttatgtttgaggtctggaggaaccatccacagatgattgctgtactagtggataagatgattcgtacacaaatagttgattgtgctgccgtagcaaattggatcttctcttcagaactatctcgtgactttaccagattgtttgtttgggaaattttgcactctacaattcgtaagatgaacaaacatgtcctgaagatccagaaagagctggaagaagctaaagagaaacttgctaggcaacacaaacggcgaagtgatgatgacgacagaagcagtgacaggaaagacggggttcttgaggaacaaatagaacgacttcaggaaaaagtggaatctgctcagagtgaacaaaagaatcttttcctcgttatatttcagcggtttatcatgatcttgaccgagcacctagtacgatgcgaaactgatgggaccagtgtattaacaccatggtataagaactgtatagagaggctgcagcagatcttcctacagcatcaccaaataatccagcagtacatggtgaccctggagaaccttctcttcactgctgaattagaccctcatatcttggccgtgttccagcagttctgtgccctgcaggcctaagggtcattttttcctcatgtcaaggttttcttccacccctgagatggcaagaccagccccttgtcttcctcagcctgctcaacgtgaagatgatgaggatgaagacctttatgatgatccacttctacttattaaatagtaaatatatttttttcttatgattttattttcttttctctagcttcataagaatatagcatatgggctgggcgcagtggctcacgcctgtaatcccagcactttgggaggattacctgagcctgggagttcaagaccagcctgggcaacacagtgaaaccccaatctcttaaaataaataaataaaaaattaaaaaaatt

SEQ ID NO: 406227 - DNA, 3130 bp, Homo sapiens
ggagcacatacccgccagtcctgatcctttctaaggtctctcttccctgcactgtctccgcctagcaattgtcactgctcaccgccctcgagcctattcccccgccgcgtatttgggtagaaaagctcgctcgtgacgtcaccaagctccggaagtctcctggcgtcggcgcaagggccgccgggaaaaccattgagaggccaccgggaaaccattgagaagccccggaggaccggcctgagcggaggcggagactagagcggccgccggcacgacccgccttcaggcgtacgacgaccgcggcccgggggctctgagtggccaaagcggcggcactttctgcgtggccccggaaggacatagagcggaaggcgggagaaagaagtagccggcaggcggaggcagcccgagggggcggttgcatgtgtgccagacgttcgtagcccactgagcttcctcacgccggctgtcgcagcgcctagccccacccggcggcctctcctgcgcttccggggccgtggcgagctagtgcgcctgcgtgccggcccatccgcgcgccttgcagctgtccttgcgtcggccagcggccagacagttcctgcagcgcttaccgcctggcctctcggttccgcggcgcaccggagggcagcatgtcgcggcggcggcacagcgacgagaacgacggtgggcagcctcacaaaaggagaaagacctctgatgcaaatgaaactgaagatcatttggaatctttaatatgtaaagtaggagaaaagagtgcctgctctttggagagcaacctagaaggcttggctggtgttttggaagctgatcttcctaactacaagagcaagatcttaaggcttctttgtacagttgcacgcctattacctgagaagctgacaatttatacaacattagttggactactgaatgccaggaattacaattttggtggagaatttgtagaagccatgattcgtcaacttaaagaatcattgaaagcaaacaattataatgaagccgtgtatttggtccgttttttatctgatcttgtgaattgtcatgtgattgccgccccatcaatggttgctatgtttgaaaattttgtaagcgtaactcaggaagaagatgtacctcaggtgcgacgagattggtatgtgtatgcatttctgtcatctttgccctgggttggaaaggagttgtacgaaaagaaagatgcagagatggaccgcatctttgccaacactgaaagctatcttaaaagacgccaaaagactcatgtacccatgttacaggtatggactgctgataaaccacatccacaagaagagtatttagattgcctgtgggcccagattcagaaattgaaaaaggatcgctggcaggaacggcacatcctaagaccttatcttgcctttgacagcatcctgtgtgaagcactgcagcacaatctgcctccttttacaccacctcctcacactgaagattcagtgtacccaatgccaagggtcatcttcagaatgtttgattacacagatgatcccgagggtcctgtcatgccagggagtcattcagtggaaagatttgtaatagaagagaatcttcactgcatcattaagtcccactggaaggaaaggaagacttgtgctgcacagttagtgagctatccagggaagaacaagatccccttgaactaccacatagttgaggtgatctttgcagagctgtttcaacttccagcaccccctcacattgatgtgatgtacacaacactcctcattgaactgtgcaaacttcaacctggctctctaccccaagttcttgcacaggcaactgaaatgctatacatgcgtttggacacaatgaacactacctgtgtagacaggtttattaattggttttctcatcatctaagtaacttccagttccgttggagctgggaagattggtcagattgtcttagtcaagatcctgaaagtcccaaaccgaagtttgtaagagaagttctagaaaaatgtatgaggttgtcttaccatcagcgtatattagatattgttcctcctaccttctcagctctgtgtcctgcaaacccaacctgcatttacaagtatggagatgaaagtagcaattctcttcctggacattctgttgccctctgtttagctgttgcctttaaaagtaaggcaaccaatgatgaaatcttcagcattctgaaagatgtaccaaatcctaaccaggatgatgacgacgatgaaggattcagttttaacccattgaaaatagaagtctttgtacagactctgctacacttggcagccaaatcattcagccactccttcagtgctcttgcaaagtttcatgaagtcttcaaaaccctagctgaaagtgatgaaggaaagttacatgtgctaagagttatgtttgaggtctggaggaaccatccacagatgattgctgtactagtggataagatgattcgtacacaaatagttgattgtgctgccgtagcaaattggatcttctcttcagaactatctcgtgactttaccagattgtttgtttgggaaattttgcactctacaattcgtaagatgaacaaacatgtcctgaagatccagaaagagctggaagaagctaaagagaaacttgctaggcaacacaaacggcgaagtgatgatgacgacagaagcagtgacaggaaagacggggttcttgaggaacaaatagaacgacttcaggaaaaagtggaatctgctcagagtgaacaaaagaatcttttcctcgttatatttcagcggtttatcatgatcttgaccgagcacctagtacgatgcgaaactgatgggaccagtgtattaacaccatggtataagaactgtatagagaggctgcagcagatcttcctacaggtatgtggggaacttcgattaggtaataacactattctcagccacaaagatttttcattaaaaaaaatccttgtcaaatttgttaggaggttatatagtacctgttagaccctttagttcatgtccatttgctgctaccattgctcatcagaatatttaggcttaaactgattctgtaccacttagattcctaattgccacccccccaacaaccccccgcc

SEQ ID NO: 406228 - DNA, 4601 bp, Homo sapiens
ctggtaagggatggaaataagaaaaatgactacacagtgctgccctcagggggctcgcctgaatctaatgggtgtgaagatagatacttgcacaatttacaataaaagaccaatttgtaagtattgctggagaaagatgactaattcagccccaaggacagaaggctgtatcagctgttaagaatgaaattacaaaagttgaaagattttattttctgtaaccatagcttgacatacagtaaccaaatgccatatttctttaagattgtttgtttgggaaattttgcactctacaattcgtaagatgaacaaacatgtcctgaagatccagaaagagctggaagaagctaaagagaaacttgctaggcaacacaaacggcgaagtgatgatgacgacagaagcagtgacaggaaagacggggttcttgaggaacaaatagaacgacttcaggaaaaagtggaatctgctcagagtgaacaaaagaatcttttcctcgttatatttcaggtatcttggcttgggacatttatacataaaaggaaacaatacatttctttagttttagtttttaaaaatgttatttttcattgtaaaaggaatacacattcatttatagaagagattaaaaatacaaaaatttaggaaggaaataaaagttcactactcagaggcaaccatgtatgtctgagtttctctgctgtttacttagtattctcgcatgagcatttctccatgcttgaaaaaaaattgtgggttgctttttttatatatgtctcgtttaattattcctcattgctgatcattttccttccatgaacattttaatgcatagattcctgttaaaatttctgattacttcgttagaatagattccaggaagtaatattactaggataagtaatttaagacattaaaggtctttatgtattgccaggaagaatgtaccaactcatgttattaccagtctgcccttctaggttgacttcatgaataatggaagctaggcacacacaccacaaagacagggtggaacaggcaatactttggggtttctttgtcatgaatttttttccaaagtataagattctgtctgtagtactaccttaacttcttctccctttccagcggtttatcatgatcttgaccgagcacctagtacgatgcgaaactgatgggaccagtgtattaacaccatggtataagaactgtatagagaggctgcagcagatcttcctacagcatcaccaaataatccagcagtacatggtgaccctggagaaccttctcttcactgctgaattagaccctcatatcttggccgtgttccagcagttctgtgccctgcaggcctaagggtcattttttcctcatgtcaaggttttttttgatatcttaaaataatttgtcttattttttgatggtttgaatgcttgctttcttgtagtatcctttcacttcttaaaggaaacaaaggggaagaggacagtgaatgaacatggcattacttttaattgccctgaaaagcaaatacttcctaacggcagtaatgtgactatgaccatgatatattatatatgtgacagatacaaattctctgtgatcagtttgttattttttttctccttaaggcacaaaataattggtttgaggtatgtgaaacactagaggtcaaccttacatagtatatagaactgatgggtttacccagctacccagtagcataacttttcacagctcggggatgaattaacatggctgaaataaaactaaaagtatggtttttaaactttggcatttcatgatttatcatctcactctactctaaaactggtggtttcttactgaaggtgttctccatttgaaattttatcttcaaagtatttttaagtagtatctttaagacatgacttgttagtaataaaagtgttactagttggaagagtagctctcaaatttgtcttaatgtaaatcacctgggaatctttcaagttattttgaaatttaaaccaccgtctgggggtggaacgcagacatcctcagtaatccttaaagtttccccaggtgattccaggtttggtcaccattatcttagagcatctactcacttcctctagccttggggttatttgtccaaggtcttgtagtgagttacagaatactaaagtggatgtagaagtggtcagattgactgaaactataccctgaattagatgtgagtttagattttgtttatatggaacctgatccaaaaaactacgaagtcctgagcttgtttcctgtatagtactgatgctgaaataagatgacagcagtttgtaaaataatacacaaatatgaggaattgtctgacattccaaatttcgaggatttttagacttttttcattaaaccttagaaaaaaattaccagtaatcctacaactactggtagtgttgttgtgcatttgcacaaaataggtataattttttcttattacatcccaagtttatgatgcattaagcgttttgcatattttgatatatttttgctttggtttaccatacattttagtggctacagaatgtagtctgcttaataaatgggaattcctagaatgtttaaataccatactatttaagacaaaatacaaaatatccagaaaaatccaggttgcgtggctggttagtaaaggactaaaacccaggttcttggctaaatgttttcgtttatactgtttatctttcccattgcttaagcacagcacaaactatgtaattatatataattacagttgacccttgaacaacatgggtttgaactgtgtgagtctccttacacacaggttttcttccacccctgagatggcaagaccagccccttgtcttcctcagcctgctcaacgtgaagatgatgaggatgaagacctttatgatgatccacttctacttattaaatagtaaatatatttttttcttatgattttattttcttttctctagcttcataagaatatagcatatgggctgggcgcagtggctcacgcctgtaatcccagcactttgggaggctgaggcgggcggatcacaaggtcaggagattgagaccatcctggctaacacagtgaaaccctgtctctactaaaaacacaaaaacttagccaggcgtggtggtacatggctgtagtcccagctacttgggaggctgagacaggagaatcgcttgaacctgggaggtggaggtttcagtgagccaagattgtgccactgcactccagcctgggtgatggagcgaggctctgtctcaaaaaagaaaaaaaatatatagcatataacatacaaaatgagtttatcaactgtttgttattggtaagtcagcagtgggctattggtggttaagttttgggggagtcaaaagttacatgcaaattttttactgtgcggggtgtcagcatccctaaccccatgttgttcaagggtcaactgtagtttaaaatgactcctgtctcaaaaaaccaaaggataacctttaagggattggtaactttgactcaaaactgctttgtaatcttttcacaatgtactgaaaagtgtggctagttatgtttgatccacattctagagaaatttgtaggttttaatttcttttctcttggtcctctcttcatgtataatggttgcttttaacagctgttcgctgatgtggtcctgctctgtcccagtctagcagctttagtgtatggaaaaattgaactaggaattgagttttgaagaaataaaggtgtaagagcaaacattcaacagttgctgtccccagtaatgaagttcatacagacaaaagatggcatgtcactgtacatcataccttgcaataaatattctgttaaattgtgctggtgcaatttaacatgcttttgtcaaagtaaacatactgttttcctaatttataactgtacttgaaaatgaaagatgaggaagggaccttgccaacctatgtagagcaggtttagctgttagtgatttctggataccaggattgtcttaaactggtaagggtgtagagggtgaatagaagcatcccttaactagacaaatctattttctgtaacatagtggccttggtaatacatgctcattaactagtggttattatgtgccaggtgctataggttcaccctattaactacttcaaacagtcctttgagatgattatgccctctttacagataaaaacaggttttggagtaatttacccacggtccacagctagtaagtggaatttgaacctagatccagttggcccaagagctccttccccgcccccataatgctcttacaacaacctgaacccctagttattctgttgtcatcatctgttgtcatcaagctgaaagcttttttccccagagacatcttgctgcccattcagaatcaatttttactaagctgtaatatttagcatagcacgtattagtcattgagtgtgaaggtgtttaaaaaaaaatcaaacttgaaaaatacacaaacatttctgtgtagtctgaattatttggacatgacttgttttgacttagcctttctccaagcataatctccattaaagaaaaaaaaatggaaatgttaaa

SEQ ID NO: 406229 - DNA, 4560 bp, Homo sapiens
atgaatgattagcaagctgtctccctgttgttactgctcaaatggtcaaatagtgataaattgtagccaagtccccccatgttgttaccaagacaagtgccactaaatttccctggcctagataagaacccatggaatttctgaatgagaagacagtgtctctgaaccacaacaggactttgaggtatatatgtgtgggtggcggggtgggggggtactttcactatagaatataagtcttaacatttggccagacacagtaaaatgcttcccctggaggagatttaacacactggaatctaaatggtattttccttttgttcatttgccttctatagcgaagtgatgatgacgacagaagcagtgacaggaaagacggggttcttgaggaacaaatagaacgacttcaggaaaaagtggaatctgctcagagtgaacaaaagaatcttttcctcgttatatttcaggtatcttggcttgggacatttatacataaaaggaaacaatacatttctttagttttagtttttaaaaatgttatttttcattgtaaaaggaatacacattcatttatagaagagattaaaaatacaaaaatttaggaaggaaataaaagttcactactcagaggcaaccatgtatgtctgagtttctctgctgtttacttagtattctcgcatgagcatttctccatgcttgaaaaaaaattgtgggttgctttttttatatatgtctcgtttaattattcctcattgctgatcattttccttccatgaacattttaatgcatagattcctgttaaaatttctgattacttcgttagaatagattccaggaagtaatattactaggataagtaatttaagacattaaaggtctttatgtattgccaggaagaatgtaccaactcatgttattaccagtctgcccttctaggttgacttcatgaataatggaagctaggcacacacaccacaaagacagggtggaacaggcaatactttggggtttctttgtcatgaatttttttccaaagtataagattctgtctgtagtactaccttaacttcttctccctttccagcggtttatcatgatcttgaccgagcacctagtacgatgcgaaactgatgggaccagtgtattaacaccatggtataagaactgtatagagaggctgcagcagatcttcctacagcatcaccaaataatccagcagtacatggtgaccctggagaaccttctcttcactgctgaattagaccctcatatcttggccgtgttccagcagttctgtgccctgcaggcctaagggtcattttttcctcatgtcaaggttttttttgatatcttaaaataatttgtcttattttttgatggtttgaatgcttgctttcttgtagtatcctttcacttcttaaaggaaacaaaggggaagaggacagtgaatgaacatggcattacttttaattgccctgaaaagcaaatacttcctaacggcagtaatgtgactatgaccatgatatattatatatgtgacagatacaaattctctgtgatcagtttgttattttttttctccttaaggcacaaaataattggtttgaggtatgtgaaacactagaggtcaaccttacatagtatatagaactgatgggtttacccagctacccagtagcataacttttcacagctcggggatgaattaacatggctgaaataaaactaaaagtatggtttttaaactttggcatttcatgatttatcatctcactctactctaaaactggtggtttcttactgaaggtgttctccatttgaaattttatcttcaaagtatttttaagtagtatctttaagacatgacttgttagtaataaaagtgttactagttggaagagtagctctcaaatttgtcttaatgtaaatcacctgggaatctttcaagttattttgaaatttaaaccaccgtctgggggtggaacgcagacatcctcagtaatccttaaagtttccccaggtgattccaggtttggtcaccattatcttagagcatctactcacttcctctagccttggggttatttgtccaaggtcttgtagtgagttacagaatactaaagtggatgtagaagtggtcagattgactgaaactataccctgaattagatgtgagtttagattttgtttatatggaacctgatccaaaaaactacgaagtcctgagcttgtttcctgtatagtactgatgctgaaataagatgacagcagtttgtaaaataatacacaaatatgaggaattgtctgacattccaaatttcgaggatttttagacttttttcattaaaccttagaaaaaaattaccagtaatcctacaactactggtagtgttgttgtgcatttgcacaaaataggtataattttttcttattacatcccaagtttatgatgcattaagcgttttgcatattttgatatatttttgctttggtttaccatacattttagtggctacagaatgtagtctgcttaataaatgggaattcctagaatgtttaaataccatactatttaagacaaaatacaaaatatccagaaaaatccaggttgcgtggctggttagtaaaggactaaaacccaggttcttggctaaatgttttcgtttatactgtttatctttcccattgcttaagcacagcacaaactatgtaattatatataattacagttgacccttgaacaacatgggtttgaactgtgtgagtctccttacacacaggttttcttccacccctgagatggcaagaccagccccttgtcttcctcagcctgctcaacgtgaagatgatgaggatgaagacctttatgatgatccacttctacttattaaatagtaaatatatttttttcttatgattttattttcttttctctagcttcataagaatatagcatatgggctgggcgcagtggctcacgcctgtaatcccagcactttgggaggctgaggcgggcggatcacaaggtcaggagattgagaccatcctggctaacacagtgaaaccctgtctctactaaaaacacaaaaacttagccaggcgtggtggtacatggctgtagtcccagctacttgggaggctgagacaggagaatcgcttgaacctgggaggtggaggtttcagtgagccaagattgtgccactgcactccagcctgggtgatggagcgaggctctgtctcaaaaaagaaaaaaaatatatagcatataacatacaaaatgagtttatcaactgtttgttattggtaagtcagcagtgggctattggtggttaagttttgggggagtcaaaagttacatgcaaattttttactgtgcggggtgtcagcatccctaaccccatgttgttcaagggtcaactgtagtttaaaatgactcctgtctcaaaaaaccaaaggataacctttaagggattggtaactttgactcaaaactgctttgtaatcttttcacaatgtactgaaaagtgtggctagttatgtttgatccacattctagagaaatttgtaggttttaatttcttttctcttggtcctctcttcatgtataatggttgcttttaacagctgttcgctgatgtggtcctgctctgtcccagtctagcagctttagtgtatggaaaaattgaactaggaattgagttttgaagaaataaaggtgtaagagcaaacattcaacagttgctgtccccagtaatgaagttcatacagacaaaagatggcatgtcactgtacatcataccttgcaataaatattctgttaaattgtgctggtgcaatttaacatgcttttgtcaaagtaaacatactgttttcctaatttataactgtacttgaaaatgaaagatgaggaagggaccttgccaacctatgtagagcaggtttagctgttagtgatttctggataccaggattgtcttaaactggtaagggtgtagagggtgaatagaagcatcccttaactagacaaatctattttctgtaacatagtggccttggtaatacatgctcattaactagtggttattatgtgccaggtgctataggttcaccctattaactacttcaaacagtcctttgagatgattatgccctctttacagataaaaacaggttttggagtaatttacccacggtccacagctagtaagtggaatttgaacctagatccagttggcccaagagctccttccccgcccccataatgctcttacaacaacctgaacccctagttattctgttgtcatcatctgttgtcatcaagctgaaagcttttttccccagagacatcttgctgcccattcagaatcaatttttactaagctgtaatatttagcatagcacgtattagtcattgagtgtgaaggtgtttaaaaaaaaatcaaacttgaaaaatacacaaacatttctgtgtagtctgaattatttggacatgacttgttttgacttagcctttctccaagcataatctccattaaagaaaaaaaaatggaaatgttaaa

SEQ ID NO: 406230 - DNA, 3533 bp, Homo sapiens
ttttttttttaatgttggggattttcaggggtccattattcctatcagcacttttttttccccttcctctttacatcattctgcagcatgggtgggctgctgaaggaaatgttccacaagattgcttatatgctttttcctgacctaactacccccttttgtgtgtccacagcatcaccaaataatccagcagtacatggtgaccctggagaaccttctcttcactgctgaattagaccctcatatcttggccgtgttccagcagttctgtgccctgcaggcctaagggtcattttttcctcatgtcaaggttttttttgatatcttaaaataatttgtcttattttttgatggtttgaatgcttgctttcttgtagtatcctttcacttcttaaaggaaacaaaggggaagaggacagtgaatgaacatggcattacttttaattgccctgaaaagcaaatacttcctaacggcagtaatgtgactatgaccatgatatattatatatgtgacagatacaaattctctgtgatcagtttgttattttttttctccttaaggcacaaaataattggtttgaggtatgtgaaacactagaggtcaaccttacatagtatatagaactgatgggtttacccagctacccagtagcataacttttcacagctcggggatgaattaacatggctgaaataaaactaaaagtatggtttttaaactttggcatttcatgatttatcatctcactctactctaaaactggtggtttcttactgaaggtgttctccatttgaaattttatcttcaaagtatttttaagtagtatctttaagacatgacttgttagtaataaaagtgttactagttggaagagtagctctcaaatttgtcttaatgtaaatcacctgggaatctttcaagttattttgaaatttaaaccaccgtctgggggtggaacgcagacatcctcagtaatccttaaagtttccccaggtgattccaggtttggtcaccattatcttagagcatctactcacttcctctagccttggggttatttgtccaaggtcttgtagtgagttacagaatactaaagtggatgtagaagtggtcagattgactgaaactataccctgaattagatgtgagtttagattttgtttatatggaacctgatccaaaaaactacgaagtcctgagcttgtttcctgtatagtactgatgctgaaataagatgacagcagtttgtaaaataatacacaaatatgaggaattgtctgacattccaaatttcgaggatttttagacttttttcattaaaccttagaaaaaaattaccagtaatcctacaactactggtagtgttgttgtgcatttgcacaaaataggtataattttttcttattacatcccaagtttatgatgcattaagcgttttgcatattttgatatatttttgctttggtttaccatacattttagtggctacagaatgtagtctgcttaataaatgggaattcctagaatgtttaaataccatactatttaagacaaaatacaaaatatccagaaaaatccaggttgcgtggctggttagtaaaggactaaaacccaggttcttggctaaatgttttcgtttatactgtttatctttcccattgcttaagcacagcacaaactatgtaattatatataattacagttgacccttgaacaacatgggtttgaactgtgtgagtctccttacacacaggttttcttccacccctgagatggcaagaccagccccttgtcttcctcagcctgctcaacgtgaagatgatgaggatgaagacctttatgatgatccacttctacttattaaatagtaaatatatttttttcttatgattttattttcttttctctagcttcataagaatatagcatatgggctgggcgcagtggctcacgcctgtaatcccagcactttgggaggctgaggcgggcggatcacaaggtcaggagattgagaccatcctggctaacacagtgaaaccctgtctctactaaaaacacaaaaacttagccaggcgtggtggtacatggctgtagtcccagctacttgggaggctgagacaggagaatcgcttgaacctgggaggtggaggtttcagtgagccaagattgtgccactgcactccagcctgggtgatggagcgaggctctgtctcaaaaaagaaaaaaaatatatagcatataacatacaaaatgagtttatcaactgtttgttattggtaagtcagcagtgggctattggtggttaagttttgggggagtcaaaagttacatgcaaattttttactgtgcggggtgtcagcatccctaaccccatgttgttcaagggtcaactgtagtttaaaatgactcctgtctcaaaaaaccaaaggataacctttaagggattggtaactttgactcaaaactgctttgtaatcttttcacaatgtactgaaaagtgtggctagttatgtttgatccacattctagagaaatttgtaggttttaatttcttttctcttggtcctctcttcatgtataatggttgcttttaacagctgttcgctgatgtggtcctgctctgtcccagtctagcagctttagtgtatggaaaaattgaactaggaattgagttttgaagaaataaaggtgtaagagcaaacattcaacagttgctgtccccagtaatgaagttcatacagacaaaagatggcatgtcactgtacatcataccttgcaataaatattctgttaaattgtgctggtgcaatttaacatgcttttgtcaaagtaaacatactgttttcctaatttataactgtacttgaaaatgaaagatgaggaagggaccttgccaacctatgtagagcaggtttagctgttagtgatttctggataccaggattgtcttaaactggtaagggtgtagagggtgaatagaagcatcccttaactagacaaatctattttctgtaacatagtggccttggtaatacatgctcattaactagtggttattatgtgccaggtgctataggttcaccctattaactacttcaaacagtcctttgagatgattatgccctctttacagataaaaacaggttttggagtaatttacccacggtccacagctagtaagtggaatttgaacctagatccagttggcccaagagctccttccccgcccccataatgctcttacaacaacctgaacccctagttattctgttgtcatcatctgttgtcatcaagctgaaagcttttttccccagagacatcttgctgcccattcagaatcaatttttactaagctgtaatatttagcatagcacgtattagtcattgagtgtgaaggtgtttaaaaaaaaatcaaacttgaaaaatacacaaacatttctgtgtagtctgaattatttggacatgacttgttttgacttagcctttctccaagcataatctccattaaagaaaaaaaaatggaaatgttaaa

SEQ ID NO: 406231 - DNA, 1964 bp, Homo sapiens
cggacgcgtgggataacatacaaaatgagtttatcagctgttgttatggtaagtcagcaggggctatggtggttaagtttgggggagtccaaaagttacatgcaaattttttactgtgcggggtgtcagcatccctaacccttgaacaacatgggtttgaactgtgtgagtctccttacacacaggttttcttccacccctgagatggcaagaccagccccttgtcttcctcagcctgctcaacgtgaagatgatgaggatgaagacctttatgatgatccacttctacttattaaatagtaaatatatttttttcttatgattttattttcttttctctagcttcataagaatatagcatatgggctgggcgcagtggctcacgcctgtaatcccagcactttgggaggctgaggcgggcggatcacaaggtcaggagattgagaccatcctggctaacacagtgaaaccctgtctctactaaaaacacaaaaacttagccaggcgtggtggtacatggctgtagtcccagctacttgggaggctgagacaggagaatcgcttgaacctgggaggtggaggtttcagtgagccaagattgtgccactgcactccagcctgggtgatggagcgaggctctgtctcaaaaaagaaaaaaaatatatagcatataacatacaaaatgagtttatcaactgtttgttattggtaagtcagcagtgggctattggtggttaagttttgggggagtcaaaagttacatgcaaattttttactgtgcggggtgtcagcatccctaaccccatgttgttcaagggtcaactgtagtttaaaatgactcctgtctcaaaaaaccaaaggataacctttaagggattggtaactttgactcaaaactgctttgtaatcttttcacaatgtactgaaaagtgtggctagttatgtttgatccacattctagagaaatttgtaggttttaatttcttttctcttggtcctctcttcatgtataatggttgcttttaacagctgttcgctgatgtggtcctgctctgtcccagtctagcagctttagtgtatggaaaaattgaactaggaattgagttttgaagaaataaaggtgtaagagcaaacattcaacagttgctgtccccagtaatgaagttcatacagacaaaagatggcatgtcactgtacatcataccttgcaataaatattctgttaaattgtgctggtgcaatttaacatgcttttgtcaaagtaaacatactgttttcctaatttataactgtacttgaaaatgaaagatgaggaagggaccttgccaacctatgtagagcaggtttagctgttagtgatttctggataccaggattgtcttaaactggtaagggtgtagagggtgaatagaagcatcccttaactagacaaatctattttctgtaacatagtggccttggtaatacatgctcattaactagtggttattatgtgccaggtgctataggttcaccctattaactacttcaaacagtcctttgagatgattatgccctctttacagataaaaacaggttttggagtaatttacccacggtccacagctagtaagtggaatttgaacctagatccagttggcccaagagctccttccccgcccccataatgctcttacaacaacctgaacccctagttattctgttgtcatcatctgttgtcatcaagctgaaagcttttttccccagagacatcttgctgcccattcagaatcaatttttactaagctgtaatatttagcatagcacgtattagtcattgagtgtgaaggtgtttaaaaaaaaatcaaacttgaaaaatacacaaacatttctgtgtagtctgaattatttggacatgacttgttttgacttagcctttctccaagcataatctccattaaagaaaaaaaaatggaaatgttaaa

SEQ ID NO: 406232 - DNA, 460 bp, Homo sapiens
cgccttcaggcgtacgacgaccgcggcccgggggctctgagtggccaaagcggcggcactttctgcgtggccccggaaggacatagagcggaaggcgggagaaagaagtagccggcaggcggaggcagcccgagggggcggttgcatgtgtgccagacgttcgtagcccactgagcttcctcacgccggctgtcgcagcgcctagccccacccggcggcctctcctgcgcttccggggccgtggcgagctagtgcgcctgcgtgccggcccatccgcgcgccttgcagctgtccttgcgtcggccagcggccagacagttcctgcagcgcttaccgcctggcctctcggttccgcggcgcaccggagggcagcatgtcgcggcggcggcacagcgacgagaacgacggtgagtgcctgcggcccggccacggaggccgctcccggttgggagccgaggct

SEQ ID NO: 406233 - DNA, 479 bp, Homo sapiens
tttggtattaatataatagaggctatgaataaggaaacctgtgtgatttttttttttcaaggaatggatgatagaattaagacagtcacataaaactaagacttaaaattacaagtggtttcatattttcagtgtttgaaatcagtgacggtcttttattgtttattagaaccaaaaaacattacacaaatatctgtgtatagatgtgagcaaccatctatttagcatttgaggtaaggcaccaaggaattgctgtgcttacatttttctgttttactataaaatatttttcagatgaaggattcagttttaacccattgaaaatagaagtctttgtacagactctgctacacttggcagccaaatcattcagccactccttcagtgctcttgcaaagtatgtatgagtacagagccttgcttgagagtttggaattttgcttggtgaacaccagtggtatggtaatttttacctaaga

SEQ ID NO: 406234 - DNA, 860 bp, Homo sapiens
aaaatttttttttttcttgcttcagtttcatcatcttttatatggagaaaataatatgtaccttggaagttgtgagaattaaataataaacatgttaggtgcccgcacaaaacaggtactagaattatatctgtcattgacctaaaaaggataaagagagttggcagaagatacaactgcatgtaggggaatatgcttttcattaactctgtaaagtcgggttttatctgtttgaaggcttatataagtttctgttctaaatcccagttattcttcctttttctctgcctacctcccccttctctacgtaggtttattaattggttttctcatcatctaagtaacttccagttccgttggagctgggaagattggtaagtgatggtttgttttatctttttctgtagtcaaaaaactactaatgtttaaaactgtaacataaaagtgtctgaaatatttaatttcttggaaactatttgtagttaagtacaaatagttacaagtgcaattataacttaacaaaacttgtaagttgttataagttaacagataattatagtacaaatgggtgtaagtgcagattatatgtaagcattgataaaactacatttcctccttaggtcagattgtcttagtcaagatcctgaaagtcccaaaccgaagtttgtaagagaagttctagaaaaatgtatgaggtaagttttttgtgttttctccttttaacttctttgggaggatttctttctcttctctgcacttgtgatgtgtgttcagaatattggattcaaaatccacttactcatcttccatcccatttttaatcaagacttaggctaagaaaaattaggcaaccatgccat

SEQ ID NO: 406235 - DNA, 3450 bp, Homo sapiens
ggagcacatacccgccagtcctgatcctttctaaggtctctcttccctgcactgtctccgcctagcaattgtcactgctcaccgccctcgagcctattcccccgccgcgtatttgggtagaaaagctcgctcgtgacgtcaccaagctccggaagtctcctggcgtcggcgcaagggccgccgggaaaaccattgagaggccaccgggaaaccattgagaagccccggaggaccggcctgagcggaggcggagactagagcggccgccggcacgacccgccttcaggcgtacgacgaccgcggcccgggggctctgagtggccaaagcggcggcactttctgcgtggccccggaaggacatagagcggaaggcgggagaaagaagtagccggcaggcggaggcagcccgagggggcggttgcatgtgtgccagacgttcgtagcccactgagcttcctcacgccggctgtcgcagcgcctagccccacccggcggcctctcctgcgcttccggggccgtggcgagctagtgcgcctgcgtgccggcccatccgcgcgccttgcagctgtccttgcgtcggccagcggccagacagttcctgcagcgcttaccgcctggcctctcggttccgcggcgcaccggagggcagcatgtcgcggcggcggcacagcgacgagaacgacggtgggcagcctcacaaaaggagaaagacctctgatgcaaatgaaactgaagatcatttggaatctttaatatgtaaagtaggagaaaagagtgcctgctctttggagagcaacctagaaggcttggctggtgttttggaagctgatcttcctaactacaagagcaagatcttaaggcttctttgtacagttgcacgcctattacctgagaagctgacaatttatacaacattagttggactactgaatgccaggaattacaattttggtggagaatttgtagaagccatgattcgtcaacttaaagaatcattgaaagcaaacaattataatgaagccgtgtatttggtccgttttttatctgatcttgtgaattgtcatgtgattgccgccccatcaatggttgctatgtttgaaaattttgtaagcgtaactcaggaagaagatgtacctcaggtgcgacgagattggtatgtgtatgcatttctgtcatctttgccctgggttggaaaggagttgtacgaaaagaaagatgcagagatggaccgcatctttgccaacactgaaagctatcttaaaagacgccaaaagactcatgtacccatgttacaggtatggactgctgataaaccacatccacaagaagagtatttagattgcctgtgggcccagattcagaaattgaaaaaggatcgctggcaggaacggcacatcctaagaccttatcttgcctttgacagcatcctgtgtgaagcactgcagcacaatctgcctccttttacaccacctcctcacactgaagattcagtgtacccaatgccaagggtcatcttcagaatgtttgattacacagatgatcccgagggtcctgtcatgccagggagtcattcagtggaaagatttgtaatagaagagaatcttcactgcatcattaagtcccactggaaggaaaggaagacttgtgctgcacagttagtgagctatccagggaagaacaagatccccttgaactaccacatagttgaggtgatctttgcagagctgtttcaacttccagcaccccctcacattgatgtgatgtacacaacactcctcattgaactgtgcaaacttcaacctggctctctaccccaagttcttgcacaggcaactgaaatgctatacatgcgtttggacacaatgaacactacctgtgtagacaggtttattaattggttttctcatcatctaagtaacttccagttccgttggagctgggaagattggtcagattgtcttagtcaagatcctgaaagtcccaaaccgaagtttgtaagagaagttctagaaaaatgtatgaggttgtcttaccatcagcgtatattagatattgttcctcctaccttctcagctctgtgtcctgcaaacccaacctgcatttacaagtatggagatgaaagtagcaattctcttcctggacattctgttgccctctgtttagctgttgcctttaaaagtaaggcaaccaatgatgaaatcttcagcattctgaaagatgtaccaaatcctaaccaggatgatgacgacgatgaaggattcagttttaacccattgaaaatagaagtctttgtacagactctgctacacttggcagccaaatcattcagccactccttcagtgctcttgcaaagtttcatgaagtcttcaaaaccctagctgaaagtgatgaaggaaagttacatgtgctaagagttatgtttgaggtctggaggaaccatccacagatgattgctgtactagtggataagatgattcgtacacaaatagttgattgtgctgccgtagcaaattggatcttctcttcagaactatctcgtgactttaccagattgtttgtttgggaaattttgcactctacaattcgtaagatgaacaaacatgtcctgaagatccagaaagagctggaagaagctaaagagaaacttgctaggcaacacaaacggcgaagtgatgatgacgacagaagcagtgacaggaaagacggggttcttgaggaacaaatagaacgacttcaggaaaaagtggaatctgctcagagtgaacaaaagaatcttttcctcgttatatttcagcggtttatcatgatcttgaccgagcacctagtacgatgcgaaactgatgggaccagtgtattaacaccatggtataagaactgtatagagaggctgcagcagatcttcctacagcatcaccaaataatccagcagtacatggtgaccctggagaaccttctcttcactgctgaattagaccctcatatcttggccgtgttccagcagttctgtgccctgcaggcctaagggtcattttttcctcatgtcaaggttttttttgatatcttaaaataatttgtcttattttttgatggtttgaatgcttgctttcttgtagtatcctttcacttcttaaaggaaacaaaggggaagaggacagtgaatgaacatggcattacttttaattgccctgaaaagcaaatacttcctaacggcagtaatgtgactatgaccatgatatattatatatgtgacagatacaaattctctgtgatcagtttgttattttttttctccttaaggcacaaaataattggtttgaggtatgtgaaacactagaggtcaaccttacatagtatatagaactgatgggtttacccagctacccagtagcataacttttcacagctcggggatgaattaacatggctgaaataaaactaaaagtatggtt

SEQ ID NO: 406236 - DNA, 5504 bp, Homo sapiens
  misc_feature (5407)..(5407): n is a, c, g, or t
  misc_feature (5427)..(5427): n is a, c, g, or t
ggagcacatacccgccagtcctgatcctttctaaggtctctcttccctgcactgtctccgcctagcaattgtcactgctcaccgccctcgagcctattcccccgccgcgtatttgggtagaaaagctcgctcgtgacgtcaccaagctccggaagtctcctggcgtcggcgcaagggccgccgggaaaaccattgagaggccaccgggaaaccattgagaagccccggaggaccggcctgagcggaggcggagactagagcggccgccggcacgacccgccttcaggcgtacgacgaccgcggcccgggggctctgagtggccaaagcggcggcactttctgcgtggccccggaaggacatagagcggaaggcgggagaaagaagtagccggcaggcggaggcagcccgagggggcggttgcatgtgtgccagacgttcgtagcccactgagcttcctcacgccggctgtcgcagcgcctagccccacccggcggcctctcctgcgcttccggggccgtggcgagctagtgcgcctgcgtgccggcccatccgcgcgccttgcagctgtccttgcgtcggccagcggccagacagttcctgcagcgcttaccgcctggcctctcggttccgcggcgcaccggagggcagcatgtcgcggcggcggcacagcgacgagaacgacggtgggcagcctcacaaaaggagaaagacctctgatgcaaatgaaactgaagatcatttggaatctttaatatgtaaagtaggagaaaagagtgcctgctctttggagagcaacctagaaggcttggctggtgttttggaagctgatcttcctaactacaagagcaagatcttaaggcttctttgtacagttgcacgcctattacctgagaagctgacaatttatacaacattagttggactactgaatgccaggaattacaattttggtggagaatttgtagaagccatgattcgtcaacttaaagaatcattgaaagcaaacaattataatgaagccgtgtatttggtccgttttttatctgatcttgtgaattgtcatgtgattgccgccccatcaatggttgctatgtttgaaaattttgtaagcgtaactcaggaagaagatgtacctcaggtgcgacgagattggtatgtgtatgcatttctgtcatctttgccctgggttggaaaggagttgtacgaaaagaaagatgcagagatggaccgcatctttgccaacactgaaagctatcttaaaagacgccaaaagactcatgtacccatgttacaggtatggactgctgataaaccacatccacaagaagagtatttagattgcctgtgggcccagattcagaaattgaaaaaggatcgctggcaggaacggcacatcctaagaccttatcttgcctttgacagcatcctgtgtgaagcactgcagcacaatctgcctccttttacaccacctcctcacactgaagattcagtgtacccaatgccaagggtcatcttcagaatgtttgattacacagatgatcccgagggtcctgtcatgccagggagtcattcagtggaaagatttgtaatagaagagaatcttcactgcatcattaagtcccactggaaggaaaggaagacttgtgctgcacagttagtgagctatccagggaagaacaagatccccttgaactaccacatagttgaggtgatctttgcagagctgtttcaacttccagcaccccctcacattgatgtgatgtacacaacactcctcattgaactgtgcaaacttcaacctggctctctaccccaagttcttgcacaggcaactgaaatgctatacatgcgtttggacacaatgaacactacctgtgtagacaggtttattaattggttttctcatcatctaagtaacttccagttccgttggagctgggaagattggtcagattgtcttagtcaagatcctgaaagtcccaaaccgaagtttgtaagagaagttctagaaaaatgtatgaggttgtcttaccatcagcgtatattagatattgttcctcctaccttctcagctctgtgtcctgcaaacccaacctgcatttacaagtatggagatgaaagtagcaattctcttcctggacattctgttgccctctgtttagctgttgcctttaaaagtaaggcaaccaatgatgaaatcttcagcattctgaaagatgtaccaaatcctaaccaggatgatgacgacgatgaaggattcagttttaacccattgaaaatagaagtctttgtacagactctgctacacttggcagccaaatcattcagccactccttcagtgctcttgcaaagtttcatgaagtcttcaaaaccctagctgaaagtgatgaaggaaagttacatgtgctaagagttatgtttgaggtctggaggaaccatccacagatgattgctgtactagtggataagatgattcgtacacaaatagttgattgtgctgccgtagcaaattggatcttctcttcagaactatctcgtgactttaccagattgtttgtttgggaaattttgcactctacaattcgtaagatgaacaaacatgtcctgaagatccagaaagagctggaagaagctaaagagaaacttgctaggcaacacaaacggcgaagtgatgatgacgacagaagcagtgacaggaaagacggggttcttgaggaacaaatagaacgacttcaggaaaaagtggaatctgctcagagtgaacaaaagaatcttttcctcgttatatttcagcggtttatcatgatcttgaccgagcacctagtacgatgcgaaactgatgggaccagtgtattaacaccatggtataagaactgtatagagaggctgcagcagatcttcctacagcatcaccaaataatccagcagtacatggtgaccctggagaaccttctcttcactgctgaattagaccctcatatcttggccgtgttccagcagttctgtgccctgcaggcctaagggtcattttttcctcatgtcaaggttttttttgatatcttaaaataatttgtcttattttttgatggtttgaatgcttgctttcttgtagtatcctttcacttcttaaaggaaacaaaggggaagaggacagtgaatgaacatggcattacttttaattgccctgaaaagcaaatacttcctaacggcagtaatgtgactatgaccatgatatattatatatgtgacagatacaaattctctgtgatcagtttgttattttttttctccttaaggcacaaaataattggtttgaggtatgtgaaacactagaggtcaaccttacatagtatatagaactgatgggtttacccagctacccagtagcataacttttcacagctcggggatgaattaacatggctgaaataaaactaaaagtatggtttttaaactttggcatttcatgatttatcatctcactctactctaaaactggtggtttcttactgaaggtgttctccatttgaaattttatcttcaaagtatttttaagtagtatctttaagacatgacttgttagtaataaaagtgttactagttggaagagtagctctcaaatttgtcttaatgtaaatcacctgggaatctttcaagttattttgaaatttaaaccaccgtctgggggtggaacgcagacatcctcagtaatccttaaagtttccccaggtgattccaggtttggtcaccattatcttagagcatctactcacttcctctagccttggggttatttgtccaaggtcttgtagtgagttacagaatactaaagtggatgtagaagtggtcagattgactgaaactataccctgaattagatgtgagtttagattttgtttatatggaacctgatccaaaaaactacgaagtcctgagcttgtttcctgtatagtactgatgctgaaataagatgacagcagtttgtaaaataatacacaaatatgaggaattgtctgacattccaaatttcgaggatttttagacttttttcattaaaccttagaaaaaaattaccagtaatcctacaactactggtagtgttgttgtgcatttgcacaaaataggtataattttttcttattacatcccaagtttatgatgcattaagcgttttgcatattttgatatatttttgctttggtttaccatacattttagtggctacagaatgtagtctgcttaataaatgggaattcctagaatgtttaaataccatactatttaagacaaaatacaaaatatccagaaaaatccaggttgcgtggctggttagtaaaggactaaaacccaggttcttggctaaatgttttcgtttatactgtttatctttcccattgcttaagcacagcacaaactatgtaattatatataattacagttgacccttgaacaacatgggtttgaactgtgtgagtctccttacacacaggttttcttccacccctgagatggcaagaccagccccttgtcttcctcagcctgctcaacgtgaagatgatgaggatgaagacctttatgatgatccacttctacttattaaatagtaaatatatttttttcttatgattttattttcttttctctagcttcataagaatatagcatatgggctgggcgcagtggctcacgcctgtaatcccagcactttgggaggctgaggcgggcggatcacaaggtcaggagattgagaccatcctggctaacacagtgaaaccctgtctctactaaaaacacaaaaacttagccaggcgtggtggtacatggctgtagtcccagctacttgggaggctgagacaggagaatcgcttgaacctgggaggtggaggtttcagtgagccaagattgtgccactgcactccagcctgggtgatggagcgaggctctgtctcaaaaaagaaaaaaaatatatagcatataacatacaaaatgagtttatcaactgtttgttattggtaagtcagcagtgggctattggtggttaagttttgggggagtcaaaagttacatgcaaattttttactgtgcggggtgtcagcatccctaaccccatgttgttcaagggtcaactgtagtttaaaatgactcctgtctcaaaaaaccaaaggataacctttaagggattggtaactttgactcaaaactgctttgtaatcttttcacaatgtactgaaaagtgtggctagttatgtttgatccacattctagagaaatttgtaggttttaatttcttttctcttggtcctctcttcatgtataatggttgcttttaacagctgttcgctgatgtggtcctgctctgtcccagtctagcagctttagtgtatggaaattctaggtcttaggtnatgtctagaagatttttatntcggaatattaatttctatcttcgtacgtcacatacagtctcggacacggggatgcctccagtagtcgaactgcagc

SEQ ID NO: 406237 - DNA, 6888 bp, Homo sapiens
ggagcacatacccgccagtcctgatcctttctaaggtctctcttccctgcactgtctccgcctagcaattgtcactgctcaccgccctcgagcctattcccccgccgcgtatttgggtagaaaagctcgctcgtgacgtcaccaagctccggaagtctcctggcgtcggcgcaagggccgccgggaaaaccattgagaggccaccgggaaaccattgagaagccccggaggaccggcctgagcggaggcggagactagagcggccgccggcacgacccgccttcaggcgtacgacgaccgcggcccgggggctctgagtggccaaagcggcggcactttctgcgtggccccggaaggacatagagcggaaggcgggagaaagaagtagccggcaggcggaggcagcccgagggggcggttgcatgtgtgccagacgttcgtagcccactgagcttcctcacgccggctgtcgcagcgcctagccccacccggcggcctctcctgcgcttccggggccgtggcgagctagtgcgcctgcgtgccggcccatccgcgcgccttgcagctgtccttgcgtcggccagcggccagacagttcctgcagcgcttaccgcctggcctctcggttccgcggcgcaccggagggcagcatgtcgcggcggcggcacagcgacgagaacgacggtgggcagcctcacaaaaggagaaagacctctgatgcaaatgaaactgaagatcatttggaatctttaatatgtaaagtaggagaaaagagtgcctgctctttggagagcaacctagaaggcttggctggtgttttggaagctgatcttcctaactacaagagcaagatcttaaggcttctttgtacagttgcacgcctattacctgagaagctgacaatttatacaacattagttggactactgaatgccaggaattacaattttggtggagaatttgtagaagccatgattcgtcaacttaaagaatcattgaaagcaaacaattataatgaagccgtgtatttggtccgttttttatctgatcttgtgaattgtcatgtgattgccgccccatcaatggttgctatgtttgaaaattttgtaagcgtaactcaggaagaagatgtacctcaggtgcgacgagattggtatgtgtatgcatttctgtcatctttgccctgggttggaaaggagttgtacgaaaagaaagatgcagagatggaccgcatctttgccaacactgaaagctatcttaaaagacgccaaaagactcatgtacccatgttacaggtatggactgctgataaaccacatccacaagaagagtatttagattgcctgtgggcccagattcagaaattgaaaaaggatcgctggcaggaacggcacatcctaagaccttatcttgcctttgacagcatcctgtgtgaagcactgcagcacaatctgcctccttttacaccacctcctcacactgaagattcagtgtacccaatgccaagggtcatcttcagaatgtttgattacacagatgatcccgagggtcctgtcatgccagggagtcattcagtggaaagatttgtaatagaagagaatcttcactgcatcattaagtcccactggaaggaaaggaagacttgtgctgcacagttagtgagctatccagggaagaacaagatccccttgaactaccacatagttgaggtgatctttgcagagctgtttcaacttccagcaccccctcacattgatgtgatgtacacaacactcctcattgaactgtgcaaacttcaacctggctctctaccccaagttcttgcacaggcaactgaaatgctatacatgcgtttggacacaatgaacactacctgtgtagacaggtttattaattggttttctcatcatctaagtaacttccagttccgttggagctgggaagattggtcagattgtcttagtcaagatcctgaaagtcccaaaccgaagtttgtaagagaagttctagaaaaatgtatgaggttgtcttaccatcagcgtatattagatattgttcctcctaccttctcagctctgtgtcctgcaaacccaacctgcatttacaagtatggagatgaaagtagcaattctcttcctggacattctgttgccctctgtttagctgttgcctttaaaagtaaggcaaccaatgatgaaatcttcagcattctgaaagatgtaccaaatcctaaccaggatgatgacgacgatgaaggattcagttttaacccattgaaaatagaagtctttgtacagactctgctacacttggcagccaaatcattcagccactccttcagtgctcttgcaaagtttcatgaagtcttcaaaaccctagctgaaagtgatgaaggaaagttacatgtgctaagagttatgtttgaggtctggaggaaccatccacagatgattgctgtactagtggataagatgattcgtacacaaatagttgattgtgctgccgtagcaaattggatcttctcttcagaactatctcgtgactttaccagattgtttgtttgggaaattttgcactctacaattcgtaagatgaacaaacatgtcctgaagatccagaaagagctggaagaagctaaagagaaacttgctaggcaacacaaacggcgaagtgatgatgacgacagaagcagtgacaggaaagacggggttcttgaggaacaaatagaacgacttcaggaaaaagtggaatctgctcagagtgaacaaaagaatcttttcctcgttatatttcaggtatcttggcttgggacatttatacataaaaggaaacaatacatttctttagttttagtttttaaaaatgttatttttcattgtaaaaggaatacacattcatttatagaagagattaaaaatacaaaaatttaggaaggaaataaaagttcactactcagaggcaaccatgtatgtctgagtttctctgctgtttacttagtattctcgcatgagcatttctccatgcttgaaaaaaaattgtgggttgctttttttatatatgtctcgtttaattattcctcattgctgatcattttccttccatgaacattttaatgcatagattcctgttaaaatttctgattacttcgttagaatagattccaggaagtaatattactaggataagtaatttaagacattaaaggtctttatgtattgccaggaagaatgtaccaactcatgttattaccagtctgcccttctaggttgacttcatgaataatggaagctaggcacacacaccacaaagacagggtggaacaggcaatactttggggtttctttgtcatgaatttttttccaaagtataagattctgtctgtagtactaccttaacttcttctccctttccagcggtttatcatgatcttgaccgagcacctagtacgatgcgaaactgatgggaccagtgtattaacaccatggtataagaactgtatagagaggctgcagcagatcttcctacagcatcaccaaataatccagcagtacatggtgaccctggagaaccttctcttcactgctgaattagaccctcatatcttggccgtgttccagcagttctgtgccctgcaggcctaagggtcattttttcctcatgtcaaggttttttttgatatcttaaaataatttgtcttattttttgatggtttgaatgcttgctttcttgtagtatcctttcacttcttaaaggaaacaaaggggaagaggacagtgaatgaacatggcattacttttaattgccctgaaaagcaaatacttcctaacggcagtaatgtgactatgaccatgatatattatatatgtgacagatacaaattctctgtgatcagtttgttattttttttctccttaaggcacaaaataattggtttgaggtatgtgaaacactagaggtcaaccttacatagtatatagaactgatgggtttacccagctacccagtagcataacttttcacagctcggggatgaattaacatggctgaaataaaactaaaagtatggtttttaaactttggcatttcatgatttatcatctcactctactctaaaactggtggtttcttactgaaggtgttctccatttgaaattttatcttcaaagtatttttaagtagtatctttaagacatgacttgttagtaataaaagtgttactagttggaagagtagctctcaaatttgtcttaatgtaaatcacctgggaatctttcaagttattttgaaatttaaaccaccgtctgggggtggaacgcagacatcctcagtaatccttaaagtttccccaggtgattccaggtttggtcaccattatcttagagcatctactcacttcctctagccttggggttatttgtccaaggtcttgtagtgagttacagaatactaaagtggatgtagaagtggtcagattgactgaaactataccctgaattagatgtgagtttagattttgtttatatggaacctgatccaaaaaactacgaagtcctgagcttgtttcctgtatagtactgatgctgaaataagatgacagcagtttgtaaaataatacacaaatatgaggaattgtctgacattccaaatttcgaggatttttagacttttttcattaaaccttagaaaaaaattaccagtaatcctacaactactggtagtgttgttgtgcatttgcacaaaataggtataattttttcttattacatcccaagtttatgatgcattaagcgttttgcatattttgatatatttttgctttggtttaccatacattttagtggctacagaatgtagtctgcttaataaatgggaattcctagaatgtttaaataccatactatttaagacaaaatacaaaatatccagaaaaatccaggttgcgtggctggttagtaaaggactaaaacccaggttcttggctaaatgttttcgtttatactgtttatctttcccattgcttaagcacagcacaaactatgtaattatatataattacagttgacccttgaacaacatgggtttgaactgtgtgagtctccttacacacaggttttcttccacccctgagatggcaagaccagccccttgtcttcctcagcctgctcaacgtgaagatgatgaggatgaagacctttatgatgatccacttctacttattaaatagtaaatatatttttttcttatgattttattttcttttctctagcttcataagaatatagcatatgggctgggcgcagtggctcacgcctgtaatcccagcactttgggaggctgaggcgggcggatcacaaggtcaggagattgagaccatcctggctaacacagtgaaaccctgtctctactaaaaacacaaaaacttagccaggcgtggtggtacatggctgtagtcccagctacttgggaggctgagacaggagaatcgcttgaacctgggaggtggaggtttcagtgagccaagattgtgccactgcactccagcctgggtgatggagcgaggctctgtctcaaaaaagaaaaaaaatatatagcatataacatacaaaatgagtttatcaactgtttgttattggtaagtcagcagtgggctattggtggttaagttttgggggagtcaaaagttacatgcaaattttttactgtgcggggtgtcagcatccctaaccccatgttgttcaagggtcaactgtagtttaaaatgactcctgtctcaaaaaaccaaaggataacctttaagggattggtaactttgactcaaaactgctttgtaatcttttcacaatgtactgaaaagtgtggctagttatgtttgatccacattctagagaaatttgtaggttttaatttcttttctcttggtcctctcttcatgtataatggttgcttttaacagctgttcgctgatgtggtcctgctctgtcccagtctagcagctttagtgtatggaaaaattgaactaggaattgagttttgaagaaataaaggtgtaagagcaaacattcaacagttgctgtccccagtaatgaagttcatacagacaaaagatggcatgtcactgtacatcataccttgcaataaatattctgttaaattgtgctggtgcaatttaacatgcttttgtcaaagtaaacatactgttttcctaatttataactgtacttgaaaatgaaagatgaggaagggaccttgccaacctatgtagagcaggtttagctgttagtgatttctggataccaggattgtcttaaactggtaagggtgtagagggtgaatagaagcatcccttaactagacaaatctattttctgtaacatagtggccttggtaatacatgctcattaactagtggttattatgtgccaggtgctataggttcaccctattaactacttcaaacagtcctttgagatgattatgccctctttacagataaaaacaggttttggagtaatttacccacggtccacagctagtaagtggaatttgaacctagatccagttggcccaagagctccttccccgcccccataatgctcttacaacaacctgaacccctagttattctgttgtcatcatctgttgtcatcaagctgaaagcttttttccccagagacatcttgctgcccattcagaatcaatttttactaagctgtaatatttagcatagcacgtattagtcattgagtgtgaaggtgtttaaaaaaaaatcaaacttgaaaaatacacaaacatttctgtgtagtctgaattatttggacatgacttgttttgacttagcctttctccaagcataatctccattaaagaaaaaaaaatggaaatgttaaa

SEQ ID NO: 406238 - DNA, 4826 bp, Homo sapiens
ggagcacatacccgccagtcctgatcctttctaaggtctctcttccctgcactgtctccgcctagcaattgtcactgctcaccgccctcgagcctattcccccgccgcgtatttgggtagaaaagctcgctcgtgacgtcaccaagctccggaagtctcctggcgtcggcgcaagggccgccgggaaaaccattgagaggccaccgggaaaccattgagaagccccggaggaccggcctgagcggaggcggagactagagcggccgccggcacgacccgccttcaggcgtacgacgaccgcggcccgggggctctgagtggccaaagcggcggcactttctgcgtggccccggaaggacatagagcggaaggcgggagaaagaagtagccggcaggcggaggcagcccgagggggcggttgcatgtgtgccagacgttcgtagcccactgagcttcctcacgccggctgtcgcagcgcctagccccacccggcggcctctcctgcgcttccggggccgtggcgagctagtgcgcctgcgtgccggcccatccgcgcgccttgcagctgtccttgcgtcggccagcggccagacagttcctgcagcgcttaccgcctggcctctcggttccgcggcgcaccggagggcagcatgtcgcggcggcggcacagcgacgagaacgacggtgggcagcctcacaaaaggagaaagacctctgatgcaaatgaaactgaagatcatttggaatctttaatatgtaaagtaggagaaaagagtgcctgctctttggagagcaacctagaaggcttggctggtgttttggaagctgatcttcctaactacaagagcaagatcttaaggcttctttgtacagttgcacgcctattacctgagaagctgacaatttatacaacattagttggactactgaatgccaggaattacaattttggtggagaatttgtagaagccatgattcgtcaacttaaagaatcattgaaagcaaacaattataatgaagccgtgtatttggtccgttttttatctgatcttgtgaattgtcatgtgattgccgccccatcaatggttgctatgtttgaaaattttgtaagcgtaactcaggaagaagatgtacctcaggtgcgacgagattggtatgtgtatgcatttctgtcatctttgccctgggttggaaaggagttgtacgaaaagaaagatgcagagatggaccgcatctttgccaacactgaaagctatcttaaaagacgccaaaagactcatgtacccatgttacaggtatggactgctgataaaccacatccacaagaagagtatttagattgcctgtgggcccagattcagaaattgaaaaaggatcgctggcaggaacggcacatcctaagaccttatcttgcctttgacagcatcctgtgtgaagcactgcagcacaatctgcctccttttacaccacctcctcacactgaagattcagtgtacccaatgccaagggtcatcttcagaatgtttgattacacagatgatcccgagggtcctgtcatgccagggagtcattcagtggaaagatttgtaatagaagagaatcttcactgcatcattaagtcccactggaaggaaaggaagacttgtgctgcacagttagtgagctatccagggaagaacaagatccccttgaactaccacatagttgaggtgatctttgcagagctgtttcaacttccagcaccccctcacattgatgtgatgtacacaacactcctcattgaactgtgcaaacttcaacctggctctctaccccaagttcttgcacaggcaactgaaatgctatacatgcgtttggacacaatgaacactacctgtgtagacaggtttattaattggttttctcatcatctaagtaacttccagttccgttggagctgggaagattggtcagattgtcttagtcaagatcctgaaagtcccaaaccgaagtttgtaagagaagttctagaaaaatgtatgaggttgtcttaccatcagcgtatattagatattgttcctcctaccttctcagctctgtgtcctgcaaacccaacctgcatttacaagtatggagatgaaagtagcaattctcttcctggacattctgttgccctctgtttagctgttgcctttaaaagtaaggcaaccaatgatgaaatcttcagcattctgaaagatgtaccaaatcctaaccaggatgatgacgacgatgaaggattcagttttaacccattgaaaatagaagtctttgtacagactctgctacacttggcagccaaatcattcagccactccttcagtgctcttgcaaagtttcatgaagtcttcaaaaccctagctgaaagtgatgaaggaaagttacatgtgctaagagttatgtttgaggtctggaggaaccatccacagatgattgctgtactagtggataagatgattcgtacacaaatagttgattgtgctgccgtagcaaattggatcttctcttcagaactatctcgtgactttaccagattgtttgtttgggaaattttgcactctacaattcgtaagatgaacaaacatgtcctgaagatccagaaagagctggaagaagctaaagagaaacttgctaggcaacacaaacggcgaagtgatgatgacgacagaagcagtgacaggaaagacggggttcttgaggaacaaatagaacgacttcaggaaaaagtggaatctgctcagagtgaacaaaagaatcttttcctcgttatatttcagcggtttatcatgatcttgaccgagcacctagtacgatgcgaaactgatgggaccagtgtattaacaccatggtataagaactgtatagagaggctgcagcagatcttcctacagcatcaccaaataatccagcagtacatggtgaccctggagaaccttctcttcactgctgaattagaccctcatatcttggccgtgttccagcagttctgtgccctgcaggcctaagggtcattttttcctcatgtcaaggttttcttccacccctgagatggcaagaccagccccttgtcttcctcagcctgctcaacgtgaagatgatgaggatgaagacctttatgatgatccacttctacttattaaatagtaaatatatttttttcttatgattttattttcttttctctagcttcataagaatatagcatatgggctgggcgcagtggctcacgcctgtaatcccagcactttgggaggctgaggcgggcggatcacaaggtcaggagattgagaccatcctggctaacacagtgaaaccctgtctctactaaaaacacaaaaacttagccaggcgtggtggtacatggctgtagtcccagctacttgggaggctgagacaggagaatcgcttgaacctgggaggtggaggtttcagtgagccaagattgtgccactgcactccagcctgggtgatggagcgaggctctgtctcaaaaaagaaaaaaaatatatagcatataacatacaaaatgagtttatcaactgtttgttattggtaagtcagcagtgggctattggtggttaagttttgggggagtcaaaagttacatgcaaattttttactgtgcggggtgtcagcatccctaaccccatgttgttcaagggtcaactgtagtttaaaatgactcctgtctcaaaaaaccaaaggataacctttaagggattggtaactttgactcaaaactgctttgtaatcttttcacaatgtactgaaaagtgtggctagttatgtttgatccacattctagagaaatttgtaggttttaatttcttttctcttggtcctctcttcatgtataatggttgcttttaacagctgttcgctgatgtggtcctgctctgtcccagtctagcagctttagtgtatggaaaaattgaactaggaattgagttttgaagaaataaaggtgtaagagcaaacattcaacagttgctgtccccagtaatgaagttcatacagacaaaagatggcatgtcactgtacatcataccttgcaataaatattctgttaaattgtgctggtgcaatttaacatgcttttgtcaaagtaaacatactgttttcctaatttataactgtacttgaaaatgaaagatgaggaagggaccttgccaacctatgtagagcaggtttagctgttagtgatttctggataccaggattgtcttaaactggtaagggtgtagagggtgaatagaagcatcccttaactagacaaatctattttctgtaacatagtggccttggtaatacatgctcattaactagtggttattatgtgccaggtgctataggttcaccctattaactacttcaaacagtcctttgagatgattatgccctctttacagataaaaacaggttttggagtaatttacccacggtccacagctagtaagtggaatttgaacctagatccagttggcccaagagctccttccccgcccccataatgctcttacaacaacctgaacccctagttattctgttgtcatcatctgttgtcatcaagctgaaagcttttttccccagagacatcttgctgcccattcagaatcaatttttactaagctgtaatatttagcatagcacgtattagtcattgagtgtgaaggtgtttaaaaaaaaatcaaacttgaaaaatacacaaacatttctgtgtagtctgaattatttggacatgacttgttttgacttagcctttctccaagcataatctccattaaagaaaaaaaaatggaaatgttaaa

SEQ ID NO: 406239 - DNA, 3363 bp, Homo sapiens
ggagcacatacccgccagtcctgatcctttctaaggtctctcttccctgcactgtctccgcctagcaattgtcactgctcaccgccctcgagcctattcccccgccgcgtatttgggtagaaaagctcgctcgtgacgtcaccaagctccggaagtctcctggcgtcggcgcaagggccgccgggaaaaccattgagaggccaccgggaaaccattgagaagccccggaggaccggcctgagcggaggcggagactagagcggccgccggcacgacccgccttcaggcgtacgacgaccgcggcccgggggctctgagtggccaaagcggcggcactttctgcgtggccccggaaggacatagagcggaaggcgggagaaagaagtagccggcaggcggaggcagcccgagggggcggttgcatgtgtgccagacgttcgtagcccactgagcttcctcacgccggctgtcgcagcgcctagccccacccggcggcctctcctgcgcttccggggccgtggcgagctagtgcgcctgcgtgccggcccatccgcgcgccttgcagctgtccttgcgtcggccagcggccagacagttcctgcagcgcttaccgcctggcctctcggttccgcggcgcaccggagggcagcatgtcgcggcggcggcacagcgacgagaacgacggtgggcagcctcacaaaaggagaaagacctctgatgcaaatgaaactgaagatcatttggaatctttaatatgtaaagtaggagaaaagagtgcctgctctttggagagcaacctagaaggcttggctggtgttttggaagctgatcttcctaactacaagagcaagatcttaaggcttctttgtacagttgcacgcctattacctgagaagctgacaatttatacaacattagttggactactgaatgccaggaattacaattttggtggagaatttgtagaagccatgattcgtcaacttaaagaatcattgaaagcaaacaattataatgaagccgtgtatttggtccgttttttatctgatcttgtgaattgtcatgtgattgccgccccatcaatggttgctatgtttgaaaattttgtaagcgtaactcaggaagaagatgtacctcaggtgcgacgagattggtatgtgtatgcatttctgtcatctttgccctgggttggaaaggagttgtacgaaaagaaagatgcagagatggaccgcatctttgccaacactgaaagctatcttaaaagacgccaaaagactcatgtacccatgttacaggtatggactgctgataaaccacatccacaagaagagtatttagattgcctgtgggcccagattcagaaattgaaaaaggatcgctggcaggaacggcacatcctaagaccttatcttgcctttgacagcatcctgtgtgaagcactgcagcacaatctgcctccttttacaccacctcctcacactgaagattcagtgtacccaatgccaagggtcatcttcagaatgtttgattacacagatgatcccgagggtcctgtcatgccagggagtcattcagtggaaagatttgtaatagaagagaatcttcactgcatcattaagtcccactggaaggaaaggaagacttgtgctgcacagttagtgagctatccagggaagaacaagatccccttgaactaccacatagttgaggtgatctttgcagagctgtttcaacttccagcaccccctcacattgatgtgatgtacacaacactcctcattgaactgtgcaaacttcaacctggctctctaccccaagttcttgcacaggcaactgaaatgctatacatgcgtttggacacaatgaacactacctgtgtagacaggtttattaattggttttctcatcatctaagtaacttccagttccgttggagctgggaagattggtcagattgtcttagtcaagatcctgaaagtcccaaaccgaagtttgtaagagaagttctagaaaaatgtatgaggttgtcttaccatcagcgtatattagatattgttcctcctaccttctcagctctgtgtcctgcaaacccaacctgcatttacaagtatggagatgaaagtagcaattctcttcctggacattctgttgccctctgtttagctgttgcctttaaaagtaaggcaaccaatgatgaaatcttcagcattctgaaagatgtaccaaatcctaaccaggatgatgacgacgatgaaggattcagttttaacccattgaaaatagaagtctttgtacagactctgctacacttggcagccaaatcattcagccactccttcagtgctcttgcaaagtttcatgaagtcttcaaaaccctagctgaaagtgatgaaggaaagttacatgtgctaagagttatgtttgaggtctggaggaaccatccacagatgattgctgtactagtggataagatgattcgtacacaaatagttgattgtgctgccgtagcaaattggatcttctcttcagaactatctcgtgactttaccagattgtttgtttgggaaattttgcactctacaattcgtaagatgaacaaacatgtcctgaagatccagaaagagctggaagaagctaaagagaaacttgctaggcaacacaaacggcgaagtgatgatgacgacagaagcagtgacaggaaagacggggttcttgaggaacaaatagaacgacttcaggaaaaagtggaatctgctcagagtgaacaaaagaatcttttcctcgttatatttcagcggtttatcatgatcttgaccgagcacctagtacgatgcgaaactgatgggaccagtgtattaacaccatggtataagaactgtatagagaggctgcagcagatcttcctacagcatcaccaaataatccagcagtacatggtgaccctggagaaccttctcttcactgctgaattagaccctcatatcttggccgtgttccagcagttctgtgccctgcaggcctaagggtcattttttcctcatgtcaaggttttcttccacccctgagatggcaagaccagccccttgtcttcctcagcctgctcaacgtgaagatgatgaggatgaagacctttatgatgatccacttctacttattaaatactgttcgctgatgtggtcctgctctgtcccagtctagcagctttagtgtatggaaaaattgaactaggaattgagttttgaagaaataaaggtgtaagagcaaacattcaacagttgctgtccccagtaatgaagttcatacagacaaaagatggcatgtcactgtacatcataccttgcaataaatattctgttaaattgt

SEQ ID NO: 406240 - DNA, 3748 bp, Homo sapiens
ggagcacatacccgccagtcctgatcctttctaaggtctctcttccctgcactgtctccgcctagcaattgtcactgctcaccgccctcgagcctattcccccgccgcgtatttgggtagaaaagctcgctcgtgacgtcaccaagctccggaagtctcctggcgtcggcgcaagggccgccgggaaaaccattgagaggccaccgggaaaccattgagaagccccggaggaccggcctgagcggaggcggagactagagcggccgccggcacgacccgccttcaggcgtacgacgaccgcggcccgggggctctgagtggccaaagcggcggcactttctgcgtggccccggaaggacatagagcggaaggcgggagaaagaagtagccggcaggcggaggcagcccgagggggcggttgcatgtgtgccagacgttcgtagcccactgagcttcctcacgccggctgtcgcagcgcctagccccacccggcggcctctcctgcgcttccggggccgtggcgagctagtgcgcctgcgtgccggcccatccgcgcgccttgcagctgtccttgcgtcggccagcggccagacagttcctgcagcgcttaccgcctggcctctcggttccgcggcgcaccggagggcagcatgtcgcggcggcggcacagcgacgagaacgacggtgggcagcctcacaaaaggagaaagacctctgatgcaaatgaaactgaagatcatttggaatctttaatatgtaaagtaggagaaaagagtgcctgctctttggagagcaacctagaaggcttggctggtgttttggaagctgatcttcctaactacaagagcaagatcttaaggcttctttgtacagttgcacgcctattacctgagaagctgacaatttatacaacattagttggactactgaatgccaggaattacaattttggtggagaatttgtagaagccatgattcgtcaacttaaagaatcattgaaagcaaacaattataatgaagccgtgtatttggtccgttttttatctgatcttgtgaattgtcatgtgattgccgccccatcaatggttgctatgtttgaaaattttgtaagcgtaactcaggaagaagatgtacctcaggtgcgacgagattggtatgtgtatgcatttctgtcatctttgccctgggttggaaaggagttgtacgaaaagaaagatgcagagatggaccgcatctttgccaacactgaaagctatcttaaaagacgccaaaagactcatgtacccatgttacaggtatggactgctgataaaccacatccacaagaagagtatttagattgcctgtgggcccagattcagaaattgaaaaaggatcgctggcaggaacggcacatcctaagaccttatcttgcctttgacagcatcctgtgtgaagcactgcagcacaatctgcctccttttacaccacctcctcacactgaagattcagtgtacccaatgccaagggtcatcttcagaatgtttgattacacagatgatcccgagggtcctgtcatgccagggagtcattcagtggaaagatttgtaatagaagagaatcttcactgcatcattaagtcccactggaaggaaaggaagacttgtgctgcacagttagtgagctatccagggaagaacaagatccccttgaactaccacatagttgaggtgatctttgcagagctgtttcaacttccagcaccccctcacattgatgtgatgtacacaacactcctcattgaactgtgcaaacttcaacctggctctctaccccaagttcttgcacaggcaactgaaatgctatacatgcgtttggacacaatgaacactacctgtgtagacaggtttattaattggttttctcatcatctaagtaacttccagttccgttggagctgggaagattggtcagattgtcttagtcaagatcctgaaagtcccaaaccgaagtttgtaagagaagttctagaaaaatgtatgaggttgtcttaccatcagcgtatattagatattgttcctcctaccttctcagctctgtgtcctgcaaacccaacctgcatttacaagtatggagatgaaagtagcaattctcttcctggacattctgttgccctctgtttagctgttgcctttaaaagtaaggcaaccaatgatgaaatcttcagcattctgaaagatgtaccaaatcctaaccaggatgatgacgacgatgaaggattcagttttaacccattgaaaatagaagtctttgtacagactctgctacacttggcagccaaatcattcagccactccttcagtgctcttgcaaagtttcatgaagtcttcaaaaccctagctgaaagtgatgaaggaaagttacatgtgctaagagttatgtttgaggtctggaggaaccatccacagatgattgctgtactagtggataagatgattcgtacacaaatagttgattgtgctgccgtagcaaattggatcttctcttcagaactatctcgtgactttaccagattgtttgtttgggaaattttgcactctacaattcgtaagatgaacaaacatgtcctgaagatccagaaagagctggaagaagctaaagagaaacttgctaggcaacacaaacggcgaagtgatgatgacgacagaagcagtgacaggaaagacggggttcttgaggaacaaatagaacgacttcaggaaaaagtggaatctgctcagagtgaacaaaagaatcttttcctcgttatatttcaggtatcttggcttgggacatttatacataaaaggaaacaatacatttctttagttttagtttttaaaaatgttatttttcattgtaaaaggaatacacattcatttatagaagagattaaaaatacaaaaatttaggaaggaaataaaagttcactactcagaggcaaccatgtatgtctgagtttctctgctgtttacttagtattctcgcatgagcatttctccatgcttgaaaaaaaattgtgggttgctttttttatatatgtctcgtttaattattcctcattgctgatcattttccttccatgaacattttaatgcatagattcctgttaaaatttctgattacttcgttagaatagattccaggaagtaatattactaggataagtaatttaagacattaaaggtctttatgtattgccaggaagaatgtaccaactcatgttattaccagtctgcccttctaggttgacttcatgaataatggaagctaggcacacacaccacaaagacagggtggaacaggcaatactttggggtttctttgtcatgaatttttttccaaagtataagattctgtctgtagtactaccttaacttcttctccctttccagcggtttatcatgatcttgaccgagcacctagtacgatgcgaaactgatgggaccagtgtattaacaccatggtataagaactgtatagagaggctgcagcagatcttcctacaggtatgtggggaacttcgattaggtaataacactattctcagccacaaagatttttcattaaaaaaaatccttgtcaaatttgttaggaggttatatagtacctgttagaccctttagttcatgtccatttgctgctaccattgctcatcagaatatttaggcttaaactgattctgtaccacttagattcctaattgccacccccccaacaaccccccgcc

SEQ ID NO: 406241 - DNA, 181 bp, Homo sapiens
agtgcccagtgggaaatattggagagatactttggaataataggcgactattactttgaagtcagacctgaagtccattatctacttgaccaattagtaggacaacaatctcactgaacccgttttctcatatggaaataagataaaacttgaagagtgaacatcgcggtaggtgctttgt

SEQ ID NO: 406242 - DNA, 439 bp, Homo sapiens
aataaacataaaagatctctctcctttccaggacaccctcaatggtttgtttcaccaaatgtccaatctatatttaataagcctcaacagtcatttttctgaaggcattggccaggtcctccttgtggcagactttgaagagctattgcaaggtctaaacttgtgacatggaagaaaatacaactaaaaattaaatgatcttagaataaagaaggccttattaatttctagtgtcagaaattatcaaggaagagaatgtacttagctatgtaacacctcagaacttctttcaatcaaaagacattctgaactattctgaaagataaaagacaagctggggcagtatttacccatgtatgagaaagagttattaagagttcttacaaattaatatagatttataacataaagataattacactaatagaaaatgggccaa

SEQ ID NO: 406243 - DNA, 326 bp, Homo sapiens
taatagttaacgtgcctacttgctattgtattgaacagtacagcagaaagtaagattaatcctaagggggactttggttttcaggattacttatattttataataagactgtattacatatatacatgcctacatttatgtatgtatatatgtgtattttttatctatagaggttgccttgtctcataattatgtctacttgtcttctccatactccaaatgtaacagttcattgaaagtacatatgaaaaccattaataattcaagtaatagtcttttcctctcaacttactcaagatatacatatatatatatacacacacaca

SEQ ID NO: 406244 - DNA, 438 bp, Homo sapiens
aaagaggaaccaatgtctctatgtgtaagctggacaaagctttgctattaagtcagagaaaaatacatgcttaccttatttatatatttgttcatattgatatctttcaattgtgttagtccttctgggaatgtaatatggaacaagaaacatacaccctgatgaacagagttgcaacaattgcttaaaaatactagcaaaccaggctggggtgcggtggctcatgcctgtaatcccagcactttgggaggacgaggtgggcagatctcttgagttcaggagttcgagactagactgaccaacatggtgaaaccccatctctactaaaaatacaaaaattggctggacgtggtggcacatgcctgtaatcccatctactcaggaggctgaggcaggagaattgcttgaacctgggaggcagaggttgcagtgagccga

SEQ ID NO: 406245 - DNA, 560 bp, Homo sapiens
actgaggcctcgggtagttcaacttagagatcagggacaagaggtgggacaaaggaggctacacaggaacagatactatggtaggtagaaaacaaagtggtttcctcaaagcagagaaggagggcgtagcaactgtccaatgctagtgtagtcaaacgagcaagtaaggtaaggcctaagaactcaccacggggcctggtgtggtggctcacacctgtaatctcagcattgtgggaggccgaggtgggcagatcacctgcggtcaggagttcgaggccagcctgggcaacatggtgaaaccctgtctctactaaaaatacaaaaaacatttagcctgtaatcccagcttctcgggaggctgaggcaggagaattgcttgaacccaggaggtagaggttgcagtgagccaagatcacaccactgcactccagcctgggcaacagagtgagaatctgtctcaaaaaacaaacaaacaaacctgacaactgaagttagcaattcacacttacatggtaagctgttggtgaccttgacaatagctatgaaggtaatggtatgga

SEQ ID NO: 406246 - DNA, 186 bp, Homo sapiens
ttgtattctatagtatggatatatggtaaattgtatacatgtaacttaatcgttaaagtcagctctgtcaatgatagacatttagtgtttttccttccatattttcactattacaaacaagtatttttatgtaacatctgattatttccttaggatggattcttacaagtggaactgctaggtcag

SEQ ID NO: 406247 - DNA, 247 bp, Homo sapiens
tctgctagttgtcagcctccctttggataagcacccatcagcatttgatcaggcttctgctcaatgtccttcaagtggctctggccttgccttgagagcagggtaaagataatctcttgtttgttgataaggaaaactcaggctcagcaaggttaattaatctgtacattatgcaactggaatttaaatctagtttaactcattccactgtggcataaaaggaggtacacgtacctatctgtgatga

SEQ ID NO: 406248 - DNA, 476 bp, Homo sapiens
caggaccttcaaagcggttttatgccaccatgcctgcttatgaccttcctccaatacgcatgccctgttttgccagccaagccagcacctcacctcaggctcagctcatccatgaagtcttgactgactcaagtccccatccccaagaagaattggccctgtcctcctctgctcccattccatgcctcgtagagactctgaacctggccgcagttcaagggcaggagagcctggctgtggaggatgcagggttctggaaaggcaccaaaaagtcatagcaaatgatgtgggacaggggaggctgatcagggcttagcttgcaaataaaatttaaaattgtgaaacagattgggcatggtggcttacacctgtaatccccacaatttgggaggccgagtcggggggatcatttgaggtcagcagtttgagagcagcttgaccaacatggtgaaaccccatctctactaaaactgcca

SEQ ID NO: 406249 - DNA, 1559 bp, Homo sapiens
  misc_feature (1)..(1): n is a, c, g, or t
ngagagggcagagcatgtttgggacataacaaaggatctgagtagtaaacaccgtacgccacccaactcctcttgtaacgccatcgcgcgtggcattgtgttgggttctgcgtgtgtggcatcggagtcgtggaatttagggggaacaaggcttttccccccgtccccccggggtctcccttgggtgggggcgacacggccaagggcggcgcgccctgggggtgcccgggggcgcttcttccccagggcgttacgcaccggcggcccggcgcggaggagctactctcctcctggtgaggtggaaattccagcaagaatagaggtgaagacaagccaccaggactcaggagggaaacgctgaccattagaaacctctgcataagacgttgtaaggaggaaaataaaagagagaaaaacacaaagatttaaacaagaaacctacgaacccagctctggaaagagccaccttctccaaaatggatatgtttcctctcacctgggttttcttagccctctacttttcaagacaccaagtgagaggccaaccagacccaccgtgcggaggtcgtttgaattccaaagatgctggctatatcacctctcccggttacccccaggactacccctcccaccagaactgcgagtggattgtttacgcccccgaacccaaccagaagattgtcctcaacttcaaccctcactttgaaatcgagaagcacgactgcaacttgctgtctgcttggaaaatttcactcacaagccgcagctttgcctgactcagtgcaatccaaggccatcatctctggtgaacttcccttgactcctccctccagccacttgcagaaatgcaaatcctgggcacccacaggctgtttgggggcctgtatagaagctgtgggcagaaaccagaggccactgtggtactgctggactcctgcagccaaaggacaaaagggcgagactacgggccgtctgggcaaacagagagaagccactttattccctgtggagtggaggatgctaggatgttgctgctccggcagacagaggcctttcgcttgagtcatcagccaacagactgaatgttatggttttagaaacccatacacaaagttgagtggttttttccatttctaaaatttaaaatgtatgtatttttaaaacacccacctgcatgtaatacacagcttgttcaggagttctcaaacagccccagcacccaccccatcccagaggctcaaccaaataaaaccaaaaccaggaggctgggtccttttaagcactggtaatttctacctgtaattccagccctttgggaggccgaggcaggcaggtcacctgaggtcaggagttcgagaccagcctggtcaacatggtgaaaccccgtctctactaaaaatacaaaaaaaattagccaagcttggtggtgcgtgcctgtaatctcagctactctggaggctgaggcaggagaatcacttgaacctgggaggcagaggctgcagtgagctgagattgtgccactgcactccggcctgggtgaaagagtgagactctgtctc

SEQ ID NO: 406250 - DNA, 6663 bp, Homo sapiens
gggagccggaggggaggcagagatcgcgagcgaggcaccagcctgcagccggcccccagcacatcctcagccgcacagacactcggcgaggtggaggtgagggcgggcgccagcgaactcggagaggggctcgctcactcccaggcgatcccagccgccaccgccgccgcaccagcagcagcaacagcagcagcagcttccttcctcagactcccctcgagaggctggccaagcgggtgtagccgttgggggaggctcccgccgggggaacccggcgaggacaagagcagggcggccgccttccactcgggctgtccggcggcggctgcctccgcccgcgtgtccgtcaagggtgccgcgggatgtgtgtcagtttacgcctctgagatcacacagctgcctgggggccgtgtgatgcccaaggcaagtcttggttttaattattattattatcattattgttacgcttggctttcgggaaatactcgtgatatttgtaggataaaggaaatgacactttgaggaactggagagaacatatatgcgttttgtttttaagaggaaaaccgtgttctcttcccggcttgttccctctttgctgatttcaggagctactctcctcctggtgaggtggaaattccagcaagaatagaggtgaagacaagccaccaggactcaggagggaaacgctgaccattagaaacctctgcataagacgttgtaaggaggaaaataaaagagagaaaaacacaaagatttaaacaagaaacctacgaacccagctctggaaagagccaccttctccaaaatggatatgtttcctctcacctgggttttcttagccctctacttttcaagacaccaagtgagaggccaaccagacccaccgtgcggaggtcgtttgaattccaaagatgctggctatatcacctctcccggttacccccaggactacccctcccaccagaactgcgagtggattgtttacgcccccgaacccaaccagaagattgtcctcaacttcaaccctcactttgaaatcgagaagcacgactgcaagtatgactttatcgagattcgggatggggacagtgaatccgcagacctcctgggcaaacactgtgggaacatcgccccgcccaccatcatctcctcgggctccatgctctacatcaagttcacctccgactacgcccggcagggggcaggcttctctctgcgctacgagatcttcaagacaggctctgaagattgctcaaaaaacttcacaagccccaacgggaccatcgaatctcctgggtttcctgagaagtatccacacaacttggactgcacctttaccatcctggccaaacccaagatggagatcatcctgcagttcctgatctttgacctggagcatgaccctttgcaggtgggagagggggactgcaagtacgattggctggacatctgggatggcattccacatgttggccccctgattggcaagtactgtgggaccaaaacaccctctgaacttcgttcatcgacggggatcctctccctgacctttcacacggacatggcggtggccaaggatggcttctctgcgcgttactacctggtccaccaagagccactagagaactttcagtgcaatgttcctctgggcatggagtctggccggattgctaatgaacagatcagtgcctcatctacctactctgatgggaggtggacccctcaacaaagccggctccatggtgatgacaatggctggacccccaacttggattccaacaaggagtatctccaggtggacctgcgctttttaaccatgctcacggccatcgcaacacagggagcgatttccagggaaacacagaatggctactacgtcaaatcctacaagctggaagtcagcactaatggagaggactggatggtgtaccggcatggcaaaaaccacaaggtatttcaagccaacaacgatgcaactgaggtggttctgaacaagctccacgctccactgctgacaaggtttgttagaatccgccctcagacctggcactcaggtatcgccctccggctggagctcttcggctgccgggtcacagatgctccctgctccaacatgctggggatgctctcaggcctcattgcagactcccagatctccgcctcttccacccaggaatacctctggagccccagtgcagcccgcctggtcagcagccgctcgggctggttccctcgaatccctcaggcccagcccggtgaggagtggcttcaggtagatctgggaacacccaagacagtgaaaggtgtcatcatccagggagcccgcggaggagacagtatcactgctgtggaagccagagcatttgtgcgcaagttcaaagtctcctacagcctaaacggcaaggactgggaatacattcaggaccccaggacccagcagccaaagctgttcgaagggaacatgcactatgacacccctgacatccgaaggtttgaccccattccggcacagtatgtgcgggtatacccggagaggtggtcgccggcggggattgggatgcggctggaggtgctgggctgtgactggacagactccaagcccacggtagagacgctgggacccactgtgaagagcgaagagacaaccaccccctaccccaccgaagaggaggccacagagtgtggggagaactgcagctttgaggatgacaaagatttgcagctcccttcgggattcaattgcaacttcgatttcctcgaggagccctgtggttggatgtatgaccatgccaagtggctccggaccacctgggccagcagctccagcccaaacgaccggacgtttccagatgacaggaatttcttgcggctgcagagtgacagccagagagagggccagtatgcccggctcatcagcccccctgtccacctgccccgaagcccggtgtgcatggagttccagtaccaggccacgggcggccgcggggtggcgctgcaggtggtgcgggaagccagccaggagagcaagttgctgtgggtcatccgtgaggaccagggcggcgagtggaagcacgggcggatcatcctgcccagctacgacatggagtaccagattgtgttcgagggagtgatagggaaaggacgttccggagagattgccattgatgacattcggataagcactgatgtcccactggagaactgcatggaacccatctcggcttttgcagtggacatcccagaaatacatgagagagaaggatatgaagatgaaattgatgatgaatacgaggtggactggagcaattcttcttctgcaacctcagggtctggcgccccctcgaccgacaaagaaaagagctggctgtacaccctggatcccatcctcatcaccatcatcgccatgagctcactgggcgtcctcctgggggccacctgtgcaggcctcctgctctactgcacctgttcctactcgggcctgagctcccgaagctgcaccacactggagaactacaacttcgagctctacgatggccttaagcacaaggtcaagatgaaccaccaaaagtgctgctccgaggcatgacggattgcacctgaatcctatctgacgtttcattccagcaagaggggctggggaagattacatttttttttcctttggaaactgaatgccataatctcgatcaaaccgatccagaataccgaaggtatggacaggacagaaaagcgagtcgcaggaggaagggagatgcagccgcacaggggatgattaccctcctaggaccgcggtggctaagtcattgcaggaacggggctgtgttctctgctgggacaaaacaggagctcatctctttggggtcacagttctattttgtttgtgagtttgtattattattattattattattattattatattttatttctttggtctgtgagcaactcaaagaggcagaagaggagaatgacttttccagaatagaagtggagcagtgatcattattctccgctttctctttctaatcaacacttgaaaagcaaagtgtcttttcagcctttccatctttacaaataaaactcaaaaaagccgtccagcttatcccatcctctgattgtcttctgacttaagggatttactgtggtgtaggttctgccagccaaccctacaagctgccatttccagtcctagcatttaagtaggatgttgttgcctttaacttttcttatccaggggaaaattgccattttagggtcagcatgaacagctctttcttgtatgcgatttaaaacaaactggaaaggaaacttcacacgtcaaaatccatagaagcgcctggacgaggcttaaagtgctttgtgagtgaataggagccattcgctaattctagacccacagtgtctggtggtggggcttcccttgtggggcttctggtggtggttttgccttttcttttccctcctccatgttcttctaaaacatatacatatatacatacacacatacacatattcttcaggtctctaagcccctggaagcagcattgtgtgatattctcagaggcaggggaaaatagagggaaaaatagagactattggtatgttctccccatcagcgagttattgtaactggtcaccactggacgggaaggagaacagaggagagggaaagagaagcccaacctctgtgatcatatgagggccaaggctgagcagtgtagacagagaccctttgaaatgcatttgtctctcaaatagactagtaaacaccgacttctcctttgggttacaaacaccatttcaacctttcgggagagtcagagctaggatgtacaagaactgattctaaccagaagtccgcaagtactgtggacaagaatgcttaaccatgctgcttcagccttgagagacctaggttcttacacatatgcacacacgcatacacacatgcacgcacacacacatacacacatgcacgcacgcacgcatgcacaccaatttatgtttttattaagtgccttgaaaaaatgaagaaaaatgtattttccctttatgtaaaaattagtgaatatcttatgaattaaggcattcctctttccctaaccccgatggctccattcccaagtaccccaactcactgctgatcctattaaaggaatgagtcctgctacccgagtggtagtcatagccctagatgactctcaactactcttcaaagggaggcatcaggaatagaatgaaactgtgtgaaggataagattgttcgcatcaagatccaaatcttgatttcatattaacgcctaaggattgcctgtgtgctggaaatatatttgaaactcaaccagtatgcccagcctattgcatatcattgtcagaccatttttgctgctgtggtcacccacgattttcatttgtcttatacccaggtgaaaggggaagggtgaatgggactggctggttcctttaaatgttaacttatggaaatgctagttcaaatggtaatgtcacagtgttttgtatgcagagagcaagagttcaaccaacagctgtttattcatgtgtgtgtgtctttgctgctttgagttctctgtatctactgtgtatgtgaatggtcatgtgggactcagtggtggtgttgtgactttgacctagggtccgagtgtcacagctgatcttggcactcggcactcattggcacagtggtagttagaggtgaaaagtagagctgtcaagcccaagggcttagctttagggctcctcctgagttcggcccacagtagaagcaagattttaactagccccttttcctcttcaccctcccatgatgcgcagtgttcagaaagctggtaagtcctagggatttccagaagtagcctgcagaagaaggtaagtttgaaagccactccaggggtcctgatgctgtcatgctcagtgagccattttacagttctccaaagtctagccctgtttcggacctgcacttcacctctaagttatgtacaactcaacctgcatccctctaaaagtcctatatccatattcaccattggctaatttgaggccctgagtgggccttgaatgctaaaaagaagcagggtacgcagggctacatgtagataccacaccaaggctggaggctggtctgtcgtaagacagaaagaaagacgctgggcccaattttgacttggccaggggacaccttggtgtgtttgttatctttatctgtgggtaggctagctgacccatctccttgagtcattccctttgggaaaccccactgccagtattgatctcctttttgccttgtactgaatgacacattacctccacactctcccggactaggtggtcaacagggccacagggttgctttctgtctttggtggggcaggggagttgacagggatgagggtccaaggaataagcatgaatgacaagaaaacaagggaaagagttaacctgtcacatagcaggttaactttttcagggtttgcagttagaggtattcgaccattcactggctgagccagatcacgggaacttgagagcttttactgtgattcttcaatgtaaaaaataaacaacaatgtcaaactgtgtttatatgatttgtataaagcctttttaagattactatttaaataaacattataccagaga

SEQ ID NO: 406251 - DNA, 7200 bp, Homo sapiens
gggagccggaggggaggcagagatcgcgagcgaggcaccagcctgcagccggcccccagcacatcctcagccgcacagacactcggcgaggtggaggtgagggcgggcgccagcgaactcggagaggggctcgctcactcccaggcgatcccagccgccaccgccgccgcaccagcagcagcaacagcagcagcagcttccttcctcagactcccctcgagaggctggccaagcgggtgtagccgttgggggaggctcccgccgggggaacccggcgaggacaagagcagggcggccgccttccactcgggctgtccggcggcggctgcctccgcccgcgtgtccgtcaagggtgccgcgggatgtgtgtcagtttacgcctctgagatcacacagctgcctgggggccgtgtgatgcccaaggcaagtcttggttttaattattattattatcattattgttacgcttggctttcgggaaatactcgtgatatttgtaggataaaggaaatgacactttgaggaactggagagaacatatatgcgttttgtttttaagaggaaaaccgtgttctcttcccggcttgttccctctttgctgatttcaggagctactctcctcctggtgaggtggaaattccagcaagaatagaggtgaagacaagccaccaggactcaggagggaaacgctgaccattagaaacctctgcataagacgttgtaaggaggaaaataaaagagagaaaaacacaaagatttaaacaagaaacctacgaacccagctctggaaagagccaccttctccaaaatggatatgtttcctctcacctgggttttcttagccctctacttttcaagacaccaagtgagaggccaaccagacccaccgtgcggaggtcgtttgaattccaaagatgctggctatatcacctctcccggttacccccaggactacccctcccaccagaactgcgagtggattgtttacgcccccgaacccaaccagaagattgtcctcaacttcaaccctcactttgaaatcgagaagcacgactgcaagtatgactttatcgagattcgggatggggacagtgaatccgcagacctcctgggcaaacactgtgggaacatcgccccgcccaccatcatctcctcgggctccatgctctacatcaagttcacctccgactacgcccggcagggggcaggcttctctctgcgctacgagatcttcaagacaggctctgaagattgctcaaaaaacttcacaagccccaacgggaccatcgaatctcctgggtttcctgagaagtatccacacaacttggactgcacctttaccatcctggccaaacccaagatggagatcatcctgcagttcctgatctttgacctggagcatgaccctttgcaggtgggagagggggactgcaagtacgattggctggacatctgggatggcattccacatgttggccccctgattggcaagtactgtgggaccaaaacaccctctgaacttcgttcatcgacggggatcctctccctgacctttcacacggacatggcggtggccaaggatggcttctctgcgcgttactacctggtccaccaagagccactagagaactttcagtgcaatgttcctctgggcatggagtctggccggattgctaatgaacagatcagtgcctcatctacctactctgatgggaggtggacccctcaacaaagccggctccatggtgatgacaatggctggacccccaacttggattccaacaaggagtatctccaggtggacctgcgctttttaaccatgctcacggccatcgcaacacagggagcgatttccagggaaacacagaatggctactacgtcaaatcctacaagctggaagtcagcactaatggagaggactggatggtgtaccggcatggcaaaaaccacaaggtatttcaagccaacaacgatgcaactgaggtggttctgaacaagctccacgctccactgctgacaaggtttgttagaatccgccctcagacctggcactcaggtatcgccctccggctggagctcttcggctgccgggtcacagatgctccctgctccaacatgctggggatgctctcaggcctcattgcagactcccagatctccgcctcttccacccaggaatacctctggagccccagtgcagcccgcctggtcagcagccgctcgggctggttccctcgaatccctcaggcccagcccggtgaggagtggcttcaggtagatctgggaacacccaagacagtgaaaggtgtcatcatccagggagcccgcggaggagacagtatcactgctgtggaagccagagcatttgtgcgcaagttcaaagtctcctacagcctaaacggcaaggactgggaatacattcaggaccccaggacccagcagccaaagctgttcgaagggaacatgcactatgacacccctgacatccgaaggtttgaccccattccggcacagtatgtgcgggtatacccggagaggtggtcgccggcggggattgggatgcggctggaggtgctgggctgtgactggacagactccaagcccacggtagagacgctgggacccactgtgaagagcgaagagacaaccaccccctaccccaccgaagaggaggccacagagtgtggggagaactgcagctttgaggatgacaaagatttgcagctcccttcgggattcaattgcaacttcgatttcctcgaggagccctgtggttggatgtatgaccatgccaagtggctccggaccacctgggccagcagctccagcccaaacgaccggacgtttccagatgacaggaatttcttgcggctgcagagtgacagccagagagagggccagtatgcccggctcatcagcccccctgtccacctgccccgaagcccggtgtgcatggagttccagtaccaggccacgggcggccgcggggtggcgctgcaggtggtgcgggaagccagccaggagagcaagttgctgtgggtcatccgtgaggaccagggcggcgagtggaagcacgggcggatcatcctgcccagctacgacatggagtaccagattgtgttcgagggagtgatagggaaaggacgttccggagagattgccattgatgacattcggataagcactgatgtcccactggagaactgcatggaacccatctcggcttttgcagtggacatcccagaaatacatgagagagaaggatatgaagatgaaattgatgatgaatacgaggtggactggagcaattcttcttctgcaacctcagggtctggcgccccctcgaccgacaaagaaaagagctggctgtacaccctggatcccatcctcatcaccatcatcgccatgagctcactgggcgtcctcctgggggccacctgtgcaggcctcctgctctactgcacctgttcctactcgggcctgagctcccgaagctgcaccacactggagaactacaacttcgagctctacgatggccttaagcacaaggtcaagatgaaccaccaaaagtgctgctccgaggcatgacggattgcacctgaatcctatctgacgtttcattccagcaagaggggctggggaagattacatttttttttcctttggaaactgaatgccataatctcgatcaaaccgatccagaataccgaaggtatggacaggacagaaaagcgagtcgcaggaggaagggagatgcagccgcacaggggatgattaccctcctaggaccgcggtggctaagtcattgcaggaacggggctgtgttctctgctgggacaaaacaggagctcatctctttggggtcacagttctattttgtttgtgagtttgtattattattattattattattattattatattttatttctttggtctgtgagcaactcaaagaggcagaagaggagaatgacttttccagaatagaagtggagcagtgatcattattctccgctttctctttctaatcaacacttgaaaagcaaagtgtcttttcagcctttccatctttacaaataaaactcaaaaaagccgtccagcttatcccatcctctgattgtcttctgacttaagggatttactgtggtgtaggttctgccagccaaccctacaagctgccatttccagtcctagcatttaagtaggatgttgttgcctttaacttttcttatccaggggaaaattgccattttagggtcagcatgaacagctctttcttgtatgcgatttaaaacaaactggaaaggaaacttcacacgtcaaaatccatagaagcgcctggacgaggcttaaagtgctttgtgagtgaataggagccattcgctaattctagacccacagtgtctggtggtggggcttcccttgtggggcttctggtggtggttttgccttttcttttccctcctccatgttcttctaaaacatatacatatatacatacacacatacacatattcttcaggtctctaagcccctggaagcagcattgtgtgatattctcagaggcaggggaaaatagagggaaaaatagagactattggtatgttctccccatcagcgagttattgtaactggtcaccactggacgggaaggagaacagaggagagggaaagagaagcccaacctctgtgatcatatgagggccaaggctgagcagtgtagacagagaccctttgaaatgcatttgtctctcaaatagactagtaaacaccgacttctcctttgggttacaaacaccatttcaacctttcgggagagtcagagctaggatgtacaagaactgattctaaccagaagtccgcaagtactgtggacaagaatgcttaaccatgctgcttcagccttgagagacctaggttcttacacatatgcacacacgcatacacacatgcacgcacacacacatacacacatgcacgcacgcacgcatgcacaccaatttatgtttttattaagtgccttgaaaaaatgaagaaaaatgtattttccctttatgtaaaaattagtgaatatcttatgaattaaggcattcctctttccctaaccccgatggctccattcccaagtaccccaactcactgctgatcctattaaaggaatgagtcctgctacccgagtggtagtcatagccctagatgactctcaactactcttcaaagggaggcatcaggaatagaatgaaactgtgtgaaggataagattgttcgcatcaagatccaaatcttgatttcatattaacgcctaaggattgcctgtgtgctggaaatatatttgaaactcaaccagtatgcccagcctattgcatatcattgtcagaccatttttgctgctgtggtcacccacgattttcatttgtcttatacccaggtgaaaggggaagggtgaatgggactggctggttcctttaaatgttaacttatggaaatgctagttcaaatggtaatgtcacagtgttttgtatgcagagagcaagagttcaaccaacagctgtttattcatgtgtgtgtgtctttgctgctttgagttctctgtatctactgtgtatgtgaatggtcatgtgggactcagtggtggtgttgtgactttgacctagggtccgagtgtcacagctgatcttggcactcggcactcattggcacagtggtagttagaggtgaaaagtagagctgtcaagcccaagggcttagctttagggctcctcctgagttcggcccacagtagaagcaagattttaactagccccttttcctcttcaccctcccatgatgcgcagtgttcagaaagctggtaagtcctagggatttccagaagtagcctgcagaagaaggtaagtttgaaagccactccaggggtcctgatgctgtcatgctcagtgagccattttacagttctccaaagtctagccctgtttcggacctgcacttcacctctaagttatgtacaactcaacctgcatccctctaaaagtcctatatccatattcaccattggctaatttgaggccctgagtgggccttgaatgctaaaaagaagcagggtacgcagggctacatgtagataccacaccaaggctggaggctggtctgtcgtaagacagaaagaaagacgctgggcccaattttgacttggccaggggacaccttggtgtgtttgttatctttatctgtgggtaggctagctgacccatctccttgagtcattccctttgggaaaccccactgccagtattgatctcctttttgccttgtactgaatgacacattacctccacactctcccggactaggtggtcaacagggccacagggttgctttctgtctttggtggggcaggggagttgacagggatgagggtccaaggaataagcatgaatgacaagaaaacaagggaaagagttaacctgtcacatagcaggttaactttttcagggtttgcagttagaggtattcgaccattcactggctgagccagatcacgggaacttgagagcttttactgtgattcttcaatgtaaaaaataaacaacaatgtcaaactgtgtttatatgatttgtataaagcctttttaagattactatttaaataaacattataccagagaaaaaaaaaaaaaaaaaaaaaaaaaaaaaaaaaaaaaaaaaaaaaaaaaaaaaaaaaaaaaaaaaaaaaaaaaaaaaaaaaaaaaaaaaaaagggggggggggggtaatcccggggggggcccacactagaggacaactccaccggatgtttttgatgtaaaaggggtggtgcccacataatatgggggggtgtttatattatataatacatacagggcggaggcgcgtcgttttcataactacagccgtcgtgttggatggaaacaaaaaactacgtgatagtgactgattttgatttgtgaaaaacgagacaccccctatatgttgtggggggcggacgaaaacatttagtgggagaacaacctttatactgctagcagtagattttacagcagcctcgtcagcgaggattaacattaaatctttgaaggttgtaagtggtgggtcgcaacacacaccgtgaatatttattgtctggtctgatgaaaagaggtgctgcccatgctgatgattttatagaaaaaatattctcacggg

SEQ ID NO: 406252 - DNA, 6612 bp, Homo sapiens
gggagccggaggggaggcagagatcgcgagcgaggcaccagcctgcagccggcccccagcacatcctcagccgcacagacactcggcgaggtggaggtgagggcgggcgccagcgaactcggagaggggctcgctcactcccaggcgatcccagccgccaccgccgccgcaccagcagcagcaacagcagcagcagcttccttcctcagactcccctcgagaggctggccaagcgggtgtagccgttgggggaggctcccgccgggggaacccggcgaggacaagagcagggcggccgccttccactcgggctgtccggcggcggctgcctccgcccgcgtgtccgtcaagggtgccgcgggatgtgtgtcagtttacgcctctgagatcacacagctgcctgggggccgtgtgatgcccaaggcaagtcttggttttaattattattattatcattattgttacgcttggctttcgggaaatactcgtgatatttgtaggataaaggaaatgacactttgaggaactggagagaacatatatgcgttttgtttttaagaggaaaaccgtgttctcttcccggcttgttccctctttgctgatttcaggagctactctcctcctggtgaggtggaaattccagcaagaatagaggtgaagacaagccaccaggactcaggagggaaacgctgaccattagaaacctctgcataagacgttgtaaggaggaaaataaaagagagaaaaacacaaagatttaaacaagaaacctacgaacccagctctggaaagagccaccttctccaaaatggatatgtttcctctcacctgggttttcttagccctctacttttcaagacaccaagtgagaggccaaccagacccaccgtgcggaggtcgtttgaattccaaagatgctggctatatcacctctcccggttacccccaggactacccctcccaccagaactgcgagtggattgtttacgcccccgaacccaaccagaagattgtcctcaacttcaaccctcactttgaaatcgagaagcacgactgcaagtatgactttatcgagattcgggatggggacagtgaatccgcagacctcctgggcaaacactgtgggaacatcgccccgcccaccatcatctcctcgggctccatgctctacatcaagttcacctccgactacgcccggcagggggcaggcttctctctgcgctacgagatcttcaagacaggctctgaagattgctcaaaaaacttcacaagccccaacgggaccatcgaatctcctgggtttcctgagaagtatccacacaacttggactgcacctttaccatcctggccaaacccaagatggagatcatcctgcagttcctgatctttgacctggagcatgaccctttgcaggtgggagagggggactgcaagtacgattggctggacatctgggatggcattccacatgttggccccctgattggcaagtactgtgggaccaaaacaccctctgaacttcgttcatcgacggggatcctctccctgacctttcacacggacatggcggtggccaaggatggcttctctgcgcgttactacctggtccaccaagagccactagagaactttcagtgcaatgttcctctgggcatggagtctggccggattgctaatgaacagatcagtgcctcatctacctactctgatgggaggtggacccctcaacaaagccggctccatggtgatgacaatggctggacccccaacttggattccaacaaggagtatctccaggtggacctgcgctttttaaccatgctcacggccatcgcaacacagggagcgatttccagggaaacacagaatggctactacgtcaaatcctacaagctggaagtcagcactaatggagaggactggatggtgtaccggcatggcaaaaaccacaaggtatttcaagccaacaacgatgcaactgaggtggttctgaacaagctccacgctccactgctgacaaggtttgttagaatccgccctcagacctggcactcaggtatcgccctccggctggagctcttcggctgccgggtcacagatgctccctgctccaacatgctggggatgctctcaggcctcattgcagactcccagatctccgcctcttccacccaggaatacctctggagccccagtgcagcccgcctggtcagcagccgctcgggctggttccctcgaatccctcaggcccagcccggtgaggagtggcttcaggtagatctgggaacacccaagacagtgaaaggtgtcatcatccagggagcccgcggaggagacagtatcactgctgtggaagccagagcatttgtgcgcaagttcaaagtctcctacagcctaaacggcaaggactgggaatacattcaggaccccaggacccagcagccaaagctgttcgaagggaacatgcactatgacacccctgacatccgaaggtttgaccccattccggcacagtatgtgcgggtatacccggagaggtggtcgccggcggggattgggatgcggctggaggtgctgggctgtgactggacagactccaagcccacggtagagacgctgggacccactgtgaagagcgaagagacaaccaccccctaccccaccgaagaggaggccacagagtgtggggagaactgcagctttgaggatgacaaagatttgcagctcccttcgggattcaattgcaacttcgatttcctcgaggagccctgtggttggatgtatgaccatgccaagtggctccggaccacctgggccagcagctccagcccaaacgaccggacgtttccagatgacaggaatttcttgcggctgcagagtgacagccagagagagggccagtatgcccggctcatcagcccccctgtccacctgccccgaagcccggtgtgcatggagttccagtaccaggccacgggcggccgcggggtggcgctgcaggtggtgcgggaagccagccaggagagcaagttgctgtgggtcatccgtgaggaccagggcggcgagtggaagcacgggcggatcatcctgcccagctacgacatggagtaccagattgtgttcgagggagtgatagggaaaggacgttccggagagattgccattgatgacattcggataagcactgatgtcccactggagaactgcatggaacccatctcggcttttgcagatgaatacgaggtggactggagcaattcttcttctgcaacctcagggtctggcgccccctcgaccgacaaagaaaagagctggctgtacaccctggatcccatcctcatcaccatcatcgccatgagctcactgggcgtcctcctgggggccacctgtgcaggcctcctgctctactgcacctgttcctactcgggcctgagctcccgaagctgcaccacactggagaactacaacttcgagctctacgatggccttaagcacaaggtcaagatgaaccaccaaaagtgctgctccgaggcatgacggattgcacctgaatcctatctgacgtttcattccagcaagaggggctggggaagattacatttttttttcctttggaaactgaatgccataatctcgatcaaaccgatccagaataccgaaggtatggacaggacagaaaagcgagtcgcaggaggaagggagatgcagccgcacaggggatgattaccctcctaggaccgcggtggctaagtcattgcaggaacggggctgtgttctctgctgggacaaaacaggagctcatctctttggggtcacagttctattttgtttgtgagtttgtattattattattattattattattattatattttatttctttggtctgtgagcaactcaaagaggcagaagaggagaatgacttttccagaatagaagtggagcagtgatcattattctccgctttctctttctaatcaacacttgaaaagcaaagtgtcttttcagcctttccatctttacaaataaaactcaaaaaagccgtccagcttatcccatcctctgattgtcttctgacttaagggatttactgtggtgtaggttctgccagccaaccctacaagctgccatttccagtcctagcatttaagtaggatgttgttgcctttaacttttcttatccaggggaaaattgccattttagggtcagcatgaacagctctttcttgtatgcgatttaaaacaaactggaaaggaaacttcacacgtcaaaatccatagaagcgcctggacgaggcttaaagtgctttgtgagtgaataggagccattcgctaattctagacccacagtgtctggtggtggggcttcccttgtggggcttctggtggtggttttgccttttcttttccctcctccatgttcttctaaaacatatacatatatacatacacacatacacatattcttcaggtctctaagcccctggaagcagcattgtgtgatattctcagaggcaggggaaaatagagggaaaaatagagactattggtatgttctccccatcagcgagttattgtaactggtcaccactggacgggaaggagaacagaggagagggaaagagaagcccaacctctgtgatcatatgagggccaaggctgagcagtgtagacagagaccctttgaaatgcatttgtctctcaaatagactagtaaacaccgacttctcctttgggttacaaacaccatttcaacctttcgggagagtcagagctaggatgtacaagaactgattctaaccagaagtccgcaagtactgtggacaagaatgcttaaccatgctgcttcagccttgagagacctaggttcttacacatatgcacacacgcatacacacatgcacgcacacacacatacacacatgcacgcacgcacgcatgcacaccaatttatgtttttattaagtgccttgaaaaaatgaagaaaaatgtattttccctttatgtaaaaattagtgaatatcttatgaattaaggcattcctctttccctaaccccgatggctccattcccaagtaccccaactcactgctgatcctattaaaggaatgagtcctgctacccgagtggtagtcatagccctagatgactctcaactactcttcaaagggaggcatcaggaatagaatgaaactgtgtgaaggataagattgttcgcatcaagatccaaatcttgatttcatattaacgcctaaggattgcctgtgtgctggaaatatatttgaaactcaaccagtatgcccagcctattgcatatcattgtcagaccatttttgctgctgtggtcacccacgattttcatttgtcttatacccaggtgaaaggggaagggtgaatgggactggctggttcctttaaatgttaacttatggaaatgctagttcaaatggtaatgtcacagtgttttgtatgcagagagcaagagttcaaccaacagctgtttattcatgtgtgtgtgtctttgctgctttgagttctctgtatctactgtgtatgtgaatggtcatgtgggactcagtggtggtgttgtgactttgacctagggtccgagtgtcacagctgatcttggcactcggcactcattggcacagtggtagttagaggtgaaaagtagagctgtcaagcccaagggcttagctttagggctcctcctgagttcggcccacagtagaagcaagattttaactagccccttttcctcttcaccctcccatgatgcgcagtgttcagaaagctggtaagtcctagggatttccagaagtagcctgcagaagaaggtaagtttgaaagccactccaggggtcctgatgctgtcatgctcagtgagccattttacagttctccaaagtctagccctgtttcggacctgcacttcacctctaagttatgtacaactcaacctgcatccctctaaaagtcctatatccatattcaccattggctaatttgaggccctgagtgggccttgaatgctaaaaagaagcagggtacgcagggctacatgtagataccacaccaaggctggaggctggtctgtcgtaagacagaaagaaagacgctgggcccaattttgacttggccaggggacaccttggtgtgtttgttatctttatctgtgggtaggctagctgacccatctccttgagtcattccctttgggaaaccccactgccagtattgatctcctttttgccttgtactgaatgacacattacctccacactctcccggactaggtggtcaacagggccacagggttgctttctgtctttggtggggcaggggagttgacagggatgagggtccaaggaataagcatgaatgacaagaaaacaagggaaagagttaacctgtcacatagcaggttaactttttcagggtttgcagttagaggtattcgaccattcactggctgagccagatcacgggaacttgagagcttttactgtgattcttcaatgtaaaaaataaacaacaatgtcaaactgtgtttatatgatttgtataaagcctttttaagattactatttaaataaacattataccagaga

SEQ ID NO: 406253 - DNA, 6382 bp, Homo sapiens
gggagccggaggggaggcagagatcgcgagcgaggcaccagcctgcagccggcccccagcacatcctcagccgcacagacactcggcgaggtggaggtgagggcgggcgccagcgaactcggagaggggctcgctcactcccaggcgatcccagccgccaccgccgccgcaccagcagcagcaacagcagcagcagcttccttcctcagactcccctcgagaggctggccaagcgggtgtagccgttgggggaggctcccgccgggggaacccggcgaggacaagagcagggcggccgccttccactcgggctgtccggcggcggctgcctccgcccgcgtgtccgtcaagggtgccgcgggatgtgtgtcagtttacgcctctgagatcacacagctgcctgggggccgtgtgatgcccaaggcaagtcttggttttaattattattattatcattattgttacgcttggctttcgggaaatactcgtgatatttgtaggataaaggaaatgacactttgaggaactggagagaacatatatgcgttttgtttttaagaggaaaaccgtgttctcttcccggcttgttccctctttgctgatttcaggagctactctcctcctggtgaggtggaaattccagcaagaatagaggtgaagacaagccaccaggactcaggagggaaacgctgaccattagaaacctctgcataagacgttgtaaggaggaaaataaaagagagaaaaacacaaagatttaaacaagaaacctacgaacccagctctggaaagagccaccttctccaaaatggatatgtttcctctcacctgggttttcttagccctctacttttcaagacaccaagtgagaggccaaccagacccaccgtgcggaggtcgtttgaattccaaagatgctggctatatcacctctcccggttacccccaggactacccctcccaccagaactgcgagtggattgtttacgcccccgaacccaaccagaagattgtcctcaacttcaaccctcactttgaaatcgagaagcacgactgcaagtatgactttatcgagattcgggatggggacagtgaatccgcagacctcctgggcaaacactgtgggaacatcgccccgcccaccatcatctcctcgggctccatgctctacatcaagttcacctccgactacgcccggcagggggcaggcttctctctgcgctacgagatcttcaagacaggctctgaagattgctcaaaaaacttcacaagccccaacgggaccatcgaatctcctgggtttcctgagaagtatccacacaacttggactgcacctttaccatcctggccaaacccaagatggagatcatcctgcagttcctgatctttgacctggagcatgaccctttgcaggtgggagagggggactgcaagtacgattggctggacatctgggatggcattccacatgttggccccctgattggcaagtactgtgggaccaaaacaccctctgaacttcgttcatcgacggggatcctctccctgacctttcacacggacatggcggtggccaaggatggcttctctgcgcgttactacctggtccaccaagagccactagagaactttcagtgcaatgttcctctgggcatggagtctggccggattgctaatgaacagatcagtgcctcatctacctactctgatgggaggtggacccctcaacaaagccggctccatggtgatgacaatggctggacccccaacttggattccaacaaggagtatctccaggtggacctgcgctttttaaccatgctcacggccatcgcaacacagggagcgatttccagggaaacacagaatggctactacgtcaaatcctacaagctggaagtcagcactaatggagaggactggatggtgtaccggcatggcaaaaaccacaaggtatttcaagccaacaacgatgcaactgaggtggttctgaacaagctccacgctccactgctgacaaggtttgttagaatccgccctcagacctggcactcaggtatcgccctccggctggagctcttcggctgccgggtcacagatgctccctgctccaacatgctggggatgctctcaggcctcattgcagactcccagatctccgcctcttccacccaggaatacctctggagccccagtgcagcccgcctggtcagcagccgctcgggctggttccctcgaatccctcaggcccagcccggtgaggagtggcttcaggtagatctgggaacacccaagacagtgaaaggtgtcatcatccagggagcccgcggaggagacagtatcactgctgtggaagccagagcatttgtgcgcaagttcaaagtctcctacagcctaaacggcaaggactgggaatacattcaggaccccaggacccagcagccaaagctgttcgaagggaacatgcactatgacacccctgacatccgaaggtttgaccccattccggcacagtatgtgcgggtatacccggagaggtggtcgccggcggggattgggatgcggctggaggtgctgggctgtgactggacagactccaagcccacggtagagacgctgggacccactgtgaagagcgaagagacaaccaccccctaccccaccgaagaggaggccacagagtgtggggagaactgcagctttgaggatgacaaagatttgcagctcccttcgggattcaattgcaacttcgatttcctcgaggagccctgtggttggatgtatgaccatgccaagtggctccggaccacctgggccagcagctccagcccaaacgaccggacgtttccagatgacaggaatttcttgcggctgcagagtgacagccagagagagggccagtatgcccggctcatcagcccccctgtccacctgccccgaagcccggtgtgcatggagttccagtaccaggccacgggcggccgcggggtggcgctgcaggtggtgcgggaagccagccaggagagcaagttgctgtgggtcatccgtgaggaccagggcggcgagtggaagcacgggcggatcatcctgcccagctacgacatggagtaccagcatcatcgccatgagctcactgggcgtcctcctgggggccacctgtgcaggcctcctgctctactgcacctgttcctactcgggcctgagctcccgaagctgcaccacactggagaactacaacttcgagctctacgatggccttaagcacaaggtcaagatgaaccaccaaaagtgctgctccgaggcatgacggattgcacctgaatcctatctgacgtttcattccagcaagaggggctggggaagattacatttttttttcctttggaaactgaatgccataatctcgatcaaaccgatccagaataccgaaggtatggacaggacagaaaagcgagtcgcaggaggaagggagatgcagccgcacaggggatgattaccctcctaggaccgcggtggctaagtcattgcaggaacggggctgtgttctctgctgggacaaaacaggagctcatctctttggggtcacagttctattttgtttgtgagtttgtattattattattattattattattattatattttatttctttggtctgtgagcaactcaaagaggcagaagaggagaatgacttttccagaatagaagtggagcagtgatcattattctccgctttctctttctaatcaacacttgaaaagcaaagtgtcttttcagcctttccatctttacaaataaaactcaaaaaagccgtccagcttatcccatcctctgattgtcttctgacttaagggatttactgtggtgtaggttctgccagccaaccctacaagctgccatttccagtcctagcatttaagtaggatgttgttgcctttaacttttcttatccaggggaaaattgccattttagggtcagcatgaacagctctttcttgtatgcgatttaaaacaaactggaaaggaaacttcacacgtcaaaatccatagaagcgcctggacgaggcttaaagtgctttgtgagtgaataggagccattcgctaattctagacccacagtgtctggtggtggggcttcccttgtggggcttctggtggtggttttgccttttcttttccctcctccatgttcttctaaaacatatacatatatacatacacacatacacatattcttcaggtctctaagcccctggaagcagcattgtgtgatattctcagaggcaggggaaaatagagggaaaaatagagactattggtatgttctccccatcagcgagttattgtaactggtcaccactggacgggaaggagaacagaggagagggaaagagaagcccaacctctgtgatcatatgagggccaaggctgagcagtgtagacagagaccctttgaaatgcatttgtctctcaaatagactagtaaacaccgacttctcctttgggttacaaacaccatttcaacctttcgggagagtcagagctaggatgtacaagaactgattctaaccagaagtccgcaagtactgtggacaagaatgcttaaccatgctgcttcagccttgagagacctaggttcttacacatatgcacacacgcatacacacatgcacgcacacacacatacacacatgcacgcacgcacgcatgcacaccaatttatgtttttattaagtgccttgaaaaaatgaagaaaaatgtattttccctttatgtaaaaattagtgaatatcttatgaattaaggcattcctctttccctaaccccgatggctccattcccaagtaccccaactcactgctgatcctattaaaggaatgagtcctgctacccgagtggtagtcatagccctagatgactctcaactactcttcaaagggaggcatcaggaatagaatgaaactgtgtgaaggataagattgttcgcatcaagatccaaatcttgatttcatattaacgcctaaggattgcctgtgtgctggaaatatatttgaaactcaaccagtatgcccagcctattgcatatcattgtcagaccatttttgctgctgtggtcacccacgattttcatttgtcttatacccaggtgaaaggggaagggtgaatgggactggctggttcctttaaatgttaacttatggaaatgctagttcaaatggtaatgtcacagtgttttgtatgcagagagcaagagttcaaccaacagctgtttattcatgtgtgtgtgtctttgctgctttgagttctctgtatctactgtgtatgtgaatggtcatgtgggactcagtggtggtgttgtgactttgacctagggtccgagtgtcacagctgatcttggcactcggcactcattggcacagtggtagttagaggtgaaaagtagagctgtcaagcccaagggcttagctttagggctcctcctgagttcggcccacagtagaagcaagattttaactagccccttttcctcttcaccctcccatgatgcgcagtgttcagaaagctggtaagtcctagggatttccagaagtagcctgcagaagaaggtaagtttgaaagccactccaggggtcctgatgctgtcatgctcagtgagccattttacagttctccaaagtctagccctgtttcggacctgcacttcacctctaagttatgtacaactcaacctgcatccctctaaaagtcctatatccatattcaccattggctaatttgaggccctgagtgggccttgaatgctaaaaagaagcagggtacgcagggctacatgtagataccacaccaaggctggaggctggtctgtcgtaagacagaaagaaagacgctgggcccaattttgacttggccaggggacaccttggtgtgtttgttatctttatctgtgggtaggctagctgacccatctccttgagtcattccctttgggaaaccccactgccagtattgatctcctttttgccttgtactgaatgacacattacctccacactctcccggactaggtggtcaacagggccacagggttgctttctgtctttggtggggcaggggagttgacagggatgagggtccaaggaataagcatgaatgacaagaaaacaagggaaagagttaacctgtcacatagcaggttaactttttcagggtttgcagttagaggtattcgaccattcactggctgagccagatcacgggaacttgagagcttttactgtgattcttcaatgtaaaaaataaacaacaatgtcaaactgtgtttatatgatttgtataaagcctttttaagattactatttaaataaacattataccagaga

SEQ ID NO: 406254 - DNA, 4319 bp, Homo sapiens
ccttccaccagggcactggggagacattcttctctggcatttagggaacagcaattttcacatttgtctgctctccgaggtggacagaagaggctgattagagcctgaagccatttggtagcctcattcataattgcttactatgggaaccactggcagacttggctttcatgcctgggaaggatgagaccaaagcctgacccgaaagccagcgatcgccaagatgagttaaatgaataagcaaaggaagccacttctttctctgctctccactcaggccttgccagccatttaaatagtaccactgtggctgttctctgaacccatttcatttgccttcctttgggttattgttttccccttttagacaaagatttgcagctcccttcgggattcaattgcaacttcgatttcctcgaggagccctgtggttggatgtatgaccatgccaagtggctccggaccacctgggccagcagctccagcccaaacgaccggacgtttccagatgacaggaatttcttgcggctgcagagtgacagccagagagagggccagtatgcccggctcatcagcccccctgtccacctgccccgaagcccggtgtgcatggagttccagtaccaggccacgggcggccgcggggtggcgctgcaggtggtgcgggaagccagccaggagagcaagttgctgtgggtcatccgtgaggaccagggcggcgagtggaagcacgggcggatcatcctgcccagctacgacatggagtaccagattgtgttcgagggagtgatagggaaaggacgttccggagagattgccattgatgacattcggataagcactgatgtcccactggagaactgcatggaacccatctcggcttttgcagtggacatcccagaaatacatgagagagaaggatatgaagatgaaattgatgatgaatacgaggtggactggagcaattcttcttctgcaacctcagggtctggcgccccctcgaccgacaaagaaaagagctggctgtacaccctggatcccatcctcatcaccatcatcgccatgagctcactgggcgtcctcctgggggccacctgtgcaggcctcctgctctactgcacctgttcctactcgggcctgagctcccgaagctgcaccacactggagaactacaacttcgagctctacgatggccttaagcacaaggtcaagatgaaccaccaaaagtgctgctccgaggcatgacggattgcacctgaatcctatctgacgtttcattccagcaagaggggctggggaagattacatttttttttcctttggaaactgaatgccataatctcgatcaaaccgatccagaataccgaaggtatggacaggacagaaaagcgagtcgcaggaggaagggagatgcagccgcacaggggatgattaccctcctaggaccgcggtggctaagtcattgcaggaacggggctgtgttctctgctgggacaaaacaggagctcatctctttggggtcacagttctattttgtttgtgagtttgtattattattattattattattattattatattttatttctttggtctgtgagcaactcaaagaggcagaagaggagaatgacttttccagaatagaagtggagcagtgatcattattctccgctttctctttctaatcaacacttgaaaagcaaagtgtcttttcagcctttccatctttacaaataaaactcaaaaaagccgtccagcttatcccatcctctgattgtcttctgacttaagggatttactgtggtgtaggttctgccagccaaccctacaagctgccatttccagtcctagcatttaagtaggatgttgttgcctttaacttttcttatccaggggaaaattgccattttagggtcagcatgaacagctctttcttgtatgcgatttaaaacaaactggaaaggaaacttcacacgtcaaaatccatagaagcgcctggacgaggcttaaagtgctttgtgagtgaataggagccattcgctaattctagacccacagtgtctggtggtggggcttcccttgtggggcttctggtggtggttttgccttttcttttccctcctccatgttcttctaaaacatatacatatatacatacacacatacacatattcttcaggtctctaagcccctggaagcagcattgtgtgatattctcagaggcaggggaaaatagagggaaaaatagagactattggtatgttctccccatcagcgagttattgtaactggtcaccactggacgggaaggagaacagaggagagggaaagagaagcccaacctctgtgatcatatgagggccaaggctgagcagtgtagacagagaccctttgaaatgcatttgtctctcaaatagactagtaaacaccgacttctcctttgggttacaaacaccatttcaacctttcgggagagtcagagctaggatgtacaagaactgattctaaccagaagtccgcaagtactgtggacaagaatgcttaaccatgctgcttcagccttgagagacctaggttcttacacatatgcacacacgcatacacacatgcacgcacacacacatacacacatgcacgcacgcacgcatgcacaccaatttatgtttttattaagtgccttgaaaaaatgaagaaaaatgtattttccctttatgtaaaaattagtgaatatcttatgaattaaggcattcctctttccctaaccccgatggctccattcccaagtaccccaactcactgctgatcctattaaaggaatgagtcctgctacccgagtggtagtcatagccctagatgactctcaactactcttcaaagggaggcatcaggaatagaatgaaactgtgtgaaggataagattgttcgcatcaagatccaaatcttgatttcatattaacgcctaaggattgcctgtgtgctggaaatatatttgaaactcaaccagtatgcccagcctattgcatatcattgtcagaccatttttgctgctgtggtcacccacgattttcatttgtcttatacccaggtgaaaggggaagggtgaatgggactggctggttcctttaaatgttaacttatggaaatgctagttcaaatggtaatgtcacagtgttttgtatgcagagagcaagagttcaaccaacagctgtttattcatgtgtgtgtgtctttgctgctttgagttctctgtatctactgtgtatgtgaatggtcatgtgggactcagtggtggtgttgtgactttgacctagggtccgagtgtcacagctgatcttggcactcggcactcattggcacagtggtagttagaggtgaaaagtagagctgtcaagcccaagggcttagctttagggctcctcctgagttcggcccacagtagaagcaagattttaactagccccttttcctcttcaccctcccatgatgcgcagtgttcagaaagctggtaagtcctagggatttccagaagtagcctgcagaagaaggtaagtttgaaagccactccaggggtcctgatgctgtcatgctcagtgagccattttacagttctccaaagtctagccctgtttcggacctgcacttcacctctaagttatgtacaactcaacctgcatccctctaaaagtcctatatccatattcaccattggctaatttgaggccctgagtgggccttgaatgctaaaaagaagcagggtacgcagggctacatgtagataccacaccaaggctggaggctggtctgtcgtaagacagaaagaaagacgctgggcccaattttgacttggccaggggacaccttggtgtgtttgttatctttatctgtgggtaggctagctgacccatctccttgagtcattccctttgggaaaccccactgccagtattgatctcctttttgccttgtactgaatgacacattacctccacactctcccggactaggtggtcaacagggccacagggttgctttctgtctttggtggggcaggggagttgacagggatgagggtccaaggaataagcatgaatgacaagaaaacaagggaaagagttaacctgtcacatagcaggttaactttttcagggtttgcagttagaggtattcgaccattcactggctgagccagatcacgggaacttgagagcttttactgtgattcttcaatgtaaaaaataaacaacaatgtcaaactgtgtttatatgatttgtataaagcctttttaagattactatttaaataaacattataccagaga

SEQ ID NO: 406255 - DNA, 4178 bp, Homo sapiens
taatgatgaataagatgtgggtctggcctctcagaatctagagggagaagaagggcacgcacacaaccagccaagacataaggcagctgtgccgggtgctccatgtgaaagagatggaaaggaaatgataccgagaaataggcaggagggaccgatttgacttagagactcttaagaaaacacagcatttgaatcaaggctctgaaggagccttaagaaagggtcacagagcctggagaacaaggacatgaataaaccaaagacaccgaaactcagtcccaactttcccttggagaggccacagcagcacactggtgtctttcccgagtgtttatggagaacctctgtttgggtttgtttctgccagatgacaggaatttcttgcggctgcagagtgacagccagagagagggccagtatgcccggctcatcagcccccctgtccacctgccccgaagcccggtgtgcatggagttccagtaccaggccacgggcggccgcggggtggcgctgcaggtggtgcgggaagccagccaggagagcaagttgctgtgggtcatccgtgaggaccagggcggcgagtggaagcacgggcggatcatcctgcccagctacgacatggagtaccagattgtgttcgagggagtgatagggaaaggacgttccggagagattgccattgatgacattcggataagcactgatgtcccactggagaactgcatggaacccatctcggcttttgcagtggacatcccagaaatacatgagagagaaggatatgaagatgaaattgatgatgaatacgaggtggactggagcaattcttcttctgcaacctcagggtctggcgccccctcgaccgacaaagaaaagagctggctgtacaccctggatcccatcctcatcaccatcatcgccatgagctcactgggcgtcctcctgggggccacctgtgcaggcctcctgctctactgcacctgttcctactcgggcctgagctcccgaagctgcaccacactggagaactacaacttcgagctctacgatggccttaagcacaaggtcaagatgaaccaccaaaagtgctgctccgaggcatgacggattgcacctgaatcctatctgacgtttcattccagcaagaggggctggggaagattacatttttttttcctttggaaactgaatgccataatctcgatcaaaccgatccagaataccgaaggtatggacaggacagaaaagcgagtcgcaggaggaagggagatgcagccgcacaggggatgattaccctcctaggaccgcggtggctaagtcattgcaggaacggggctgtgttctctgctgggacaaaacaggagctcatctctttggggtcacagttctattttgtttgtgagtttgtattattattattattattattattattatattttatttctttggtctgtgagcaactcaaagaggcagaagaggagaatgacttttccagaatagaagtggagcagtgatcattattctccgctttctctttctaatcaacacttgaaaagcaaagtgtcttttcagcctttccatctttacaaataaaactcaaaaaagccgtccagcttatcccatcctctgattgtcttctgacttaagggatttactgtggtgtaggttctgccagccaaccctacaagctgccatttccagtcctagcatttaagtaggatgttgttgcctttaacttttcttatccaggggaaaattgccattttagggtcagcatgaacagctctttcttgtatgcgatttaaaacaaactggaaaggaaacttcacacgtcaaaatccatagaagcgcctggacgaggcttaaagtgctttgtgagtgaataggagccattcgctaattctagacccacagtgtctggtggtggggcttcccttgtggggcttctggtggtggttttgccttttcttttccctcctccatgttcttctaaaacatatacatatatacatacacacatacacatattcttcaggtctctaagcccctggaagcagcattgtgtgatattctcagaggcaggggaaaatagagggaaaaatagagactattggtatgttctccccatcagcgagttattgtaactggtcaccactggacgggaaggagaacagaggagagggaaagagaagcccaacctctgtgatcatatgagggccaaggctgagcagtgtagacagagaccctttgaaatgcatttgtctctcaaatagactagtaaacaccgacttctcctttgggttacaaacaccatttcaacctttcgggagagtcagagctaggatgtacaagaactgattctaaccagaagtccgcaagtactgtggacaagaatgcttaaccatgctgcttcagccttgagagacctaggttcttacacatatgcacacacgcatacacacatgcacgcacacacacatacacacatgcacgcacgcacgcatgcacaccaatttatgtttttattaagtgccttgaaaaaatgaagaaaaatgtattttccctttatgtaaaaattagtgaatatcttatgaattaaggcattcctctttccctaaccccgatggctccattcccaagtaccccaactcactgctgatcctattaaaggaatgagtcctgctacccgagtggtagtcatagccctagatgactctcaactactcttcaaagggaggcatcaggaatagaatgaaactgtgtgaaggataagattgttcgcatcaagatccaaatcttgatttcatattaacgcctaaggattgcctgtgtgctggaaatatatttgaaactcaaccagtatgcccagcctattgcatatcattgtcagaccatttttgctgctgtggtcacccacgattttcatttgtcttatacccaggtgaaaggggaagggtgaatgggactggctggttcctttaaatgttaacttatggaaatgctagttcaaatggtaatgtcacagtgttttgtatgcagagagcaagagttcaaccaacagctgtttattcatgtgtgtgtgtctttgctgctttgagttctctgtatctactgtgtatgtgaatggtcatgtgggactcagtggtggtgttgtgactttgacctagggtccgagtgtcacagctgatcttggcactcggcactcattggcacagtggtagttagaggtgaaaagtagagctgtcaagcccaagggcttagctttagggctcctcctgagttcggcccacagtagaagcaagattttaactagccccttttcctcttcaccctcccatgatgcgcagtgttcagaaagctggtaagtcctagggatttccagaagtagcctgcagaagaaggtaagtttgaaagccactccaggggtcctgatgctgtcatgctcagtgagccattttacagttctccaaagtctagccctgtttcggacctgcacttcacctctaagttatgtacaactcaacctgcatccctctaaaagtcctatatccatattcaccattggctaatttgaggccctgagtgggccttgaatgctaaaaagaagcagggtacgcagggctacatgtagataccacaccaaggctggaggctggtctgtcgtaagacagaaagaaagacgctgggcccaattttgacttggccaggggacaccttggtgtgtttgttatctttatctgtgggtaggctagctgacccatctccttgagtcattccctttgggaaaccccactgccagtattgatctcctttttgccttgtactgaatgacacattacctccacactctcccggactaggtggtcaacagggccacagggttgctttctgtctttggtggggcaggggagttgacagggatgagggtccaaggaataagcatgaatgacaagaaaacaagggaaagagttaacctgtcacatagcaggttaactttttcagggtttgcagttagaggtattcgaccattcactggctgagccagatcacgggaacttgagagcttttactgtgattcttcaatgtaaaaaataaacaacaatgtcaaactgtgtttatatgatttgtataaagcctttttaagattactatttaaataaacattataccagaga

SEQ ID NO: 406256 - DNA, 2598 bp, Homo sapiens
gggagccggaggggaggcagagatcgcgagcgaggcaccagcctgcagccggcccccagcacatcctcagccgcacagacactcggcgaggtggaggtgagggcgggcgccagcgaactcggagaggggctcgctcactcccaggcgatcccagccgccaccgccgccgcaccagcagcagcaacagcagcagcagcttccttcctcagactcccctcgagaggctggccaagcgggtgtagccgttgggggaggctcccgccgggggaacccggcgaggacaagagcagggcggccgccttccactcgggctgtccggcggcggctgcctccgcccgcgtgtccgtcaagggtgccgcgggatgtgtgtcagtttacgcctctgagatcacacagctgcctgggggccgtgtgatgcccaaggcaagtcttggttttaattattattattatcattattgttacgcttggctttcgggaaatactcgtgatatttgtaggataaaggaaatgacactttgaggaactggagagaacatatatgcgttttgtttttaagaggaaaaccgtgttctcttcccggcttgttccctctttgctgatttcaggagctactctcctcctggtgaggtggaaattccagcaagaatagaggtgaagacaagccaccaggactcaggagggaaacgctgaccattagaaacctctgcataagacgttgtaaggaggaaaataaaagagagaaaaacacaaagatttaaacaagaaacctacgaacccagctctggaaagagccaccttctccaaaatggatatgtttcctctcacctgggttttcttagccctctacttttcaagacaccaagtgagaggccaaccagacccaccgtgcggaggtcgtttgaattccaaagatgctggctatatcacctctcccggttacccccaggactacccctcccaccagaactgcgagtggattgtttacgcccccgaacccaaccagaagattgtcctcaacttcaaccctcactttgaaatcgagaagcacgactgcaagtatgactttatcgagattcgggatggggacagtgaatccgcagacctcctgggcaaacactgtgggaacatcgccccgcccaccatcatctcctcgggctccatgctctacatcaagttcacctccgactacgcccggcagggggcaggcttctctctgcgctacgagatcttcaagacaggctctgaagattgctcaaaaaacttcacaagccccaacgggaccatcgaatctcctgggtttcctgagaagtatccacacaacttggactgcacctttaccatcctggccaaacccaagatggagatcatcctgcagttcctgatctttgacctggagcatgaccctttgcaggtgggagagggggactgcaagtacgattggctggacatctgggatggcattccacatgttggccccctgattggcaagtactgtgggaccaaaacaccctctgaacttcgttcatcgacggggatcctctccctgacctttcacacggacatggcggtggccaaggatggcttctctgcgcgttactacctggtccaccaagagccactagagaactttcagtgcaatgttcctctgggcatggagtctggccggattgctaatgaacagatcagtgcctcatctacctactctgatgggaggtggacccctcaacaaagccggctccatggtgatgacaatggctggacccccaacttggattccaacaaggagtatctccaggtggacctgcgctttttaaccatgctcacggccatcgcaacacagggagcgatttccagggaaacacagaatggctactacgtcaaatcctacaagctggaagtcagcactaatggagaggactggatggtgtaccggcatggcaaaaaccacaaggtatttcaagccaacaacgatgcaactgaggtggttctgaacaagctccacgctccactgctgacaaggtttgttagaatccgccctcagacctggcactcaggtatcgccctccggctggagctcttcggctgccgggtcacagatgctccctgctccaacatgctggggatgctctcaggcctcattgcagactcccagatctccgcctcttccacccaggaatacctctggagccccagtgcagcccgcctggtcagcagccgctcgggctggttccctcgaatccctcaggcccagcccggtgaggagtggcttcaggtagatctgggaacacccaagacagtgaaaggtgtcatcatccagggagcccgcggaggagacagtatcactgctgtggaagccagagcatttgtgcgcaagttcaaagtctcctacagcctaaacggcaaggactgggaatacattcaggaccccaggacccagcagccaaaggtaggctgttcttggaggcctctgtaacgttaccctcaacagggaggctaagtgtggtacagggagttgagactgatgatgtcccatctaaacagtcgtcatccaactcctgaaatccaataaaacaaatatcgtttgagaaattactt

SEQ ID NO: 406257 - DNA, 784 bp, Homo sapiens
  misc_feature (11)..(11): n is a, c, g, or t
gactttagagnatccccacgttgacactccaggggtcctgatgctgtcatgctcagtgagccattttacagttctccaaagtctagccctgtttcggacctgcacttcacctctaagttatgtacaactcaacctgcatccctctaaaagtcctatatccatattcaccattggctaatttgaggccctgagtgggccttgaatgctaaaaagaagcagggtacgcagggctacatgtagataccacaccaaggctggaggctggtctgtcgtaagacagaaagaaagacgctgggcccaattttgacttggccaggggacaccttggtgtgtttgttatctttatctgtgggtaggctagctgacccatctccttgagtcattccctttgggaaaccccactgccagtattgatctcctttttgccttgtactgaatgacacattacctccacactctcccggactaggtggtcaacagggccacagggttgctttctgtctttggtggggcaggggagttgacagggatgagggtccaaggaataagcatgaatgacaagaaaacaagggaaagagttaacctgtcacatagcaggttaactttttcagggtttgcagttagaggtattcgaccattcactggctgagccagatcacgggaacttgagagcttttactgtgattcttcaatgtaaaaaataaacaacaatgtcaaactgtgtttatatgatttgtataaagcctttttaagattactatttaaataaacattataccagaga

SEQ ID NO: 406258 - DNA, 1212 bp, Homo sapiens
  misc_feature (1114)..(1114): n is a, c, g, or t
gggagccggaggggaggcagagatcgcgagcgaggcaccagcctgcagccggcccccagcacatcctcagccgcacagacactcggcgaggtggaggtgagggcgggcgccagcgaactcggagaggggctcgctcactcccaggcgatcccagccgccaccgccgccgcaccagcagcagcaacagcagcagcagcttccttcctcagactcccctcgagaggctggccaagcgggtgtagccgttgggggaggctcccgccgggggaacccggcgaggacaagagcagggcggccgccttccactcgggctgtccggcggcggctgcctccgcccgcgtgtccgtcaagggtgccgcgggatgtgtgtcagtttacgcctctgagatcacacagctgcctgggggccgtgtgatgcccaaggcaagtcttggttttaattattattattatcattattgttacgcttggctttcgggaaatactcgtgatatttgtaggataaaggaaatgacactttgaggaactggagagaacatatatgcgttttgtttttaagaggaaaaccgtgttctcttcccggcttgttccctctttgctgatttcaggagctactctcctcctggtgaggtggaaattccagcaagaatagaggtgaagacaagccaccaggactcaggagggaaacgctgaccattagaaacctctgcataagacgttgtaaggaggaaaataaaagagagaaaaacacaaagatttaaacaagaaacctacgaacccagctctggaaagagccaccttctccaaaatggatatgtttcctctcacctgggttttcttagccctctacttttcaagacaccaagtgagaggccaaccagacccaccgtgcggaggtcgtttgaattccaaagatgctggctatatcacctctcccggttacccccaggactacccctcccaccagaactgcgagtggattgtttacgcccccgaacccaaccagaagattgtcctcaacttcaaccctcactttgaaatcgagaagcacgactgcaagtaagcaccgtcctgtcccactgtgtatcccatccatgagatgcacacgccctancctgggttaggtctacctgggcaggtagaccagagccgggatgtaggtatggaggattggagttgcggtgtagagatgatggaggcggtcgggaaaat

SEQ ID NO: 406259 - DNA, 341 bp, Homo sapiens
ggtgggtagggggagggatgagccggaataatctcttccaccgaatgagtaagtaggttagtcttctggactgccataaaaggtctgtaaaatagttttaatcagacactggtacagaagagaaggagggagtgtggggggaagaaagttgtaacatatttgaagttctttgggtcgttgatttctctttcagacccaccgtgcggaggtcgtttgaattccaaagatgctggctatatcacctctcccggttacccccaggactacccctcccaccagaactgcgagtggattgtttacgcccccgaacccaaccagaagattgtcctcaacttcaaccc

SEQ ID NO: 406260 - DNA, 309 bp, Homo sapiens
ttacccccaggactacccctcccaccagaactgcgagtggattgtttacgcccccgaacccaaccagaagattgtcctcaacttcaaccctcactttgaaatcgagaagcacgactgcaagtaagcaccgtcctgtcccactgtgtatcccatccatgagatgcacacgccctgcccccacccctgctcttgtcacttctatcacccctcaccccaagacctgctgctaaccagtggtggatcctggccccagaggaaaacctcaaggggcattccctttccagggaaataaaggtgtggctgatccca

SEQ ID NO: 406261 - DNA, 332 bp, Homo sapiens
gggcaaacactgtgggaacatcgccccgcccaccatcatctcctcgggctccatgctctacatcaagttcacctccgactacgcccggcagggggcaggcttctctctgcgctacgagatcttcaagacaggtcagtgtggtcacacgtaggggccgggagatgggcgtcttagagaagaaggagggacagcacccagtgggctgaggcactgggtaagggtgacagtgtcatccagcttgagcatggtgagaggttcaaggtgaacccacaaacatcatgagaagaagagccagctcagattatccaccagcttaagggggcgggctgtgg

SEQ ID NO: 406262 - DNA, 447 bp, Homo sapiens
ctccatgacttgatgtagttgtttttaaaatgtgagcatataatatagggtcttttaaatgaggaagtgcctgcaaggacttgtccctagaagggaggcagcatttgggggatcccgaggtatgaggttggaaggcctaactgcatttgaccgtctgctttccccagactttcagtgcaatgttcctctgggcatggagtctggccggattgctaatgaacagatcagtgcctcatctacctactctgatgggaggtggacccctcaacaaagccggctccatggtgatgacaatggctggacccccaacttggattccaacaaggagtatctccaggtacttgtgcagataccagaggatgtgagagtgtgtatgtattgctggggtaggagggtagctcctcaaatatagtaggcagaggacacaaagaaaataaacacagcata

SEQ ID NO: 406263 - DNA, 696 bp, Homo sapiens
tgccacaaagatcagagagaaccaagaaagtgttgattgacacagggccattgtatttcaagccaacaacgatgcaactgaggtggttctgaacaagctccacgctccactgctgacaaggtttgttagaatccgccctcagacctggcactcaggtatcgccctccggctggagctcttcggctgccgggtcacagatgctccctgctccaacatgctggggatgctctcaggcctcattgcagactcccagatctccgcctcttccacccaggaatacctctggagccccagtgcagcccgcctggtcagcagccgctcgggctggttccctcgaatccctcaggcccagcccggtgaggagtggcttcaggtagatctgggaacacccaagacagtgaaaggtgtcatcatccagggagcccgcggaggagacagtatcactgctgtggaagccagagcatttgtgcgcaagttcaaagtctcctacagcctaaacggcaaggactgggaatacattcaggaccccaggacccagcagccaaaggtaggctgttcttggaggcctctgtaacgttaccctcaacagggaggctaagtgtggtacagggagttgagactgatgatgtcccatctaaacagtcgtcatccaactcctgaaatccaataaaacaaatatcgtttgagaaattactt

SEQ ID NO: 406264 - DNA, 6478 bp, Homo sapiens
gggagccggaggggaggcagagatcgcgagcgaggcaccagcctgcagccggcccccagcacatcctcagccgcacagacactcggcgaggtggaggtgagggcgggcgccagcgaactcggagaggggctcgctcactcccaggcgatcccagccgccaccgccgccgcaccagcagcagcaacagcagcagcagcttccttcctcagactcccctcgagaggctggccaagcgggtgtagccgttgggggaggctcccgccgggggaacccggcgaggacaagagcagggcggccgccttccactcgggctgtccggcggcggctgcctccgcccgcgtgtccgtcaagggtgccgcgggatgtgtgtcagtttacgcctctgagatcacacagctgcctgggggccgtgtgatgcccaaggagctactctcctcctggtgaggtggaaattccagcaagaatagaggtgaagacaagccaccaggactcaggagggaaacgctgaccattagaaacctctgcataagacgttgtaaggaggaaaataaaagagagaaaaacacaaagatttaaacaagaaacctacgaacccagctctggaaagagccaccttctccaaaatggatatgtttcctctcacctgggttttcttagccctctacttttcaagacaccaagtgagaggccaaccagacccaccgtgcggaggtcgtttgaattccaaagatgctggctatatcacctctcccggttacccccaggactacccctcccaccagaactgcgagtggattgtttacgcccccgaacccaaccagaagattgtcctcaacttcaaccctcactttgaaatcgagaagcacgactgcaagtatgactttatcgagattcgggatggggacagtgaatccgcagacctcctgggcaaacactgtgggaacatcgccccgcccaccatcatctcctcgggctccatgctctacatcaagttcacctccgactacgcccggcagggggcaggcttctctctgcgctacgagatcttcaagacaggctctgaagattgctcaaaaaacttcacaagccccaacgggaccatcgaatctcctgggtttcctgagaagtatccacacaacttggactgcacctttaccatcctggccaaacccaagatggagatcatcctgcagttcctgatctttgacctggagcatgaccctttgcaggtgggagagggggactgcaagtacgattggctggacatctgggatggcattccacatgttggccccctgattggcaagtactgtgggaccaaaacaccctctgaacttcgttcatcgacggggatcctctccctgacctttcacacggacatggcggtggccaaggatggcttctctgcgcgttactacctggtccaccaagagccactagagaactttcagtgcaatgttcctctgggcatggagtctggccggattgctaatgaacagatcagtgcctcatctacctactctgatgggaggtggacccctcaacaaagccggctccatggtgatgacaatggctggacccccaacttggattccaacaaggagtatctccaggtggacctgcgctttttaaccatgctcacggccatcgcaacacagggagcgatttccagggaaacacagaatggctactacgtcaaatcctacaagctggaagtcagcactaatggagaggactggatggtgtaccggcatggcaaaaaccacaaggtatttcaagccaacaacgatgcaactgaggtggttctgaacaagctccacgctccactgctgacaaggtttgttagaatccgccctcagacctggcactcaggtatcgccctccggctggagctcttcggctgccgggtcacagatgctccctgctccaacatgctggggatgctctcaggcctcattgcagactcccagatctccgcctcttccacccaggaatacctctggagccccagtgcagcccgcctggtcagcagccgctcgggctggttccctcgaatccctcaggcccagcccggtgaggagtggcttcaggtagatctgggaacacccaagacagtgaaaggtgtcatcatccagggagcccgcggaggagacagtatcactgctgtggaagccagagcatttgtgcgcaagttcaaagtctcctacagcctaaacggcaaggactgggaatacattcaggaccccaggacccagcagccaaagctgttcgaagggaacatgcactatgacacccctgacatccgaaggtttgaccccattccggcacagtatgtgcgggtatacccggagaggtggtcgccggcggggattgggatgcggctggaggtgctgggctgtgactggacagactccaagcccacggtagagacgctgggacccactgtgaagagcgaagagacaaccaccccctaccccaccgaagaggaggccacagagtgtggggagaactgcagctttgaggatgacaaagatttgcagctcccttcgggattcaattgcaacttcgatttcctcgaggagccctgtggttggatgtatgaccatgccaagtggctccggaccacctgggccagcagctccagcccaaacgaccggacgtttccagatgacaggaatttcttgcggctgcagagtgacagccagagagagggccagtatgcccggctcatcagcccccctgtccacctgccccgaagcccggtgtgcatggagttccagtaccaggccacgggcggccgcggggtggcgctgcaggtggtgcgggaagccagccaggagagcaagttgctgtgggtcatccgtgaggaccagggcggcgagtggaagcacgggcggatcatcctgcccagctacgacatggagtaccagattgtgttcgagggagtgatagggaaaggacgttccggagagattgccattgatgacattcggataagcactgatgtcccactggagaactgcatggaacccatctcggcttttgcagtggacatcccagaaatacatgagagagaaggatatgaagatgaaattgatgatgaatacgaggtggactggagcaattcttcttctgcaacctcagggtctggcgccccctcgaccgacaaagaaaagagctggctgtacaccctggatcccatcctcatcaccatcatcgccatgagctcactgggcgtcctcctgggggccacctgtgcaggcctcctgctctactgcacctgttcctactcgggcctgagctcccgaagctgcaccacactggagaactacaacttcgagctctacgatggccttaagcacaaggtcaagatgaaccaccaaaagtgctgctccgaggcatgacggattgcacctgaatcctatctgacgtttcattccagcaagaggggctggggaagattacatttttttttcctttggaaactgaatgccataatctcgatcaaaccgatccagaataccgaaggtatggacaggacagaaaagcgagtcgcaggaggaagggagatgcagccgcacaggggatgattaccctcctaggaccgcggtggctaagtcattgcaggaacggggctgtgttctctgctgggacaaaacaggagctcatctctttggggtcacagttctattttgtttgtgagtttgtattattattattattattattattattatattttatttctttggtctgtgagcaactcaaagaggcagaagaggagaatgacttttccagaatagaagtggagcagtgatcattattctccgctttctctttctaatcaacacttgaaaagcaaagtgtcttttcagcctttccatctttacaaataaaactcaaaaaagccgtccagcttatcccatcctctgattgtcttctgacttaagggatttactgtggtgtaggttctgccagccaaccctacaagctgccatttccagtcctagcatttaagtaggatgttgttgcctttaacttttcttatccaggggaaaattgccattttagggtcagcatgaacagctctttcttgtatgcgatttaaaacaaactggaaaggaaacttcacacgtcaaaatccatagaagcgcctggacgaggcttaaagtgctttgtgagtgaataggagccattcgctaattctagacccacagtgtctggtggtggggcttcccttgtggggcttctggtggtggttttgccttttcttttccctcctccatgttcttctaaaacatatacatatatacatacacacatacacatattcttcaggtctctaagcccctggaagcagcattgtgtgatattctcagaggcaggggaaaatagagggaaaaatagagactattggtatgttctccccatcagcgagttattgtaactggtcaccactggacgggaaggagaacagaggagagggaaagagaagcccaacctctgtgatcatatgagggccaaggctgagcagtgtagacagagaccctttgaaatgcatttgtctctcaaatagactagtaaacaccgacttctcctttgggttacaaacaccatttcaacctttcgggagagtcagagctaggatgtacaagaactgattctaaccagaagtccgcaagtactgtggacaagaatgcttaaccatgctgcttcagccttgagagacctaggttcttacacatatgcacacacgcatacacacatgcacgcacacacacatacacacatgcacgcacgcacgcatgcacaccaatttatgtttttattaagtgccttgaaaaaatgaagaaaaatgtattttccctttatgtaaaaattagtgaatatcttatgaattaaggcattcctctttccctaaccccgatggctccattcccaagtaccccaactcactgctgatcctattaaaggaatgagtcctgctacccgagtggtagtcatagccctagatgactctcaactactcttcaaagggaggcatcaggaatagaatgaaactgtgtgaaggataagattgttcgcatcaagatccaaatcttgatttcatattaacgcctaaggattgcctgtgtgctggaaatatatttgaaactcaaccagtatgcccagcctattgcatatcattgtcagaccatttttgctgctgtggtcacccacgattttcatttgtcttatacccaggtgaaaggggaagggtgaatgggactggctggttcctttaaatgttaacttatggaaatgctagttcaaatggtaatgtcacagtgttttgtatgcagagagcaagagttcaaccaacagctgtttattcatgtgtgtgtgtctttgctgctttgagttctctgtatctactgtgtatgtgaatggtcatgtgggactcagtggtggtgttgtgactttgacctagggtccgagtgtcacagctgatcttggcactcggcactcattggcacagtggtagttagaggtgaaaagtagagctgtcaagcccaagggcttagctttagggctcctcctgagttcggcccacagtagaagcaagattttaactagccccttttcctcttcaccctcccatgatgcgcagtgttcagaaagctggtaagtcctagggatttccagaagtagcctgcagaagaaggtaagtttgaaagccactccaggggtcctgatgctgtcatgctcagtgagccattttacagttctccaaagtctagccctgtttcggacctgcacttcacctctaagttatgtacaactcaacctgcatccctctaaaagtcctatatccatattcaccattggctaatttgaggccctgagtgggccttgaatgctaaaaagaagcagggtacgcagggctacatgtagataccacaccaaggctggaggctggtctgtcgtaagacagaaagaaagacgctgggcccaattttgacttggccaggggacaccttggtgtgtttgttatctttatctgtgggtaggctagctgacccatctccttgagtcattccctttgggaaaccccactgccagtattgatctcctttttgccttgtactgaatgacacattacctccacactctcccggactaggtggtcaacagggccacagggttgctttctgtctttggtggggcaggggagttgacagggatgagggtccaaggaataagcatgaatgacaagaaaacaagggaaagagttaacctgtcacatagcaggttaactttttcagggtttgcagttagaggtattcgaccattcactggctgagccagatcacgggaacttgagagcttttactgtgattcttcaatgtaaaaaataaacaacaatgtcaaactgtgtttatatgatttgtataaagcctttttaagattactatttaaataaacattataccagaga

SEQ ID NO: 406265 - DNA, 6481 bp, Homo sapiens
gggagccggaggggaggcagagatcgcgagcgaggcaccagcctgcagccggcccccagcacatcctcagccgcacagacactcggcgaggtggaggtgagggcgggcgccagcgaactcggagaggggctcgctcactcccaggcgatcccagccgccaccgccgccgcaccagcagcagcaacagcagcagcagcttccttcctcagactcccctcgagaggctggccaagcgggtgtagccgttgggggaggctcccgccgggggaacccggcgaggacaagagcagggcggccgccttccactcgggctgtccggcggcggctgcctccgcccgcgtgtccgtcaagggtgccgcgggatgtgtgtcagtttacgcctctgagatcacacagctgcctgggggccgtgtgatgcccaaggcaagtcttggttttaattattattattatcattattgttacgcttggctttcgggaaatactcgtgatatttgtaggataaaggaaatgacactttgaggaactggagagaacatatatgcgttttgtttttaagaggaaaaccgtgttctcttcccggcttgttccctctttgctgatttcaggagctactctcctcctggtgaggtggaaattccagcaagaatagaggtgaagacaagccaccaggactcaggagggaaacgctgaccattagaaacctctgcataagacgttgtaaggaggaaaataaaagagagaaaaacacaaagatttaaacaagaaacctacgaacccagctctggaaagagccaccttctccaaaatggatatgtttcctctcacctgggttttcttagccctctacttttcaagacaccaagtgagaggccaaccagacccaccgtgcggaggtcgtttgaattccaaagatgctggctatatcacctctcccggttacccccaggactacccctcccaccagaactgcgagtggattgtttacgcccccgaacccaaccagaagattgtcctcaacttcaaccctcactttgaaatcgagaagcacgactgcaagtatgactttatcgagattcgggatggggacagtgaatccgcagacctcctgggcaaacactgtgggaacatcgccccgcccaccatcatctcctcgggctccatgctctacatcaagttcacctccgactacgcccggcagggggcaggcttctctctgcgctacgagatcttcaagacaggctctgaagattgctcaaaaaacttcacaagccccaacgggaccatcgaatctcctgggtttcctgagaagtatccacacaacttggacctctgaacttcgttcatcgacggggatcctctccctgacctttcacacggacatggcggtggccaaggatggcttctctgcgcgttactacctggtccaccaagagccactagagaactttcagtgcaatgttcctctgggcatggagtctggccggattgctaatgaacagatcagtgcctcatctacctactctgatgggaggtggacccctcaacaaagccggctccatggtgatgacaatggctggacccccaacttggattccaacaaggagtatctccaggtggacctgcgctttttaaccatgctcacggccatcgcaacacagggagcgatttccagggaaacacagaatggctactacgtcaaatcctacaagctggaagtcagcactaatggagaggactggatggtgtaccggcatggcaaaaaccacaaggtatttcaagccaacaacgatgcaactgaggtggttctgaacaagctccacgctccactgctgacaaggtttgttagaatccgccctcagacctggcactcaggtatcgccctccggctggagctcttcggctgccgggtcacagatgctccctgctccaacatgctggggatgctctcaggcctcattgcagactcccagatctccgcctcttccacccaggaatacctctggagccccagtgcagcccgcctggtcagcagccgctcgggctggttccctcgaatccctcaggcccagcccggtgaggagtggcttcaggtagatctgggaacacccaagacagtgaaaggtgtcatcatccagggagcccgcggaggagacagtatcactgctgtggaagccagagcatttgtgcgcaagttcaaagtctcctacagcctaaacggcaaggactgggaatacattcaggaccccaggacccagcagccaaagctgttcgaagggaacatgcactatgacacccctgacatccgaaggtttgaccccattccggcacagtatgtgcgggtatacccggagaggtggtcgccggcggggattgggatgcggctggaggtgctgggctgtgactggacagactccaagcccacggtagagacgctgggacccactgtgaagagcgaagagacaaccaccccctaccccaccgaagaggaggccacagagtgtggggagaactgcagctttgaggatgacaaagatttgcagctcccttcgggattcaattgcaacttcgatttcctcgaggagccctgtggttggatgtatgaccatgccaagtggctccggaccacctgggccagcagctccagcccaaacgaccggacgtttccagatgacaggaatttcttgcggctgcagagtgacagccagagagagggccagtatgcccggctcatcagcccccctgtccacctgccccgaagcccggtgtgcatggagttccagtaccaggccacgggcggccgcggggtggcgctgcaggtggtgcgggaagccagccaggagagcaagttgctgtgggtcatccgtgaggaccagggcggcgagtggaagcacgggcggatcatcctgcccagctacgacatggagtaccagattgtgttcgagggagtgatagggaaaggacgttccggagagattgccattgatgacattcggataagcactgatgtcccactggagaactgcatggaacccatctcggcttttgcagtggacatcccagaaatacatgagagagaaggatatgaagatgaaattgatgatgaatacgaggtggactggagcaattcttcttctgcaacctcagggtctggcgccccctcgaccgacaaagaaaagagctggctgtacaccctggatcccatcctcatcaccatcatcgccatgagctcactgggcgtcctcctgggggccacctgtgcaggcctcctgctctactgcacctgttcctactcgggcctgagctcccgaagctgcaccacactggagaactacaacttcgagctctacgatggccttaagcacaaggtcaagatgaaccaccaaaagtgctgctccgaggcatgacggattgcacctgaatcctatctgacgtttcattccagcaagaggggctggggaagattacatttttttttcctttggaaactgaatgccataatctcgatcaaaccgatccagaataccgaaggtatggacaggacagaaaagcgagtcgcaggaggaagggagatgcagccgcacaggggatgattaccctcctaggaccgcggtggctaagtcattgcaggaacggggctgtgttctctgctgggacaaaacaggagctcatctctttggggtcacagttctattttgtttgtgagtttgtattattattattattattattattattatattttatttctttggtctgtgagcaactcaaagaggcagaagaggagaatgacttttccagaatagaagtggagcagtgatcattattctccgctttctctttctaatcaacacttgaaaagcaaagtgtcttttcagcctttccatctttacaaataaaactcaaaaaagccgtccagcttatcccatcctctgattgtcttctgacttaagggatttactgtggtgtaggttctgccagccaaccctacaagctgccatttccagtcctagcatttaagtaggatgttgttgcctttaacttttcttatccaggggaaaattgccattttagggtcagcatgaacagctctttcttgtatgcgatttaaaacaaactggaaaggaaacttcacacgtcaaaatccatagaagcgcctggacgaggcttaaagtgctttgtgagtgaataggagccattcgctaattctagacccacagtgtctggtggtggggcttcccttgtggggcttctggtggtggttttgccttttcttttccctcctccatgttcttctaaaacatatacatatatacatacacacatacacatattcttcaggtctctaagcccctggaagcagcattgtgtgatattctcagaggcaggggaaaatagagggaaaaatagagactattggtatgttctccccatcagcgagttattgtaactggtcaccactggacgggaaggagaacagaggagagggaaagagaagcccaacctctgtgatcatatgagggccaaggctgagcagtgtagacagagaccctttgaaatgcatttgtctctcaaatagactagtaaacaccgacttctcctttgggttacaaacaccatttcaacctttcgggagagtcagagctaggatgtacaagaactgattctaaccagaagtccgcaagtactgtggacaagaatgcttaaccatgctgcttcagccttgagagacctaggttcttacacatatgcacacacgcatacacacatgcacgcacacacacatacacacatgcacgcacgcacgcatgcacaccaatttatgtttttattaagtgccttgaaaaaatgaagaaaaatgtattttccctttatgtaaaaattagtgaatatcttatgaattaaggcattcctctttccctaaccccgatggctccattcccaagtaccccaactcactgctgatcctattaaaggaatgagtcctgctacccgagtggtagtcatagccctagatgactctcaactactcttcaaagggaggcatcaggaatagaatgaaactgtgtgaaggataagattgttcgcatcaagatccaaatcttgatttcatattaacgcctaaggattgcctgtgtgctggaaatatatttgaaactcaaccagtatgcccagcctattgcatatcattgtcagaccatttttgctgctgtggtcacccacgattttcatttgtcttatacccaggtgaaaggggaagggtgaatgggactggctggttcctttaaatgttaacttatggaaatgctagttcaaatggtaatgtcacagtgttttgtatgcagagagcaagagttcaaccaacagctgtttattcatgtgtgtgtgtctttgctgctttgagttctctgtatctactgtgtatgtgaatggtcatgtgggactcagtggtggtgttgtgactttgacctagggtccgagtgtcacagctgatcttggcactcggcactcattggcacagtggtagttagaggtgaaaagtagagctgtcaagcccaagggcttagctttagggctcctcctgagttcggcccacagtagaagcaagattttaactagccccttttcctcttcaccctcccatgatgcgcagtgttcagaaagctggtaagtcctagggatttccagaagtagcctgcagaagaaggtaagtttgaaagccactccaggggtcctgatgctgtcatgctcagtgagccattttacagttctccaaagtctagccctgtttcggacctgcacttcacctctaagttatgtacaactcaacctgcatccctctaaaagtcctatatccatattcaccattggctaatttgaggccctgagtgggccttgaatgctaaaaagaagcagggtacgcagggctacatgtagataccacaccaaggctggaggctggtctgtcgtaagacagaaagaaagacgctgggcccaattttgacttggccaggggacaccttggtgtgtttgttatctttatctgtgggtaggctagctgacccatctccttgagtcattccctttgggaaaccccactgccagtattgatctcctttttgccttgtactgaatgacacattacctccacactctcccggactaggtggtcaacagggccacagggttgctttctgtctttggtggggcaggggagttgacagggatgagggtccaaggaataagcatgaatgacaagaaaacaagggaaagagttaacctgtcacatagcaggttaactttttcagggtttgcagttagaggtattcgaccattcactggctgagccagatcacgggaacttgagagcttttactgtgattcttcaatgtaaaaaataaacaacaatgtcaaactgtgtttatatgatttgtataaagcctttttaagattactatttaaataaacattataccagaga

SEQ ID NO: 406266 - DNA, 5041 bp, Homo sapiens
tccatgcccagattgctaatgaacagatcagtgcctcatccacctcccatcagagtaggtagatcagtgcctcatctacctactctgatgggaggtggacccctcaacaaagccggctccatggtgatgacaatggctggacccccaacttggattccaacaaggagtatctccaggtggacctgcgctttttaaccatgctcacggccatcgcaacacagggagcgatttccagggaaacacagaatggctactacgtcaaatcctacaagctggaagtcagcactaatggagaggactggatggtgtaccggcatggcaaaaaccacaaggtatttcaagccaacaacgatgcaactgaggtggttctgaacaagctccacgctccactgctgacaaggtttgttagaatccgccctcagacctggcactcaggtatcgccctccggctggagctcttcggctgccgggtcacagatgctccctgctccaacatgctggggatgctctcaggcctcattgcagactcccagatctccgcctcttccacccaggaatacctctggagccccagtgcagcccgcctggtcagcagccgctcgggctggttccctcgaatccctcaggcccagcccggtgaggagtggcttcaggtagatctgggaacacccaagacagtgaaaggtgtcatcatccagggagcccgcggaggagacagtatcactgctgtggaagccagagcatttgtgcgcaagttcaaagtctcctacagcctaaacggcaaggactgggaatacattcaggaccccaggacccagcagccaaagctgttcgaagggaacatgcactatgacacccctgacatccgaaggtttgaccccattccggcacagtatgtgcgggtatacccggagaggtggtcgccggcggggattgggatgcggctggaggtgctgggctgtgactggacagactccaagcccacggtagagacgctgggacccactgtgaagagcgaagagacaaccaccccctaccccaccgaagaggaggccacagagtgtggggagaactgcagctttgaggatgacaaagatttgcagctcccttcgggattcaattgcaacttcgatttcctcgaggagccctgtggttggatgtatgaccatgccaagtggctccggaccacctgggccagcagctccagcccaaacgaccggacgtttccagatgacaggaatttcttgcggctgcagagtgacagccagagagagggccagtatgcccggctcatcagcccccctgtccacctgccccgaagcccggtgtgcatggagttccagtaccaggccacgggcggccgcggggtggcgctgcaggtggtgcgggaagccagccaggagagcaagttgctgtgggtcatccgtgaggaccagggcggcgagtggaagcacgggcggatcatcctgcccagctacgacatggagtaccagattgtgttcgagggagtgatagggaaaggacgttccggagagattgccattgatgacattcggataagcactgatgtcccactggagaactgcatggaacccatctcggcttttgcagtggacatcccagaaatacatgagagagaaggatatgaagatgaaattgatgatgaatacgaggtggactggagcaattcttcttctgcaacctcagggtctggcgccccctcgaccgacaaagaaaagagctggctgtacaccctggatcccatcctcatcaccatcatcgccatgagctcactgggcgtcctcctgggggccacctgtgcaggcctcctgctctactgcacctgttcctactcgggcctgagctcccgaagctgcaccacactggagaactacaacttcgagctctacgatggccttaagcacaaggtcaagatgaaccaccaaaagtgctgctccgaggcatgacggattgcacctgaatcctatctgacgtttcattccagcaagaggggctggggaagattacatttttttttcctttggaaactgaatgccataatctcgatcaaaccgatccagaataccgaaggtatggacaggacagaaaagcgagtcgcaggaggaagggagatgcagccgcacaggggatgattaccctcctaggaccgcggtggctaagtcattgcaggaacggggctgtgttctctgctgggacaaaacaggagctcatctctttggggtcacagttctattttgtttgtgagtttgtattattattattattattattattattatattttatttctttggtctgtgagcaactcaaagaggcagaagaggagaatgacttttccagaatagaagtggagcagtgatcattattctccgctttctctttctaatcaacacttgaaaagcaaagtgtcttttcagcctttccatctttacaaataaaactcaaaaaagccgtccagcttatcccatcctctgattgtcttctgacttaagggatttactgtggtgtaggttctgccagccaaccctacaagctgccatttccagtcctagcatttaagtaggatgttgttgcctttaacttttcttatccaggggaaaattgccattttagggtcagcatgaacagctctttcttgtatgcgatttaaaacaaactggaaaggaaacttcacacgtcaaaatccatagaagcgcctggacgaggcttaaagtgctttgtgagtgaataggagccattcgctaattctagacccacagtgtctggtggtggggcttcccttgtggggcttctggtggtggttttgccttttcttttccctcctccatgttcttctaaaacatatacatatatacatacacacatacacatattcttcaggtctctaagcccctggaagcagcattgtgtgatattctcagaggcaggggaaaatagagggaaaaatagagactattggtatgttctccccatcagcgagttattgtaactggtcaccactggacgggaaggagaacagaggagagggaaagagaagcccaacctctgtgatcatatgagggccaaggctgagcagtgtagacagagaccctttgaaatgcatttgtctctcaaatagactagtaaacaccgacttctcctttgggttacaaacaccatttcaacctttcgggagagtcagagctaggatgtacaagaactgattctaaccagaagtccgcaagtactgtggacaagaatgcttaaccatgctgcttcagccttgagagacctaggttcttacacatatgcacacacgcatacacacatgcacgcacacacacatacacacatgcacgcacgcacgcatgcacaccaatttatgtttttattaagtgccttgaaaaaatgaagaaaaatgtattttccctttatgtaaaaattagtgaatatcttatgaattaaggcattcctctttccctaaccccgatggctccattcccaagtaccccaactcactgctgatcctattaaaggaatgagtcctgctacccgagtggtagtcatagccctagatgactctcaactactcttcaaagggaggcatcaggaatagaatgaaactgtgtgaaggataagattgttcgcatcaagatccaaatcttgatttcatattaacgcctaaggattgcctgtgtgctggaaatatatttgaaactcaaccagtatgcccagcctattgcatatcattgtcagaccatttttgctgctgtggtcacccacgattttcatttgtcttatacccaggtgaaaggggaagggtgaatgggactggctggttcctttaaatgttaacttatggaaatgctagttcaaatggtaatgtcacagtgttttgtatgcagagagcaagagttcaaccaacagctgtttattcatgtgtgtgtgtctttgctgctttgagttctctgtatctactgtgtatgtgaatggtcatgtgggactcagtggtggtgttgtgactttgacctagggtccgagtgtcacagctgatcttggcactcggcactcattggcacagtggtagttagaggtgaaaagtagagctgtcaagcccaagggcttagctttagggctcctcctgagttcggcccacagtagaagcaagattttaactagccccttttcctcttcaccctcccatgatgcgcagtgttcagaaagctggtaagtcctagggatttccagaagtagcctgcagaagaaggtaagtttgaaagccactccaggggtcctgatgctgtcatgctcagtgagccattttacagttctccaaagtctagccctgtttcggacctgcacttcacctctaagttatgtacaactcaacctgcatccctctaaaagtcctatatccatattcaccattggctaatttgaggccctgagtgggccttgaatgctaaaaagaagcagggtacgcagggctacatgtagataccacaccaaggctggaggctggtctgtcgtaagacagaaagaaagacgctgggcccaattttgacttggccaggggacaccttggtgtgtttgttatctttatctgtgggtaggctagctgacccatctccttgagtcattccctttgggaaaccccactgccagtattgatctcctttttgccttgtactgaatgacacattacctccacactctcccggactaggtggtcaacagggccacagggttgctttctgtctttggtggggcaggggagttgacagggatgagggtccaaggaataagcatgaatgacaagaaaacaagggaaagagttaacctgtcacatagcaggttaactttttcagggtttgcagttagaggtattcgaccattcactggctgagccagatcacgggaacttgagagcttttactgtgattcttcaatgtaaaaaataaacaacaatgtcaaactgtgtttatatgatttgtataaagcctttttaagattactatttaaataaacattataccagaga

SEQ ID NO: 406267 - DNA, 4840 bp, Homo sapiens
gggagccggaggggaggcagagatcgcgagcgaggcaccagcctgcagccggcccccagcacatcctcagccgcacagacactcggcgaggtggaggtgagggcgggcgccagcgaactcggagaggggctcgctcactcccaggcgatcccagccgccaccgccgccgcaccagcagcagcaacagcagcagcagcttccttcctcagactcccctcgagaggctggccaagcgggtgtagccgttgggggaggctcccgccgggggaacccggcgaggacaagagcagggcggccgccttccactcgggctgtccggcggcggctgcctccgcccgcgtgtccgtcaagggtgccgcgggatgtgtgtcagtttacgcctctgagatcacacagctgcctgggggccgtgtgatgcccaaggcaagtcttggttttaattattattattatcattattgttacgcttggctttcgggaaatactcgtgatatttgtaggataaaggaaatgacactttgaggaactggagagaacatatatgcgttttgtttttaagaggaaaaccgtgttctcttcccggcttgttccctctttgctgatttcaggagctactctcctcctggtgaggtggaaattccagcaagaatagaggtgaagacaagccaccaggactcaggagggaaacgctgaccattagaaacctctgcataagacgttgtaaggaggaaaataaaagagagaaaaacacaaagatttaaacaagaaacctacgaacccagctctggaaagagccaccttctccaaaatggatatgtttcctctcacctgggttttcttagccctctacttttcaagacaccaagtgagaggccaaccagacccaccgtgcggaggtcgtttgaattccaaagatgctggctatatcacctctcccggttacccccaggactacccctcccaccagaactgcgagtggattgtttacgcccccgaacccaaccagaagattgtcctcaacttcaaccctcactttgaaatcgagaagcacgactgcaagtatgactttatcgagattcgggatggggacagtgaatccgcagacctcctgggcaaacactgtgggaacatcgccccgcccaccatcatctcctcgggctccatgctctacatcaagttcacctccgactacgcccggcagggggcaggcttctctctgcgctacgagatcttcaagacaggctctgaagattgctcaaaaaacttcacaagccccaacgggaccatcgaatctcctgggtttcctgagaagtatccacacaacttggactgcacctttaccatcctggccaaacccaagatggagatcatcctgcagttcctgatctttgacctggagcatgaccctttgcaggtgggagagggggactgcaagtacgattggctggacatctgggatggcattccacatgttggccccctgattggcaagtactgtgggaccaaaacaccctctgaacttcgttcatcgacggggatcctctccctgacctttcacacggacatggcggtggccaaggatggcttctctgcgcgttactacctggtccaccaagagccactagagaactttcagtgcaatgttcctctgggcatggagtctggccggattgctaatgaacagatcagtgcctcatctacctactctgatgggaggtggacccctcaacaaagccggctccatggtgatgacaatggctggacccccaacttggattccaacaaggagtatctccaggtggacctgcgctttttaaccatgctcacggccatcgcaacacagggagcgatttccagggaaacacagaatggctactacgtcaaatcctacaagctggaagtcagcactaatggagaggactggatggtgtaccggcatggcaaaaaccacaaggtatttcaagccaacaacgatgcaactgaggtggttctgaacaagctccacgctccactgctgacaaggtttgttagaatccgccctcagacctggcactcaggtatcgccctccggctggagctcttcggctgccgggtcacagatgctccctgctccaacatgctggggatgctctcaggcctcattgcagactcccagatctccgcctcttccacccaggaatacctctggagccccagtgcagcccgcctggtcagcagccgctcgggctggttccctcgaatccctcaggcccagcccggtgaggagtggcttcaggtagatctgggaacacccaagacagtgaaaggtgtcatcatccagggagcccgcggaggagacagtatcactgctgtggaagccagagcatttgtgcgcaagttcaaagtctcctacagcctaaacggcaaggactgggaatacattcaggaccccaggacccagcagccaaagctgttcgaagggaacatgcactatgacacccctgacatccgaaggtttgaccccattccggcacagtatgtgcgggtatacccggagaggtggtcgccggcggggattgggatgcggctggaggtgctgggctgtgactggacagactccaagcccacggtagagacgctgggacccactgtgaagagcgaagagacaaccaccccctaccccaccgaagaggaggccacagagtgtggggagaactgcagctttgaggatgacaaagatttgcagctcccttcgggattcaattgcaacttcgatttcctcgaggagccctgtggttggatgtatgaccatgccaagtggctccggaccacctgggccagcagctccagcccaaacgaccggacgtttccagatgacaggaatttcttgcggctgcagagtgacagccagagagagggccagtatgcccggctcatcagcccccctgtccacctgccccgaagcccggtgtgcatggagttccagtaccaggccacgggcggccgcggggtggcgctgcaggtggtgcgggaagccagccaggagagcaagttgctgtgggtcatccgtgaggaccagggcggcgagtggaagcacgggcggatcatcctgcccagctacgacatggagtaccagattgtgttcgagggagtgatagggaaaggacgttccggagagattgccattgatgacattcggataagcactgatgtcccactggagaactgcatggaacccatctcggcttttgcagggggcaccctcctgccagggaccgagcccacagtggacacggtgcccatgcagcccatcccagcctactggtattacgtaatggccgccgggggcgccgtgctggtgctggtctccgtcgcgctggccctggtgctccactaccaccggttccgctatgcggccaagaagaccgatcactccatcacctacaaaacctcccactacaccaacggggcccctctggcggtggagcccaccctaaccattaagctagagcaagaccgtggctcgcactgctgagggccgaagcaagaacagcacccaaaacaaacgagaaagactgcaaacatgttgcctcgattttgcacttttttctcctcgcctagtttctgtgtgaactctcagacatctctttcccggatccccaaccctgagcactcttatcaatcccaaccatcctccttgggttcattttggtttctggtttttctttttcctttttgttgattccaaaccaacaaacccaactctaatgctgcatcttggactatccgaagagatccacccccaagcactccacaactcaaggctcagctggttttgttccagagactggttcgcttgttttttccccttgccttatcccatacctcctctcagtgggcagtctgccaggagacgtgaggggaagcctggatctgtgtgtatgtacatagtagacatgtgtgtgtgtgaatagctctctgtgtgtgggtgtgtgagagagcggctggttcattgtgtgtgtgtttgggcgaggggtgagtgttcagagagggcccctttaactcttatgttacttctcctggggtacattttacaagaaaataatatactgtacaagttttgtttacttggagaagagattgaagctttttgttgccttatctagctctggctgggtttctgttggctgtcattgtcatctccaggtacctaaagaaatagaggccacatgggatgcagtgtggcttctcccatccctatccccaacccacctgacccaagagaaggttcccctagcacactcaaacaagacccccttgtcttctggtgtctttgaaatgtcaagataacagccactgggtgtctgcggaaccacctctccagccctaaagcaaatctgtctcatgttgccttataaaagagaagctcataatgaatgtttagcctttatcagttacatccaatcttggaataagtcatagagaataacaagtctgggactgacgtaggaaaaacagtagtctgtttaagttgagaggaggaggaggtggacgagagaagggaggagagggaagaactgaaatgtctcctcacccagggtggttattgggcccaacttgggatggggttgagtacgaaggttaaaaaacatatactttggtattatattggtcattgtaatagcagttgtaaaatatggggggaaaagggatcatttgctttcctttcatggtgttaatgtgtgcctgaatctatagccgctaaaatgtaaggctgtccacctgacttatttaaatattatcagagaatagaaagtaatcactttttaagtgtacctatgtgctgccccttaaaacattc

SEQ ID NO: 406268 - DNA, 3572 bp, Homo sapiens
gggagccggaggggaggcagagatcgcgagcgaggcaccagcctgcagccggcccccagcacatcctcagccgcacagacactcggcgaggtggaggtgagggcgggcgccagcgaactcggagaggggctcgctcactcccaggcgatcccagccgccaccgccgccgcaccagcagcagcaacagcagcagcagcttccttcctcagactcccctcgagaggctggccaagcgggtgtagccgttgggggaggctcccgccgggggaacccggcgaggacaagagcagggcggccgccttccactcgggctgtccggcggcggctgcctccgcccgcgtgtccgtcaagggtgccgcgggatgtgtgtcagtttacgcctctgagatcacacagctgcctgggggccgtgtgatgcccaaggcaagtcttggttttaattattattattatcattattgttacgcttggctttcgggaaatactcgtgatatttgtaggataaaggaaatgacactttgaggaactggagagaacatatatgcgttttgtttttaagaggaaaaccgtgttctcttcccggcttgttccctctttgctgatttcaggagctactctcctcctggtgaggtggaaattccagcaagaatagaggtgaagacaagccaccaggactcaggagggaaacgctgaccattagaaacctctgcataagacgttgtaaggaggaaaataaaagagagaaaaacacaaagatttaaacaagaaacctacgaacccagctctggaaagagccaccttctccaaaatggatatgtttcctctcacctgggttttcttagccctctacttttcaagacaccaagtgagaggccaaccagacccaccgtgcggaggtcgtttgaattccaaagatgctggctatatcacctctcccggttacccccaggactacccctcccaccagaactgcgagtggattgtttacgcccccgaacccaaccagaagattgtcctcaacttcaaccctcactttgaaatcgagaagcacgactgcaagtatgactttatcgagattcgggatggggacagtgaatccgcagacctcctgggcaaacactgtgggaacatcgccccgcccaccatcatctcctcgggctccatgctctacatcaagttcacctccgactacgcccggcagggggcaggcttctctctgcgctacgagatcttcaagacaggctctgaagattgctcaaaaaacttcacaagccccaacgggaccatcgaatctcctgggtttcctgagaagtatccacacaacttggactgcacctttaccatcctggccaaacccaagatggagatcatcctgcagttcctgatctttgacctggagcatgaccctttgcaggtgggagagggggactgcaagtacgattggctggacatctgggatggcattccacatgttggccccctgattggcaagtactgtgggaccaaaacaccctctgaacttcgttcatcgacggggatcctctccctgacctttcacacggacatggcggtggccaaggatggcttctctgcgcgttactacctggtccaccaagagccactagagaactttcagtgcaatgttcctctgggcatggagtctggccggattgctaatgaacagatcagtgcctcatctacctactctgatgggaggtggacccctcaacaaagccggctccatggtgatgacaatggctggacccccaacttggattccaacaaggagtatctccaggtggacctgcgctttttaaccatgctcacggccatcgcaacacagggagcgatttccagggaaacacagaatggctactacgtcaaatcctacaagctggaagtcagcactaatggagaggactggatggtgtaccggcatggcaaaaaccacaaggtatttcaagccaacaacgatgcaactgaggtggttctgaacaagctccacgctccactgctgacaaggtttgttagaatccgccctcagacctggcactcaggtatcgccctccggctggagctcttcggctgccgggtcacagatgctccctgctccaacatgctggggatgctctcaggcctcattgcagactcccagatctccgcctcttccacccaggaatacctctggagccccagtgcagcccgcctggtcagcagccgctcgggctggttccctcgaatccctcaggcccagcccggtgaggagtggcttcaggtagatctgggaacacccaagacagtgaaaggtgtcatcatccagggagcccgcggaggagacagtatcactgctgtggaagccagagcatttgtgcgcaagttcaaagtctcctacagcctaaacggcaaggactgggaatacattcaggaccccaggacccagcagccaaagctgttcgaagggaacatgcactatgacacccctgacatccgaaggtttgaccccattccggcacagtatgtgcgggtatacccggagaggtggtcgccggcggggattgggatgcggctggaggtgctgggctgtgactggacagactccaagcccacggtagagacgctgggacccactgtgaagagcgaagagacaaccaccccctaccccaccgaagaggaggccacagagtgtggggagaactgcagctttgaggatgacaaagatttgcagctcccttcgggattcaattgcaacttcgatttcctcgaggagccctgtggttggatgtatgaccatgccaagtggctccggaccacctgggccagcagctccagcccaaacgaccggacgtttccagatgacaggaatttcttgcggctgcagagtgacagccagagagagggccagtatgcccggctcatcagcccccctgtccacctgccccgaagcccggtgtgcatggagttccagtaccaggccacgggcggccgcggggtggcgctgcaggtggtgcgggaagccagccaggagagcaagttgctgtgggtcatccgtgaggaccagggcggcgagtggaagcacgggcggatcatcctgcccagctacgacatggagtaccagattgtgttcgagggagtgatagggaaaggacgttccggagagattgccattgatgacattcggataagcactgatgtcccactggagaactgcatggaacccatctcggcttttgcagattttaaaggtaaaaaaaaattttttttttgcatgctttttccttcccccatgtgatgtgaatttgatggggggaatcaacctccaaatttgtcaaatctcgcaagagaaaagagacgccacaccttcctgccgctagatggcactagcaacacctgtagatgcgggaaggggattgagagcctcactgtctcttgtttaattaaagtttagaaacctattaatagagacaaataggttacagataaacctttcagccttgcattgtccaacggggagcaatgaggctgaaaatgcaggggtggtgagaaaggagagactgtgggaagactgaaccaaa

SEQ ID NO: 406269 - DNA, 1027 bp, Homo sapiens
  misc_feature (929)..(929): n is a, c, g, or t
gggagccggaggggaggcagagatcgcgagcgaggcaccagcctgcagccggcccccagcacatcctcagccgcacagacactcggcgaggtggaggtgagggcgggcgccagcgaactcggagaggggctcgctcactcccaggcgatcccagccgccaccgccgccgcaccagcagcagcaacagcagcagcagcttccttcctcagactcccctcgagaggctggccaagcgggtgtagccgttgggggaggctcccgccgggggaacccggcgaggacaagagcagggcggccgccttccactcgggctgtccggcggcggctgcctccgcccgcgtgtccgtcaagggtgccgcgggatgtgtgtcagtttacgcctctgagatcacacagctgcctgggggccgtgtgatgcccaaggagctactctcctcctggtgaggtggaaattccagcaagaatagaggtgaagacaagccaccaggactcaggagggaaacgctgaccattagaaacctctgcataagacgttgtaaggaggaaaataaaagagagaaaaacacaaagatttaaacaagaaacctacgaacccagctctggaaagagccaccttctccaaaatggatatgtttcctctcacctgggttttcttagccctctacttttcaagacaccaagtgagaggccaaccagacccaccgtgcggaggtcgtttgaattccaaagatgctggctatatcacctctcccggttacccccaggactacccctcccaccagaactgcgagtggattgtttacgcccccgaacccaaccagaagattgtcctcaacttcaaccctcactttgaaatcgagaagcacgactgcaagtaagcaccgtcctgtcccactgtgtatcccatccatgagatgcacacgccctancctgggttaggtctacctgggcaggtagaccagagccgggatgtaggtatggaggattggagttgcggtgtagagatgatggaggcggtcgggaaaat

SEQ ID NO: 406270 - DNA, 411 bp, Homo sapiens
gcctaagtggaacgctccgctttgacagatgtgctgctgggttgggaacaaatattttttaatactcaccttcgcagaacctgtcataacacatacattgagaaactaggatagaagaaagcaatttatcatacttgattatggcctggtggcatatcacctaagattaattgattcccttctactataattttatactcataaagaattgaaataatttcttttaacactttaatagtggttagggcccacccttgatagagtgcactggtagtacgtgctttaaaggaatgaatttgaattatagttacaagtctgtttcctccgaaatcagtttctagtaaatggatttattggtatctgatcaactgaattgataacatgcaatttctgagcagaattctattgtgg

SEQ ID NO: 406271 - DNA, 2185 bp, Homo sapiens
tgctggagataaatggtcgaccccggagggagaggctagtaggggtgttgatgtgaactgattcgcccaagccttgggccgcaaaactgcgaaagaaagcggcaggcagcctctgcatttcccagaagtgcagctggggaactttcccagaccggcccaggggttgctagagggtcagacgtaaaggatccgcctttcctaggcggggtgggccccaggccaccacgtgaagcgtcctcgcccctcagagcccggagcaggccgggctcaagaaagaggaaagttgaggacgccccacctcggagaggcggcgcccctgagtaggccaggagcctctcttgcaacttctgccaccgcgggccaccgcggccgcctgatcccgcagaggaaggtcgcggccgtggagcgatgacccgcggcggtccgggcgggcgcccggggctgccacagccgccgccgcttctgctgctgctgctgctgccgctgttgttagtcaccgcggagccgccgaaacctgcaggagtctactatgcaactgcatactggatgcctgctgaaaagacagtacaagtcaaaaatgtaatggacaagaatggggacgcctatggcttttacaataactctgtgaaaaccacaggctggggcatcctggagatcagagctggctatggctctcaaaccctgagcaatgagatcatcatgtttgtggctggctttttggagggttacctcactgccccacacatgaatgaccactacacaaacctctacccacagctgatcacgaaaccttccatcatggataaagtgcaggattttatggagaagcaagataagtggacccggaaaaatatcaaagaatacaagactgattcattttggagacatacaggctatgtgatggcacaaatagatggcctctatgtaggagcaaagaagagggctatattagaagggacaaagccaatgaccctgttccagattcagttcctgaatagtgttggagatctattggatctgattccctcactctctcccacaaaaaacggcagcctaaaggtttttaagagatgggacatgggacattgctccgctcttatcaaggttcttcctggatttgagaacatcctttttgctcactcaagctggtacacgtatgcagccatgctcaggatatataaacactgggacttcaacatcatagataaagataccagcagtagtcgcctctctttcagcagttacccagggtttttggagtctctggatgatttttacattcttagcagtggattgatattgctgcagaccacaaacagtgtgtttaataaaaccctgctaaagcaggtaatacccgagactctcctgtcctggcaaagagtccgtgtggccaatatgatggcagatagtggcaagaggtgggcagacatcttttcaaaatacaactctggcacctataacaatcaatacatggttctggacctgaagaaagtaaagctgaaccacagtcttgacaaaggcactctgtacattgtggagcaaattcctacatatgtagaatattctgaacaaactgatgttctacggaaaggatattggccctcctacaatgttcctttccatgaaaaaatctacaactggagtggctatccactgttagttcagaagctgggcttggactactcttatgatttagctccacgagccaaaattttccggcgtgaccaagggaaagtgactgatacggcatccatgaaatatatcatgcgatacaacaattataagaaggatccttacagtagaggtgacccctgtaataccatctgctgccgtgaggacctgaactcacctaacccaagtcctggaggttgttatgacacaaaggtggcagatatctacctagcatctcagtacacatcctatgccataagtggtcccacagtacaaggtggcctccctgtttttcgctgggaccgtttcaacaaaactctacatcagggcatggcagaggtctacaactttgattttattaccatgaaaccaattttgaaacttgatataaaatgaaggagggagatgacggactagaagactgtaaataagataccaaaggcactattttagctatgtttttcccatcagaattatgcaataaaatatattaatttgtcactttcatttccca

SEQ ID NO: 406272 - DNA, 513 bp, Homo sapiens
tggtttttaattttaatttttatttttcttcagaggttgcaatgagctgagattgtgccactgtactccagtctgggcaacaagagcgaaactccgactcaaaaaaaaagctaatattgtgactttggtagtgggagagtggggaaggccatggatttaattttttgctgaacgatgattttctaaaatgtcctcctcctccctctttccaggtggcagatatctacctagcatctcagtacacatcctatgccataagtggtcccacagtacaaggtggcctccctgtttttcgctgggaccgtttcaacaaaactctacatcagggcatggcagaggtctacaactttgattttattaccatgaaaccaattttgaaacttgatataaaatgaaggagggagatgacggactagaagactgtaaataagataccaaaggcactattttagctatgtttttcccatcagaattatgcaataaaatatattaatttgtcactttcatttccca

SEQ ID NO: 406273 - DNA, 468 bp, Homo sapiens
tgggactacaggcgcccgccaccacgcccaactaatttttgtattttcagtagagacagggttttgctgtgttggccaggctggtctcaaacccctcacctcgggagatccacccgcgttggcctcccaaagtgctgggattacaggcgtgagccaccatgcacagcctgcaagggaataatttaatgggtccctaacaagaggaaaacaggaaatgatgtctgtcacaaaacgatgttaagtgcagtctttgtcctttcctagccaatgaccctgttccagattcagttcctgaatagtgttggagatctattggatctgattccctcactctctcccacaaaaaacggcagcctaaaggtttttaagagatgggacatgggacattgctccgctcttatcaaggtaagacatagcagctccttttgccttgttctggttcatacagactttttctatatagcgccc

SEQ ID NO: 406274 - DNA, 396 bp, Homo sapiens
gggggaaaggcagaaattaagcaataaagtcattttccctggagggacatgagagggaagaaaggccatgaggcatcagagcaggggacagtgtcccacagcctggagtccagccccactctctacctgctgggtgcaagggcaaagcactgcacccagaaactcggtttcctcatgtgcaaaatgaggaaaatacatctatctcatagggttgtaatgacaatacctgcaaagcacctgtctcaataaactggctgttttaaaaagtgatgcttggccgggcgcgctggctcacccctgtaataccatctgctgccgtgaggacctgaactcacctaacccaagtcctggaggttgttatgacacaaaggtaacatgctattggcttttgaattt

SEQ ID NO: 406275 - DNA, 1403 bp, Homo sapiens
cagggtttcaccattttggccaggcttgtctcaaactcctgacctcaagtgatccgcctgccttggcctcccaaagtgctaggatttcgagcgtaagccaccatgcccagctggagtcttccattttgaatgttagaaggaagagtctgtttggggccacattaaaggttaatcttgactccttggccatattttccaataatcagtatagcaataaacacttacctgaaatggcacaatccctgtatgcctcttacacttaagacaattgcagtcagttagctatgtacatctgtgtaatccactatgattctggctgtaggttcttcctggatttgagaacatcctttttgctcactcaagctggtacacgtatgcagccatgctcaggatatataaacactgggacttcaacatcatagataaagataccagcagtagtcgcctctctttcagcagttacccagggtttttggagtctctggatgatttttacattcttagcagtggattgatattgctgcagaccacaaacagtgtgtttaataaaaccctgctaaagcaggtaatacccgagactctcctgtcctggcaaagagtccgtgtggccaatatgatggcagatagtggcaagaggtgggcagacatcttttcaaaatacaactctggcacctataacaatcaatacatggttctggacctgaagaaagtaaagctgaaccacagtcttgacaaaggcactctgtacattgtggagcaaattcctacatatgtagaatattctgaacaaactgatgttctacggaaaggatattggccctcctacaatgttcctttccatgaaaaaatctacaactggagtggctatccactgttagttcagaagctgggcttggactactcttatgatttagctccacgagccaaaattttccggcgtgaccaagggaaagtgactgatacggcatccatgaaatatatcatgcgatacaacaattataagaaggatccttacagtagaggtgacccctgtaataccatctgctgccgtgaggacctgaactcacctaacccaagtcctggaggttgttatgacacaaaggtggcagatatctacctagcatctcagtacacatcctatgccataagtggtcccacagtacaaggtggcctccctgtttttcgctgggaccgtttcaacaaaactctacatcagggcatggcagaggtctacaactttgattttattaccatgaaaccaattttgaaacttgatataaaatgaaggagggagatgacggactagaagactgtaaataagataccaaaggcactattttagctatgtttttcccatcagaattatgcaataaaatatattaatttgtcactttcatttccca

SEQ ID NO: 406276 - DNA, 737 bp, Homo sapiens
attttctgtacattattttgtaattaaatgcctgtgcccattttcaaaataaatgaacatggataacatttcttttgctctctctccttttctgtctccttccctgtcaatccctcccttacttcccttccattccaaatcaggatattggccctcctacaatgttcctttccatgaaaaaatctacaactggagtggctatccactgttagttcagaagctgggcttggactactcttatgatttagctccacgagccaaaattttccggcgtgaccaagggaaagtgactgatacggcatccatgaaatatatcatgcgatacaacaattataagaaggatccttacagtagaggtgacccctgtaataccatctgctgccgtgaggacctgaactcacctaacccaagtcctggaggttgttatgacacaaaggtggcagatatctacctagcatctcagtacacatcctatgccataagtggtcccacagtacaaggtggcctccctgtttttcgctgggaccgtttcaacaaaactctacatcagggcatggcagaggtctacaactttgattttattaccatgaaaccaattttgaaacttgatataaaatgaaggagggagatgacggactagaagactgtaaataagataccaaaggcactattttagctatgtttttcccatcagaattatgcaataaaatatattaatttgtcactttcatttccca

SEQ ID NO: 406277 - DNA, 582 bp, Homo sapiens
gcttcctcctgaaggaacatccttctgtaagccttgcttttcctcctgtaggctggcagaggacagtggagcagccaacacacaaaactaccgtttgtgcatggctaaagaccgtggtgattttatagcatcctgggcatttcacatccatgaaatatatcatgcgatacaacaattataagaaggatccttacagtagaggtgacccctgtaataccatctgctgccgtgaggacctgaactcacctaacccaagtcctggaggttgttatgacacaaaggtggcagatatctacctagcatctcagtacacatcctatgccataagtggtcccacagtacaaggtggcctccctgtttttcgctgggaccgtttcaacaaaactctacatcagggcatggcagaggtctacaactttgattttattaccatgaaaccaattttgaaacttgatataaaatgaaggagggagatgacggactagaagactgtaaataagataccaaaggcactattttagctatgtttttcccatcagaattatgcaataaaatatattaatttgtcactttcatttccca

SEQ ID NO: 406278 - DNA, 1965 bp, Homo sapiens
tgctggagataaatggtcgaccccggagggagaggctagtaggggtgttgatgtgaactgattcgcccaagccttgggccgcaaaactgcgaaagaaagcggcaggcagcctctgcatttcccagaagtgcagctggggaactttcccagaccggcccaggggttgctagagggtcagacgtaaaggatccgcctttcctaggcggggtgggccccaggccaccacgtgaagcgtcctcgcccctcagagcccggagcaggccgggctcaagaaagaggaaagttgaggacgccccacctcggagaggcggcgcccctgagtaggccaggagcctctcttgcaacttctgccaccgcgggccaccgcggccgcctgatcccgcagaggaaggtcgcggccgtggagcgatgacccgcggcggtccgggcgggcgcccggggctgccacagccgccgccgcttctgctgctgctgctgctgccgctgttgttagtcaccgcggagccgccgaaacctgcagacacatgaatgaccactacacaaacctctacccacagctgatcacgaaaccttccatcatggataaagtgcaggattttatggagaagcaagataagtggacccggaaaaatatcaaagaatacaagactgattcattttggagacatacaggctatgtgatggcacaaatagatggcctctatgtaggagcaaagaagagggctatattagaagggacaaagccaatgaccctgttccagattcagttcctgaatagtgttggagatctattggatctgattccctcactctctcccacaaaaaacggcagcctaaaggtttttaagagatgggacatgggacattgctccgctcttatcaaggttcttcctggatttgagaacatcctttttgctcactcaagctggtacacgtatgcagccatgctcaggatatataaacactgggacttcaacatcatagataaagataccagcagtagtcgcctctctttcagcagttacccagggtttttggagtctctggatgatttttacattcttagcagtggattgatattgctgcagaccacaaacagtgtgtttaataaaaccctgctaaagcaggtaatacccgagactctcctgtcctggcaaagagtccgtgtggccaatatgatggcagatagtggcaagaggtgggcagacatcttttcaaaatacaactctggcacctataacaatcaatacatggttctggacctgaagaaagtaaagctgaaccacagtcttgacaaaggcactctgtacattgtggagcaaattcctacatatgtagaatattctgaacaaactgatgttctacggaaaggatattggccctcctacaatgttcctttccatgaaaaaatctacaactggagtggctatccactgttagttcagaagctgggcttggactactcttatgatttagctccacgagccaaaattttccggcgtgaccaagggaaagtgactgatacggcatccatgaaatatatcatgcgatacaacaattataagaaggatccttacagtagaggtgacccctgtaataccatctgctgccgtgaggacctgaactcacctaacccaagtcctggaggttgttatgacacaaaggtggcagatatctacctagcatctcagtacacatcctatgccataagtggtcccacagtacaaggtggcctccctgtttttcgctgggaccgtttcaacaaaactctacatcagggcatggcagaggtctacaactttgattttattaccatgaaaccaattttgaaacttgatataaaatgaaggagggagatgacggactagaagactgtaaataagataccaaaggcactattttagctatgtttttcccatcagaattatgcaataaaatatattaatttgtcactttcatttccca

SEQ ID NO: 406279 - DNA, 829 bp, Homo sapiens
ggatcccccatctggagtgccagtgtccgtgtggccaatatgatggcagatagtggcaagaggtgggcagacatcttttcaaaatacaactctggcacctataacaatcaatacatggttctggacctgaagaaagtaaagctgaaccacagtcttgacaaaggcactctgtacattgtggagcaaattcctacatatgtagaatattctgaacaaactgatgttctacggaaaggatattggccctcctacaatgttcctttccatgaaaaaatctacaactggagtggctatccactgttagttcagaagctgggcttggactactcttatgatttagctccacgagccaaaattttccggcgtgaccaagggaaagtgactgatacggcatccatgaaatatatcatgcgatacaacaattataagaaggatccttacagtagaggtgacccctgtaataccatctgctgccgtgaggacctgaactcacctaacccaagtcctggaggttgttatgacacaaaggtggcagatatctacctagcatctcagtacacatcctatgccataagtggtcccacagtacaaggtggcctccctgtttttcgctgggaccgtttcaacaaaactctacatcagggcatggcagaggtctacaactttgattttattaccatgaaaccaattttgaaacttgatataaaatgaaggagggagatgacggactagaagactgtaaataagataccaaaggcactattttagctatgtttttcccatcagaattatgcaataaaatatattaatttgtcactttcatttccca

SEQ ID NO: 406280 - DNA, 1004 bp, Homo sapiens
tgctggagataaatggtcgaccccggagggagaggctagtaggggtgttgatgtgaactgattcgcccaagccttgggccgcaaaactgcgaaagaaagcggcaggcagcctctgcatttcccagaagtgcagctggggaactttcccagaccggcccaggggttgctagagggtcagacgtaaaggatccgcctttcctaggcggggtgggccccaggccaccacgtgaagcgtcctcgcccctcagagcccggagcaggccgggctcaagaaagaggaaagttgaggacgccccacctcggagaggcggcgcccctgagtaggccaggagcctctcttgcaacttctgccaccgcgggccaccgcggccgcctgatcccgcagaggaaggtcgcggccgtggagcgatgacccgcggcggtccgggcgggcgcccggggctgccacagccgccgccgcttctgctgctgctgctgctgccgctgttgttagtcaccgcggagccgccgaaacctgcaggagtctactatgcaactgcatactggatgcctgctgaaaagacagtacaagtcaaaaatgtaatggacaagaatggggacgcctatggcttttacaataactctgtgaaaaccacaggctggggcatcctggagatcagagctggctatggctctcaaaccctgagcaatgagatcatcatgtttgtggctggctttttggagggttacctcactgccccacacatgaatgaccactacacaaacctctacccacagctgatcacgaaaccttccatcatggataaagtgcaggattttatggagaagcaagataagtggacccggaaaaatatcaaagaatacaagactgattcattttggagacatacaggctatgtgatggcacaaatagatggcctctatgtaggagcaaagaagagggctatattagaagggacaaaggtaggactttaaacaagcttctcagaatttatagagtatgg

SEQ ID NO: 406281 - DNA, 5190 bp, Homo sapiens
ccagaagttctccagggcttccgcagagcactttttcgctgcctgtgagctgcagcgcgggagagctcgggctcgcgcggaccccagcgcctggcaggctgacagcgctctctcgccccaggtgcccgcgcgcgtggtgagcagctgcaccaggtggcgtccggggtggggtcaatgaagtgcagcctgaggaagatgtggcgccctggagaaaagaaggagccccagggcgttgtctatgaggatgtgccggacgacacggaggatttcaaggaatcgcttaaggtggtttttgaaggaagtgcatatggattacaaaactttaataagcaaaagaaattaaaaacatgtgacgatatggacaccttcttcttgcattatgctgcagcagaaggccaaattgagctaatggagaagatcaccagagattcctctttggaagtgctgcatgaaatggatgattatggaaatacccctctgcattgtgctgtagaaaaaaaccaaattgaaagcgttaagtttcttctcagcagaggagcaaacccaaacctccgaaacttcaacatgatggctcctctccacatagctgtgcagggcatgaataatgaggtgatgaaggtcttgcttgagcatagaactattgatgttaatttggaaggagaaaatggaaacacagctgtgatcattgcgtgcaccacaaataatagcgaagcattgcagattttgcttaacaaaggagctaagccatgtaaatcaaataaatggggatgtttccctattcaccaagctgcattttcaggttccaaagaatgcatggaaataatactaaggtttggtgaagagcatgggtacagtagacagttgcacattaactttatgaataatgggaaagccacccctctccacctggctgtgcaaaatggtgacttggaaatgatcaaaatgtgcctggacaatggtgcacaaatagacccagtggagaagggaaggtgcacagccattcattttgctgccacccagggagccactgagattgttaaactgatgatatcgtcctattctggtagcgtggatattgttaacacaaccgatggatgtcatgagaccatgcttcacagagcttcattgtttgatcaccatgagctagcagactatttaatttcagtgggagcagatattaataagatcgattctgaaggacgctctccacttatattagcaactgcttctgcatcttggaatattgtaaatttgctactctctaaaggtgcccaagtagacataaaagataattttggacgtaattttctgcatttaactgtacagcaaccttatggattaaaaaatctgcgacctgaatttatgcagatgcaacagatcaaagagctggtaatggatgaagacaacgatgggtgtactcctctacattatgcatgtagacaggggggccctggttctgtaaataacctacttggctttaatgtgtccattcattccaaaagcaaagataagaaatcacctctgcattttgcagccagttatgggcgtatcaatacctgtcagaggctcctacaagacataagtgatacgaggcttctgaatgaaggtgaccttcatggaatgactcctctccatctggcagcaaagaatggacatgataaagtagttcagcttcttctgaaaaaaggtgcattgtttctcagtgaccacaatggctggacagctttgcatcatgcgtccatgggcgggtacactcagaccatgaaggtcattcttgatactaatttgaagtgcacagatcgcttggatgaagacgggaacactgcacttcactttgctgcaagggaaggccacgccaaagccgttgcgcttcttctgagccacaatgctgacatagtcctgaacaagcagcaggcctcctttttgcaccttgcacttcacaataagaggaaggaggttgttcttacgatcatcaggagcaaaagatgggatgaatgtcttaagattttcagtcataattctccaggcaataaatgtccaattacagaaatgatagaatacctccctgaatgcatgaaggtacttttagatttctgcatgttgcattccacagaagacaagtcctgccgagactattatatcgagtataatttcaaatatcttcaatgtccattagaattcaccaaaaaaacacctacacaggatgttatatatgaaccgcttacagccctcaacgcaatggtacaaaataaccgcatagagcttctcaatcatcctgtgtgtaaagaatatttactcatgaaatggttggcttatggatttagagctcatatgatgaatttaggatcttactgtcttggtctcatacctatgaccattctcgttgtcaatataaaaccaggaatggctttcaactcaactggcatcatcaatgaaactagtgatcattcagaaatactagataccacgaattcatatctaataaaaacttgtatgattttagtgtttttatcaagtatatttgggtattgcaaagaagcggggcaaattttccaacagaaaaggaattattttatggatataagcaatgttcttgaatggattatctacacgacgggcatcatttttgtgctgcccttgtttgttgaaataccagctcatctgcagtggcaatgtggagcaattgctgtttacttctattggatgaatttcttattgtatcttcaaagatttgaaaattgtggaatttttattgttatgttggaggtaattttgaaaactttgttgaggtctacagttgtatttatcttccttcttctggcttttggactcagcttttacatcctcctgaatttacaggatcccttcagctctccattgctttctataatccagaccttcagcatgatgctaggagatatcaattatcgagagtccttcctagaaccatatctgagaaatgaattggcacatccagttctgtcctttgcacaacttgtttccttcacaatatttgtcccaattgtcctcatgaatttacttattggtttggcagttggcgacattgctgaggtccagaaacatgcatcattgaagaggatagctatgcaggtggaacttcataccagcttagagaagaagctgccactttggtttctacgcaaagtggatcagaaatccaccatcgtgtatcccaacaaacccagatctggtgggatgttattccatatattctgttttttattttgcactggggaaataagacaagaaataccaaatgctgataaatctttagaaatggaaatattaaagcagaaataccggctgaaggatcttacttttctcctggaaaaacagcatgagctcattaaactgatcattcagaagatggagatcatctctgagacagaggatgatgatagccattgttcttttcaagacaggtttaagaaagagcagatggaacaaaggaatagcagatggaatactgtgttgagagcagtcaaggcaaaaacacaccatcttgagccttagctcctcagaccttcagtgaggcttctaatggggggtgcatgacttgctggttctaactttcaatttaaaaagagtgaggaagaagcagaatgattgattttactgcgtgtgaaatcatggttcctgcatgctatataaaagtaaaccatcttttatcctctattcatattttctaccaatcactatgtattggggatatctttgcagatatgttcaaattggactggactttgatgagatataatctcattatttgaatgggtagaaaatgaatttgctagaacacacatttttaatgaaaagaagtaataaatgtaactattaagctaaaatgcaaatgtcagtactgaattcctgcttgttaattacataatatgtgatgctctagaaaatagtcacaagtattaataatgccttagatgatagtcttaaatattaggttgaggtctacctaacctaagctgcttcctggaaagcttcatgttgaaagaacctatgggtggcaccatgtggacttttctgtccctactgtgatgaatagccccacccttcttgctgtccccaacacacctgatgtcactttgagccatatagttgaagtacaaattaataggccttatgatatgcacgaattttactatagataatatatgttgtttctggttttgtttgccaatgagcataataaatgtaaaacctatatagtatccctgtgattattgtatgagcctttgtttgagatttgaaaaaaacatggctccatcacatattcccttttttcttttgatgtctactcaaatcatgaattaatcacatacctcatcattaatcttttcaaggtccttctattgttttgtctgattttctccatcatcctgattagcatgtttattccctcactacccccaggagatattcactgtaatgaatatgtctttggctatgtatgtgtccttgtgttatgttgtacagtgttgttttgagtctgttattatttacacagatgttattatgctatagcttctatttctgtttttgcttcttatttctcttataattctcacttatttcctattttttctactcatttctatttgttactcctttttactggacatgatgtttacaagatacaactgtgttactgtattccatctagtacggggcctttggtgtggcttactatttcattgtgtgcacccacccacccaccacactggacttttctagagatggacagcttggttacctccaccttcctgcactcattctcaaacatactgatgttcatacaaaccagcagagtgctgagggacgatatgtactattacaaaaccagacacttttacattcatggtccaacagaacacatggcctagaggcaatgttgcatataccttaatctttgatatgaataatatctttgttctttatatttcttaaaacagaaagggtggaaaatcactatacagaagcaatatccaaagatctcctgatcataaagacaaggggtcttttcagtcttccctctcctcaaaccttgtgtagcattgcacaatatagatctcagtcaacattcactgagtgccaagaatgtgagaaacactgtaccatgcctgtcatgcgaaatatttaaataaacagattgtcttacag

SEQ ID NO: 406282 - DNA, 694 bp, Homo sapiens
cttaagcttctcatttatcattcattttttatttactatacatataaaacataaaataaacctaatgtttacatcccatccattttacctaacagaacatattaacatgaagctgttgggtgttatttgggggtgggaggaaataagaggaggggcagagggaagggccatgatcaaatatatttgaaaaatgctgagttaaaaatgttaagtacattttcctattggcatgatctctcagatcctttaatacagtaatgtacactaatatggtaatgtacactaaatgaagacagagcattcaacttcattcatatttatattactctcaaatcctttaggttatttacaattttggccccaaggaatacatattgacccttgttggaaaatattttcctacagaatagtttgaaaaccatcatattagcataatagcagagttatttgtatgatattaattttttcctatagatgcaacagatcaaagagctggtaatggatgaagacaacgatgggtgtactcctctacattatgcatgtagacaggggggccctggttctgtaaataacctacttggctttaatgtgtccattcattccaaaagcaaagataagaaatcacctctgcattttgcagccaggtaagggtcagtctagcaatgtatgaacatgtcttctttctgtttaatat

SEQ ID NO: 406283 - DNA, 4583 bp, Homo sapiens
gagatggtaaaaatttctgaattttattatacttaaatgaactcaagtacaagaaacaaagttaaaatatgtaagtataataaaatatgtggcataattaaatgatattgtgataagaaagaaaaaacctggaaatgttttacagaggtttttcatttgatatcttaccatagcagtagcaaagagcttattaggctaatgttcaaaaacacatttccttaccataatattgatgccagcaaattggtgctacagctacatgaatgaatgttttgctcagttttttctggtttacaaagaaacaccaagcaactgacctgcaaaggggaccgaagtagacccaggccagacagttgttgcttaattacatcataactgaaatagcaacatggctcttgcaccctaaaacatctgctcactagcactgaaattaaatagtgtcaagaatttttttctgtctaatttgaaaaaagatagctaatatgacaaggctttgttgtatttacatcttgaatttctgtggaaaaggataaacatttttcaaagcaattgagtaagcatttttcagagcacaagagggaagctttttagatttaaactcttagaataataactgacactaagctaagcatcttatagccatgtatcatattactagtagtattaccaataactattgaccacaaagactaacattacttcataaaaaaattttgatacagtgttcattgaaagaataaaacaagatttaaattgatgtgtatcagttcattatagctttaaaaaaattaggtatgacacagacatgctaagcgtacttctcctaccccaaagtgtttggtaatgtgtttatatactttcatattttaaaccactaagtaaaaaacgtgtatgaatcacattagaaataggtcatttaagatcattgagcttggaattagctcatttattataaatgttttataaatatttagttgccagatctcaataatgctttttgttgtcatcagatttacctagaataagccaagtggcatcccatcccgcatttcatctgttaagtgtatgcacacatcttttcttaactctttaccagtgaccacaatggctggacagctttgcatcatgcgtccatgggcgggtacactcagaccatgaaggtcattcttgatactaatttgaagtgcacagatcgcttggatgaagacgggaacactgcacttcactttgctgcaagggaaggccacgccaaagccgttgcgcttcttctgagccacaatgctgacatagtcctgaacaagcagcaggcctcctttttgcaccttgcacttcacaataagaggaaggaggttgttcttacgatcatcaggagcaaaagatgggatgaatgtcttaagattttcagtcataattctccaggcaataaatgtccaattacagaaatgatagaatacctccctgaatgcatgaaggtacttttagatttctgcatgttgcattccacagaagacaagtcctgccgagactattatatcgagtataatttcaaatatcttcaatgtccattagaattcaccaaaaaaacacctacacaggatgttatatatgaaccgcttacagccctcaacgcaatggtacaaaataaccgcatagagcttctcaatcatcctgtgtgtaaagaatatttactcatgaaatggttggcttatggatttagagctcatatgatgaatttaggatcttactgtcttggtctcatacctatgaccattctcgttgtcaatataaaaccaggaatggctttcaactcaactggcatcatcaatgaaactagtgatcattcagaaatactagataccacgaattcatatctaataaaaacttgtatgattttagtgtttttatcaagtatatttgggtattgcaaagaagcggggcaaattttccaacagaaaaggaattattttatggatataagcaatgttcttgaatggattatctacacgacgggcatcatttttgtgctgcccttgtttgttgaaataccagctcatctgcagtggcaatgtggagcaattgctgtttacttctattggatgaatttcttattgtatcttcaaagatttgaaaattgtggaatttttattgttatgttggaggtaattttgaaaactttgttgaggtctacagttgtatttatcttccttcttctggcttttggactcagcttttacatcctcctgaatttacaggatcccttcagctctccattgctttctataatccagaccttcagcatgatgctaggagatatcaattatcgagagtccttcctagaaccatatctgagaaatgaattggcacatccagttctgtcctttgcacaacttgtttccttcacaatatttgtcccaattgtcctcatgaatttacttattggtttggcagttggcgacattgctgaggtccagaaacatgcatcattgaagaggatagctatgcaggtggaacttcataccagcttagagaagaagctgccactttggtttctacgcaaagtggatcagaaatccaccatcgtgtatcccaacaaacccagatctggtgggatgttattccatatattctgttttttattttgcactggggaaataagacaagaaataccaaatgctgataaatctttagaaatggaaatattaaagcagaaataccggctgaaggatcttacttttctcctggaaaaacagcatgagctcattaaactgatcattcagaagatggagatcatctctgagacagaggatgatgatagccattgttcttttcaagacaggtttaagaaagagcagatggaacaaaggaatagcagatggaatactgtgttgagagcagtcaaggcaaaaacacaccatcttgagccttagctcctcagaccttcagtgaggcttctaatggggggtgcatgacttgctggttctaactttcaatttaaaaagagtgaggaagaagcagaatgattgattttactgcgtgtgaaatcatggttcctgcatgctatataaaagtaaaccatcttttatcctctattcatattttctaccaatcactatgtattggggatatctttgcagatatgttcaaattggactggactttgatgagatataatctcattatttgaatgggtagaaaatgaatttgctagaacacacatttttaatgaaaagaagtaataaatgtaactattaagctaaaatgcaaatgtcagtactgaattcctgcttgttaattacataatatgtgatgctctagaaaatagtcacaagtattaataatgccttagatgatagtcttaaatattaggttgaggtctacctaacctaagctgcttcctggaaagcttcatgttgaaagaacctatgggtggcaccatgtggacttttctgtccctactgtgatgaatagccccacccttcttgctgtccccaacacacctgatgtcactttgagccatatagttgaagtacaaattaataggccttatgatatgcacgaattttactatagataatatatgttgtttctggttttgtttgccaatgagcataataaatgtaaaacctatatagtatccctgtgattattgtatgagcctttgtttgagatttgaaaaaaacatggctccatcacatattcccttttttcttttgatgtctactcaaatcatgaattaatcacatacctcatcattaatcttttcaaggtccttctattgttttgtctgattttctccatcatcctgattagcatgtttattccctcactacccccaggagatattcactgtaatgaatatgtctttggctatgtatgtgtccttgtgttatgttgtacagtgttgttttgagtctgttattatttacacagatgttattatgctatagcttctatttctgtttttgcttcttatttctcttataattctcacttatttcctattttttctactcatttctatttgttactcctttttactggacatgatgtttacaagatacaactgtgttactgtattccatctagtacggggcctttggtgtggcttactatttcattgtgtgcacccacccacccaccacactggacttttctagagatggacagcttggttacctccaccttcctgcactcattctcaaacatactgatgttcatacaaaccagcagagtgctgagggacgatatgtactattacaaaaccagacacttttacattcatggtccaacagaacacatggcctagaggcaatgttgcatataccttaatctttgatatgaataatatctttgttctttatatttcttaaaacagaaagggtggaaaatcactatacagaagcaatatccaaagatctcctgatcataaagacaaggggtcttttcagtcttccctctcctcaaaccttgtgtagcattgcacaatatagatctcagtcaacattcactgagtgccaagaatgtgagaaacactgtaccatgcctgtcatgcgaaatatttaaataaacagattgtcttacag

SEQ ID NO: 406284 - DNA, 1961 bp, Homo sapiens
gagatggtaaaaatttctgaattttattatacttaaatgaactcaagtacaagaaacaaagttaaaatatgtaagtataataaaatatgtggcataattaaatgatattgtgataagaaagaaaaaacctggaaatgttttacagaggtttttcatttgatatcttaccatagcagtagcaaagagcttattaggctaatgttcaaaaacacatttccttaccataatattgatgccagcaaattggtgctacagctacatgaatgaatgttttgctcagttttttctggtttacaaagaaacaccaagcaactgacctgcaaaggggaccgaagtagacccaggccagacagttgttgcttaattacatcataactgaaatagcaacatggctcttgcaccctaaaacatctgctcactagcactgaaattaaatagtgtcaagaatttttttctgtctaatttgaaaaaagatagctaatatgacaaggctttgttgtatttacatcttgaatttctgtggaaaaggataaacatttttcaaagcaattgagtaagcatttttcagagcacaagagggaagctttttagatttaaactcttagaataataactgacactaagctaagcatcttatagccatgtatcatattactagtagtattaccaataactattgaccacaaagactaacattacttcataaaaaaattttgatacagtgttcattgaaagaataaaacaagatttaaattgatgtgtatcagttcattatagctttaaaaaaattaggtatgacacagacatgctaagcgtacttctcctaccccaaagtgtttggtaatgtgtttatatactttcatattttaaaccactaagtaaaaaacgtgtatgaatcacattagaaataggtcatttaagatcattgagcttggaattagctcatttattataaatgttttataaatatttagttgccagatctcaataatgctttttgttgtcatcagatttacctagaataagccaagtggcatcccatcccgcatttcatctgttaagtgtatgcacacatcttttcttaactctttaccagtgaccacaatggctggacagctttgcatcatgcgtccatgggcgggtacactcagaccatgaaggtcattcttgatactaatttgaagtgcacagatcgcttggatgaagacgggaacactgcacttcactttgctgcaagggaaggccacgccaaagccgttgcgcttcttctgagccacaatgctgacatagtcctgaacaagcagcaggcctcctttttgcaccttgcacttcacaataagaggaaggaggttgttcttacgatcatcaggagcaaaagatgggatgaatgtcttaagattttcagtcataattctccaggcaataaatgtccaattacagaaatgatagaatacctccctgaatgcatgaaggtacttttagatttctgcatgttgcattccacagaagacaagtcctgccgagactattatatcgagtataatttcaaatatcttcaatgtccattagaattcaccaaaaaaacacctacacaggatgttatatatgaaccgcttacagccctcaacgcaatggtacaaaataaccgcatagagcttctcaatcatcctgtgtgtaaagaatatttactcatgaaatggttggcttatggatttagagctcatatgatgaatttaggatcttactgtcttggtctcatacctatgaccattctcgttgtcaatataaaaccaggaatggctttcaactcaactggcatcatcaatgaaactagtgatcattcagaaatactagataccacggtaatttcaaattttaactttctaaaataaaggattataaaaaatgtattttttcttaagactactaaacccataataaatctgacatatcaggacttt

SEQ ID NO: 406285 - DNA, 2939 bp, Homo sapiens
atttatatagaattattagggttagtggtaaatataatataaataatatttttcggttggcttatggatttagagctcatatgatgaatttaggatcttactgtcttggtctcatacctatgaccattctcgttgtcaatataaaaccaggaatggctttcaactcaactggcatcatcaatgaaactagtgatcattcagaaatactagataccacgaattcatatctaataaaaacttgtatgattttagtgtttttatcaagtatatttgggtattgcaaagaagcggggcaaattttccaacagaaaaggaattattttatggatataagcaatgttcttgaatggattatctacacgacgggcatcatttttgtgctgcccttgtttgttgaaataccagctcatctgcagtggcaatgtggagcaattgctgtttacttctattggatgaatttcttattgtatcttcaaagatttgaaaattgtggaatttttattgttatgttggaggtaattttgaaaactttgttgaggtctacagttgtatttatcttccttcttctggcttttggactcagcttttacatcctcctgaatttacaggatcccttcagctctccattgctttctataatccagaccttcagcatgatgctaggagatatcaattatcgagagtccttcctagaaccatatctgagaaatgaattggcacatccagttctgtcctttgcacaacttgtttccttcacaatatttgtcccaattgtcctcatgaatttacttattggtttggcagttggcgacattgctgaggtccagaaacatgcatcattgaagaggatagctatgcaggtggaacttcataccagcttagagaagaagctgccactttggtttctacgcaaagtggatcagaaatccaccatcgtgtatcccaacaaacccagatctggtgggatgttattccatatattctgttttttattttgcactggggaaataagacaagaaataccaaatgctgataaatctttagaaatggaaatattaaagcagaaataccggctgaaggatcttacttttctcctggaaaaacagcatgagctcattaaactgatcattcagaagatggagatcatctctgagacagaggatgatgatagccattgttcttttcaagacaggtttaagaaagagcagatggaacaaaggaatagcagatggaatactgtgttgagagcagtcaaggcaaaaacacaccatcttgagccttagctcctcagaccttcagtgaggcttctaatggggggtgcatgacttgctggttctaactttcaatttaaaaagagtgaggaagaagcagaatgattgattttactgcgtgtgaaatcatggttcctgcatgctatataaaagtaaaccatcttttatcctctattcatattttctaccaatcactatgtattggggatatctttgcagatatgttcaaattggactggactttgatgagatataatctcattatttgaatgggtagaaaatgaatttgctagaacacacatttttaatgaaaagaagtaataaatgtaactattaagctaaaatgcaaatgtcagtactgaattcctgcttgttaattacataatatgtgatgctctagaaaatagtcacaagtattaataatgccttagatgatagtcttaaatattaggttgaggtctacctaacctaagctgcttcctggaaagcttcatgttgaaagaacctatgggtggcaccatgtggacttttctgtccctactgtgatgaatagccccacccttcttgctgtccccaacacacctgatgtcactttgagccatatagttgaagtacaaattaataggccttatgatatgcacgaattttactatagataatatatgttgtttctggttttgtttgccaatgagcataataaatgtaaaacctatatagtatccctgtgattattgtatgagcctttgtttgagatttgaaaaaaacatggctccatcacatattcccttttttcttttgatgtctactcaaatcatgaattaatcacatacctcatcattaatcttttcaaggtccttctattgttttgtctgattttctccatcatcctgattagcatgtttattccctcactacccccaggagatattcactgtaatgaatatgtctttggctatgtatgtgtccttgtgttatgttgtacagtgttgttttgagtctgttattatttacacagatgttattatgctatagcttctatttctgtttttgcttcttatttctcttataattctcacttatttcctattttttctactcatttctatttgttactcctttttactggacatgatgtttacaagatacaactgtgttactgtattccatctagtacggggcctttggtgtggcttactatttcattgtgtgcacccacccacccaccacactggacttttctagagatggacagcttggttacctccaccttcctgcactcattctcaaacatactgatgttcatacaaaccagcagagtgctgagggacgatatgtactattacaaaaccagacacttttacattcatggtccaacagaacacatggcctagaggcaatgttgcatataccttaatctttgatatgaataatatctttgttctttatatttcttaaaacagaaagggtggaaaatcactatacagaagcaatatccaaagatctcctgatcataaagacaaggggtcttttcagtcttccctctcctcaaaccttgtgtagcattgcacaatatagatctcagtcaacattcactgagtgccaagaatgtgagaaacactgtaccatgcctgtcatgcgaaatatttaaataaacagattgtcttacag

SEQ ID NO: 406286 - DNA, 460 bp, Homo sapiens
gagagctccacattcatgttgttatacggatagaaaggccccaggaattactgaaccaacttgcagtccccaagaagttttcttaagatggagtggactccacagggaaagcccagcaatttgtaggatttccttaggcgtcggattcccataacaccaggttaacagagggctctgggccatctccaacaccgattcataccccggggactctgaagtcaatccaggatggcgtgaggttactccttggtcctaaacttctccccagctggctgcaaagctagaaaaattgtattacggggtgcatgtatataaccatccatagatgctaggtctctatatgtggtaattttttattcttttctatcccagaaaaggaattattttatggatataagcaatgttcttgaatggattatctacacgacgggcatcatttttgtgctgcccttgtttgttg

SEQ ID NO: 406287 - DNA, 132 bp, Homo sapiens
agattgttaaactgatgatatcgtcctattctggtagcgtggatattgttaacacaaccgatggatgtcatgagaccatgcttcacaggcaagtttcctacctatcattctgtatacagatttttcatcttc

SEQ ID NO: 406288 - DNA, 4296 bp, Homo sapiens
cttaagcttctcatttatcattcattttttatttactatacatataaaacataaaataaacctaatgtttacatcccatccattttacctaacagaacatattaacatgaagctgttgggtgttatttgggggtgggaggaaataagaggaggggcagagggaagggccatgatcaaatatatttgaaaaatgctgagttaaaaatgttaagtacattttcctattggcatgatctctcagatcctttaatacagtaatgtacactaatatggtaatgtacactaaatgaagacagagcattcaacttcattcatatttatattactctcaaatcctttaggttatttacaattttggccccaaggaatacatattgacccttgttggaaaatattttcctacagaatagtttgaaaaccatcatattagcataatagcagagttatttgtatgatattaattttttcctatagatgcaacagatcaaagagctggtaatggatgaagacaacgatgggtgtactcctctacattatgcatgtagacaggggggccctggttctgtaaataacctacttggctttaatgtgtccattcattccaaaagcaaagataagaaatcacctctgcattttgcagccagttatgggcgtatcaatacctgtcagaggctcctacaagacataagtgatacgaggcttctgaatgaaggtgaccttcatggaatgactcctctccatctggcagcaaagaatggacatgataaagtagttcagcttcttctgaaaaaaggtgcattgtttctcagtgaccacaatggctggacagctttgcatcatgcgtccatgggcgggtacactcagaccatgaaggtcattcttgatactaatttgaagtgcacagatcgcttggatgaagacgggaacactgcacttcactttgctgcaagggaaggccacgccaaagccgttgcgcttcttctgagccacaatgctgacatagtcctgaacaagcagcaggcctcctttttgcaccttgcacttcacaataagaggaaggaggttgttcttacgatcatcaggagcaaaagatgggatgaatgtcttaagattttcagtcataattctccaggcaataaatgtccaattacagaaatgatagaatacctccctgaatgcatgaaggtacttttagatttctgcatgttgcattccacagaagacaagtcctgccgagactattatatcgagtataatttcaaatatcttcaatgtccattagaattcaccaaaaaaacacctacacaggatgttatatatgaaccgcttacagccctcaacgcaatggtacaaaataaccgcatagagcttctcaatcatcctgtgtgtaaagaatatttactcatgaaatggttggcttatggatttagagctcatatgatgaatttaggatcttactgtcttggtctcatacctatgaccattctcgttgtcaatataaaaccaggaatggctttcaactcaactggcatcatcaatgaaactagtgatcattcagaaatactagataccacgaattcatatctaataaaaacttgtatgattttagtgtttttatcaagtatatttgggtattgcaaagaagcggggcaaattttccaacagaaaaggaattattttatggatataagcaatgttcttgaatggattatctacacgacgggcatcatttttgtgctgcccttgtttgttgaaataccagctcatctgcagtggcaatgtggagcaattgctgtttacttctattggatgaatttcttattgtatcttcaaagatttgaaaattgtggaatttttattgttatgttggaggtaattttgaaaactttgttgaggtctacagttgtatttatcttccttcttctggcttttggactcagcttttacatcctcctgaatttacaggatcccttcagctctccattgctttctataatccagaccttcagcatgatgctaggagatatcaattatcgagagtccttcctagaaccatatctgagaaatgaattggcacatccagttctgtcctttgcacaacttgtttccttcacaatatttgtcccaattgtcctcatgaatttacttattggtttggcagttggcgacattgctgaggtccagaaacatgcatcattgaagaggatagctatgcaggtggaacttcataccagcttagagaagaagctgccactttggtttctacgcaaagtggatcagaaatccaccatcgtgtatcccaacaaacccagatctggtgggatgttattccatatattctgttttttattttgcactggggaaataagacaagaaataccaaatgctgataaatctttagaaatggaaatattaaagcagaaataccggctgaaggatcttacttttctcctggaaaaacagcatgagctcattaaactgatcattcagaagatggagatcatctctgagacagaggatgatgatagccattgttcttttcaagacaggtttaagaaagagcagatggaacaaaggaatagcagatggaatactgtgttgagagcagtcaaggcaaaaacacaccatcttgagccttagctcctcagaccttcagtgaggcttctaatggggggtgcatgacttgctggttctaactttcaatttaaaaagagtgaggaagaagcagaatgattgattttactgcgtgtgaaatcatggttcctgcatgctatataaaagtaaaccatcttttatcctctattcatattttctaccaatcactatgtattggggatatctttgcagatatgttcaaattggactggactttgatgagatataatctcattatttgaatgggtagaaaatgaatttgctagaacacacatttttaatgaaaagaagtaataaatgtaactattaagctaaaatgcaaatgtcagtactgaattcctgcttgttaattacataatatgtgatgctctagaaaatagtcacaagtattaataatgccttagatgatagtcttaaatattaggttgaggtctacctaacctaagctgcttcctggaaagcttcatgttgaaagaacctatgggtggcaccatgtggacttttctgtccctactgtgatgaatagccccacccttcttgctgtccccaacacacctgatgtcactttgagccatatagttgaagtacaaattaataggccttatgatatgcacgaattttactatagataatatatgttgtttctggttttgtttgccaatgagcataataaatgtaaaacctatatagtatccctgtgattattgtatgagcctttgtttgagatttgaaaaaaacatggctccatcacatattcccttttttcttttgatgtctactcaaatcatgaattaatcacatacctcatcattaatcttttcaaggtccttctattgttttgtctgattttctccatcatcctgattagcatgtttattccctcactacccccaggagatattcactgtaatgaatatgtctttggctatgtatgtgtccttgtgttatgttgtacagtgttgttttgagtctgttattatttacacagatgttattatgctatagcttctatttctgtttttgcttcttatttctcttataattctcacttatttcctattttttctactcatttctatttgttactcctttttactggacatgatgtttacaagatacaactgtgttactgtattccatctagtacggggcctttggtgtggcttactatttcattgtgtgcacccacccacccaccacactggacttttctagagatggacagcttggttacctccaccttcctgcactcattctcaaacatactgatgttcatacaaaccagcagagtgctgagggacgatatgtactattacaaaaccagacacttttacattcatggtccaacagaacacatggcctagaggcaatgttgcatataccttaatctttgatatgaataatatctttgttctttatatttcttaaaacagaaagggtggaaaatcactatacagaagcaatatccaaagatctcctgatcataaagacaaggggtcttttcagtcttccctctcctcaaaccttgtgtagcattgcacaatatagatctcagtcaacattcactgagtgccaagaatgtgagaaacactgtaccatgcctgtcatgcgaaatatttaaataaacagattgtcttacag

SEQ ID NO: 406289 - DNA, 2593 bp, Homo sapiens
taggatccccgcacgctatccggtcaatttttatgtcccatccaaaatgtatgtattagaaacctaatcaccaagaagatggcattagaaggtggggcctttgggaggtgattaggccatgaggggagagccctcatgaatggaattagttcccttataaaagagctatgagggagcttattagctcctttgcctttctgccatatgggaacacatagaaggtgccacctatgaggaatgggttcttaccagaaaccagttctgcccgagtctttattttggacttcccagcctgcagaaccataagcaattaacttatgctatttatacactacccagactaaaatattttgtcacagcagtctgaatggactaagacagaccttacatgcatttttaggtggaccattcaactgtagtgatttaattttgtgtcataattcagattggtttggcagttggcgacattgctgaggtccagaaacatgcatcattgaagaggatagctatgcaggtggaacttcataccagcttagagaagaagctgccactttggtttctacgcaaagtggatcagaaatccaccatcgtgtatcccaacaaacccagatctggtgggatgttattccatatattctgttttttattttgcactggggaaataagacaagaaataccaaatgctgataaatctttagaaatggaaatattaaagcagaaataccggctgaaggatcttacttttctcctggaaaaacagcatgagctcattaaactgatcattcagaagatggagatcatctctgagacagaggatgatgatagccattgttcttttcaagacaggtttaagaaagagcagatggaacaaaggaatagcagatggaatactgtgttgagagcagtcaaggcaaaaacacaccatcttgagccttagctcctcagaccttcagtgaggcttctaatggggggtgcatgacttgctggttctaactttcaatttaaaaagagtgaggaagaagcagaatgattgattttactgcgtgtgaaatcatggttcctgcatgctatataaaagtaaaccatcttttatcctctattcatattttctaccaatcactatgtattggggatatctttgcagatatgttcaaattggactggactttgatgagatataatctcattatttgaatgggtagaaaatgaatttgctagaacacacatttttaatgaaaagaagtaataaatgtaactattaagctaaaatgcaaatgtcagtactgaattcctgcttgttaattacataatatgtgatgctctagaaaatagtcacaagtattaataatgccttagatgatagtcttaaatattaggttgaggtctacctaacctaagctgcttcctggaaagcttcatgttgaaagaacctatgggtggcaccatgtggacttttctgtccctactgtgatgaatagccccacccttcttgctgtccccaacacacctgatgtcactttgagccatatagttgaagtacaaattaataggccttatgatatgcacgaattttactatagataatatatgttgtttctggttttgtttgccaatgagcataataaatgtaaaacctatatagtatccctgtgattattgtatgagcctttgtttgagatttgaaaaaaacatggctccatcacatattcccttttttcttttgatgtctactcaaatcatgaattaatcacatacctcatcattaatcttttcaaggtccttctattgttttgtctgattttctccatcatcctgattagcatgtttattccctcactacccccaggagatattcactgtaatgaatatgtctttggctatgtatgtgtccttgtgttatgttgtacagtgttgttttgagtctgttattatttacacagatgttattatgctatagcttctatttctgtttttgcttcttatttctcttataattctcacttatttcctattttttctactcatttctatttgttactcctttttactggacatgatgtttacaagatacaactgtgttactgtattccatctagtacggggcctttggtgtggcttactatttcattgtgtgcacccacccacccaccacactggacttttctagagatggacagcttggttacctccaccttcctgcactcattctcaaacatactgatgttcatacaaaccagcagagtgctgagggacgatatgtactattacaaaaccagacacttttacattcatggtccaacagaacacatggcctagaggcaatgttgcatataccttaatctttgatatgaataatatctttgttctttatatttcttaaaacagaaagggtggaaaatcactatacagaagcaatatccaaagatctcctgatcataaagacaaggggtcttttcagtcttccctctcctcaaaccttgtgtagcattgcacaatatagatctcagtcaacattcactgagtgccaagaatgtgagaaacactgtaccatgcctgtcatgcgaaatatttaaataaacagattgtcttacag

SEQ ID NO: 406290 - DNA, 1825 bp, Homo sapiens
tttaagaaaaatatatttgaattctacatttatggataattcagttagtatatagtatgtgacagttgaatttgtgctgtatacattgtcattgacttaaaaattaacttttactctaatgtgtagtatgccatttttatttttcaaatatgaataagaatatcattatataaataatataaatattgctaatatatgaaaaaaataaacactcattgtctttcatcctagtacaaggattaataccatcgtaggatattttcatcctggcttttttttcaaagttataatcctaataggcatgtaaagttagtatactacttctgcttaatgttatctcattgcgtatttatagttgtctgttactgtagtcatcataatcttcagctaaagtttatgatagattcactggagcgatgtaacatctccttaaaattccctgtgattgaatagtttggtcatttccaatttttttatgtacaaacaaaatggatttccctaagtggattttccaacaaaggacccacagctggagtatataaaagacttgtacaaatcagtaataaaaagacagaacctaatacaaaaaatagcaatgttggcaagcagcttaattaggtactttgcaaaacggcttgccaagtggcaaataggaatatgaaaagatgcccaacagcacattactcaatgataattaaatgagaattaaaacaacaaaatgaaatatgactgcatacccactataattgcaaacattaaaaaacaagaaaatgcccattatcgtaagtatgtagtgaaacaggatttattttatactgcaggaatgatgtaaatgggatgccactattctagaaaccgtttggttttttgtacgtagttgaacgtatggacatgaactgtactccagccattccatttctatttatatacccattagaaatgtatgaccatgcatactaaatgacatgtacaagaatttttatggcagcattatttataatagccaccaaaccagaaatcacctaagtgttccatcaatagtattcatgcaacaaaatactatatagcaatgaaattgatccaactatacccatatgtagcaacatggataaataaggttttttttgtacccaattgatagttattttaacagctggttatgtgagtgtggataaatttgtactgcagttaaaattactttttttttggtaaatacatttctatcttctatcactgatgcttttcaaatttgtaataataggatttacttaaatccattgtttcaagaatgaaaaaggcagtagaagatgatgtttttattcctctgtatccaaagagtgctgtagaaaacaaaacatcacctcattcaaagttccaagaaagacagttctggtcaggcctaaagctcttccgcaatattcttctttggaatggactccttacagatgacaccttgcaagaactaggactagggaagctgctaaatcgttaccttattatagcacttctcaatgccacacctgggccagatgtggttaaaaagtgcaaccaggtagcagcatgtctaccagaaaaatggtttgaaaattctgccatgaggacatctattccacagctagaaaacttcattcagtttttattgcagtctgcacataaattatctagaagtgaattcagggatgaagtcgaagaaataattcttattttggtgaaaataaaagctttgaatcaagcagaatccttcataggagagcatcacctagaccatcttaaatcactaattaaagaagattgaataaactttattggaaaatgctaaaatttt

SEQ ID NO: 406291 - DNA, 467 bp, Homo sapiens
tacatggagtttggaaagaatcaagtatttattcagagatattgtattctaaaattgacagttccaacagggctaattgtagtgagaattttagtttgaccaactcttcatgtttgttagagactattacagtttctctttggagaaaaggtacatatttacttgatattttattttagctcttccgcaatattcttctttggaatggactccttacagatgacaccttgcaagaactaggactagggaagctgctaaatcgttaccttattatagcacttctcaatgccacacctgggccagatgtggttaaaaagtgcaaccaggtaagttgtgaaggaagactgattctaattttatcatttctaaaaaatttagctattaaaatctattatttagcaaaataattaaatgtgtggtactcatatatagacaaatgggccaggcacagtggctcatgcctgtaa

SEQ ID NO: 406292 - DNA, 327 bp, Homo sapiens
ctcccgctgcgttcccaacccggcttcattccgtacgacgaggcgaagacctgggtagcagcatgtctaccagaaaaatggtttgaaaattctgccatgaggacatctattccacagctagaaaacttcattcagtttttattgcagtctgcacataaattatctagaagtgaattcagggatgaagtcgaagaaataattcttattttggtgaaaataaaagctttgaatcaagcagaatccttcataggagagcatcacctagaccatcttaaatcactaattaaagaagattgaataaactttattggaaaatgctaaaatttt

SEQ ID NO: 406293 - DNA, 2795 bp, Homo sapiens
gcgggagcgcgccctagggggcgggcactgtgaagctgcggcttgcggttcagcgggttctagggcgccgggcgctcgggcctcggccatggctcacaggccgaaaaggacttttcggcagcgcgcggctgattccagcgacagcgatggcgccgaggagtcgcctgctgagcctggggcgccgagggaacttccggtcccgggttctgcggaggaagagccgccctctggaggaggccgcgcgcaggtggcgggactgccccaccgggttcggggccctcgtggccggggccgggtctgggcgagctcccggcgtgccaccaaagcggctccccgcgcggacgaaggctcagaatccagaacccttgatgtgtccacagatgaagaggataaaatacatcactcctcagaaagtaaggatgatcagggtttgtcttctgacagttctagctctcttggagaaaaagaactttcatcaacagttaagatcccagatgcagcttttattcaggcagcccgcagaaaacgtgaattggccagggcccaagatgactatatttctttggatgtacaacatacctcctccatctctggtatgaagagagagagcgaagatgaccctgagagtgagcctgatgaccatgaaaagagaataccatttactctaagacctcaaacacttagacaaaggatggctgaggaatcaataagcagaaatgaagaaacaagtgaagaaagtcaggaagatgaaaagcaagatacttgggaacaacagcaaatgaggaaagcagttaaaatcatagaggaaagagacatagatctttcctgtggcagtggatcttcaaaagtgaagaaatttgatacttccatttcatttccgccagtaaatttagaaattataaagaagcaattaaatactagattaacattactacaggaaactcaccgctcacacctgagggagtatgaaaaatacgtacaagatgtcaaaagctcaaagagtaccatccagaacctagagagttcatcaaatcaagctctaaattgtaaattctataaaagcatgaaaatttatgtggaaaatttaattgactgccttaatgaaaagattatcaacatccaagaaatagaatcatccatgcatgcactccttttaaaacaagctatgacctttatgaaacgcaggcaagatgaattaaaacatgaatcaacgtatttacaacagttatcacgcaaagatgagacatccacaagtggaaacttctcagtagatgaaaaaactcagtggattttagaagagattgaatctcgaaggacaaaaagaagacaagcaagggtgctttctgggaattgtaaccatcaggaaggaacatctagtgatgatgaactgccttcagcagagatgattgacttccaaaaaagccaaggtgacattttacagaaacagaagaaagtttttgaagaagtgcaagatgatttttgtaacatccagaatattttgttgaaatttcagcaatggcgagaaaagtttcctgactcctattatgaagctttcattagtttatgcataccaaagcttttaaatcccctaatacgagttcagttgattgattggaatcctcttaagttggaatccacaggtttaaaagagatgccatggttcaaatctgtagaagaatttatggatagcagtgtagaagattcaaagaaggaaagtagttcagataaaaaagtcttgtctgcaatcatcaacaaaacaattattccccgacttacagactttgtagaattcctttgggatcctttgtcaacctcacagacaacaagtttaataacacattgcagagtgattcttgaagaacattccacttgtgaaaatgaagttagtaaaagcagacaggatttacttaaatccattgtttcaagaatgaaaaaggcagtagaagatgatgtttttattcctctgtatccaaagagtgctgtagaaaacaaaacatcacctcattcaaagttccaagaaagacagttctggtcaggcctaaagctcttccgcaatattcttctttggaatggactccttacagatgacaccttgcaagaactaggactagggaagctgctaaatcgttaccttattatagcacttctcaatgccacacctgggccagatgtggttaaaaagtgcaaccaggtagcagcatgtctaccagaaaaatggtttgaaaattctgccatgaggacatctattccacagctagaaaacttcattcagtttttattgcagtctgcacataaattatctagaagtgaattcagggatgaagtcgaagaaataattcttattttggtgaaaataaaagctttgaatcaagcagaatccttcataggagagcatcacctagaccatcttaaatcactaattaaagaagattgaataaactttattggaaaatgctaaaattttaatatagttacactcagttcctttgtttgagaagaagctggtgcctctctcttctttattccctgtaatagaaggtaggatttgaaaaaaagcaggactccacctctgtattcccccgtgctttaccttctggcatcatgaaaagctgccatgattctgtggtgttctaaggaattaaatgcactggagctttaagagctcaacgtgtttccctttgattcttttggctggtctttcaattttcttaagaggggaactggagaaaccttgctaaaggttttagcttaagtgagcatgctactaagtcttctgtcctgaaccacaataatat

SEQ ID NO: 406294 - DNA, 2681 bp, Homo sapiens
gcgggagcgcgccctagggggcgggcactgtgaagctgcggcttgcggttcagcgggttctagggcgccgggcgctcgggcctcggccatggctcacaggccgaaaaggacttttcggcagcgcgcggctgattccagcgacagcgatggcgccgaggagtcgcctgctgagcctggggcgccgagggaacttccggtcccgggttctgcggaggaagagccgccctctggaggaggccgcgcgcaggtggcgggactgccccaccgggttcggggccctcgtggccggggccgggtctgggcgagctcccggcgtgccaccaaagcggctccccgcgcggacgaaggctcagaatccagaacccttgatgtgtccacagatgaagaggataaaatacatcactcctcagaaagtaaggatgatcagggtttgtcttctgacagttctagctctcttggagaaaaagaactttcatcaacagttaagatcccagatgcagcttttattcaggcagcccgcagaaaacgtgaattggccagggcccaagatgactatatttctttggatgtacaacatacctcctccatctctgtaagcagaaatgaagaaacaagtgaagaaagtcaggaagatgaaaagcaagatacttgggaacaacagcaaatgaggaaagcagttaaaatcatagaggaaagagacatagatctttcctgtggcagtggatcttcaaaagtgaagaaatttgatacttccatttcatttccgccagtaaatttagaaattataaagaagcaattaaatactagattaacattactacaggaaactcaccgctcacacctgagggagtatgaaaaatacgtacaagatgtcaaaagctcaaagagtaccatccagaacctagagagttcatcaaatcaagctctaaattgtaaattctataaaagcatgaaaatttatgtggaaaatttaattgactgccttaatgaaaagattatcaacatccaagaaatagaatcatccatgcatgcactccttttaaaacaagctatgacctttatgaaacgcaggcaagatgaattaaaacatgaatcaacgtatttacaacagttatcacgcaaagatgagacatccacaagtggaaacttctcagtagatgaaaaaactcagtggattttagaagagattgaatctcgaaggacaaaaagaagacaagcaagggtgctttctgggaattgtaaccatcaggaaggaacatctagtgatgatgaactgccttcagcagagatgattgacttccaaaaaagccaaggtgacattttacagaaacagaagaaagtttttgaagaagtgcaagatgatttttgtaacatccagaatattttgttgaaatttcagcaatggcgagaaaagtttcctgactcctattatgaagctttcattagtttatgcataccaaagcttttaaatcccctaatacgagttcagttgattgattggaatcctcttaagttggaatccacaggtttaaaagagatgccatggttcaaatctgtagaagaatttatggatagcagtgtagaagattcaaagaaggaaagtagttcagataaaaaagtcttgtctgcaatcatcaacaaaacaattattccccgacttacagactttgtagaattcctttgggatcctttgtcaacctcacagacaacaagtttaataacacattgcagagtgattcttgaagaacattccacttgtgaaaatgaagttagtaaaagcagacaggatttacttaaatccattgtttcaagaatgaaaaaggcagtagaagatgatgtttttattcctctgtatccaaagagtgctgtagaaaacaaaacatcacctcattcaaagttccaagaaagacagttctggtcaggcctaaagctcttccgcaatattcttctttggaatggactccttacagatgacaccttgcaagaactaggactagggaagctgctaaatcgttaccttattatagcacttctcaatgccacacctgggccagatgtggttaaaaagtgcaaccaggtagcagcatgtctaccagaaaaatggtttgaaaattctgccatgaggacatctattccacagctagaaaacttcattcagtttttattgcagtctgcacataaattatctagaagtgaattcagggatgaagtcgaagaaataattcttattttggtgaaaataaaagctttgaatcaagcagaatccttcataggagagcatcacctagaccatcttaaatcactaattaaagaagattgaataaactttattggaaaatgctaaaattttaatatagttacactcagttcctttgtttgagaagaagctggtgcctctctcttctttattccctgtaatagaaggtaggatttgaaaaaaagcaggactccacctctgtattcccccgtgctttaccttctggcatcatgaaaagctgccatgattctgtggtgttctaaggaattaaatgcactggagctttaagagctcaacgtgtttccctttgattcttttggctggtctttcaattttcttaagaggggaactggagaaaccttgctaaaggttttagcttaagtgagcatgctactaagtcttctgtcctgaaccacaataatat

SEQ ID NO: 406295 - DNA, 2570 bp, Homo sapiens
gcgggagcgcgccctagggggcgggcactgtgaagctgcggcttgcggttcagcgggttctagggcgccgggcgctcgggcctcggccatggctcacaggccgaaaaggacttttcggcagcgcgcggctgattccagcgacagcgatggcgccgaggagtcgcctgctgagcctggggcgccgagggaacttccggtcccgggttctgcggaggaagagccgccctctggaggaggccgcgcgcaggtggcgggactgccccaccgggttcggggccctcgtggccggggccgggtctgggcgagctcccggcgtgccaccaaagcggctccccgcgcggacgaaggctcagaatccagaacccttgatgtgtccacagatgaagaggataaaatacatcactcctcagaaagtaaggatgatcagggtttgtcttctgacagttctagctctcttggagaaaaagaactttcatcaacagtaagcagaaatgaagaaacaagtgaagaaagtcaggaagatgaaaagcaagatacttgggaacaacagcaaatgaggaaagcagttaaaatcatagaggaaagagacatagatctttcctgtggcagtggatcttcaaaagtgaagaaatttgatacttccatttcatttccgccagtaaatttagaaattataaagaagcaattaaatactagattaacattactacaggaaactcaccgctcacacctgagggagtatgaaaaatacgtacaagatgtcaaaagctcaaagagtaccatccagaacctagagagttcatcaaatcaagctctaaattgtaaattctataaaagcatgaaaatttatgtggaaaatttaattgactgccttaatgaaaagattatcaacatccaagaaatagaatcatccatgcatgcactccttttaaaacaagctatgacctttatgaaacgcaggcaagatgaattaaaacatgaatcaacgtatttacaacagttatcacgcaaagatgagacatccacaagtggaaacttctcagtagatgaaaaaactcagtggattttagaagagattgaatctcgaaggacaaaaagaagacaagcaagggtgctttctgggaattgtaaccatcaggaaggaacatctagtgatgatgaactgccttcagcagagatgattgacttccaaaaaagccaaggtgacattttacagaaacagaagaaagtttttgaagaagtgcaagatgatttttgtaacatccagaatattttgttgaaatttcagcaatggcgagaaaagtttcctgactcctattatgaagctttcattagtttatgcataccaaagcttttaaatcccctaatacgagttcagttgattgattggaatcctcttaagttggaatccacaggtttaaaagagatgccatggttcaaatctgtagaagaatttatggatagcagtgtagaagattcaaagaaggaaagtagttcagataaaaaagtcttgtctgcaatcatcaacaaaacaattattccccgacttacagactttgtagaattcctttgggatcctttgtcaacctcacagacaacaagtttaataacacattgcagagtgattcttgaagaacattccacttgtgaaaatgaagttagtaaaagcagacaggatttacttaaatccattgtttcaagaatgaaaaaggcagtagaagatgatgtttttattcctctgtatccaaagagtgctgtagaaaacaaaacatcacctcattcaaagttccaagaaagacagttctggtcaggcctaaagctcttccgcaatattcttctttggaatggactccttacagatgacaccttgcaagaactaggactagggaagctgctaaatcgttaccttattatagcacttctcaatgccacacctgggccagatgtggttaaaaagtgcaaccaggtagcagcatgtctaccagaaaaatggtttgaaaattctgccatgaggacatctattccacagctagaaaacttcattcagtttttattgcagtctgcacataaattatctagaagtgaattcagggatgaagtcgaagaaataattcttattttggtgaaaataaaagctttgaatcaagcagaatccttcataggagagcatcacctagaccatcttaaatcactaattaaagaagattgaataaactttattggaaaatgctaaaattttaatatagttacactcagttcctttgtttgagaagaagctggtgcctctctcttctttattccctgtaatagaaggtaggatttgaaaaaaagcaggactccacctctgtattcccccgtgctttaccttctggcatcatgaaaagctgccatgattctgtggtgttctaaggaattaaatgcactggagctttaagagctcaacgtgtttccctttgattcttttggctggtctttcaattttcttaagaggggaactggagaaaccttgctaaaggttttagcttaagtgagcatgctactaagtcttctgtcctgaaccacaataatat

SEQ ID NO: 406296 - DNA, 2464 bp, Homo sapiens
gcgggagcgcgccctagggggcgggcactgtgaagctgcggcttgcggttcagcgggttctagggcgccgggcgctcgggcctcggccatggctcacaggccgaaaaggacttttcggcagcgcgcggctgattccagcgacagcgatggcgccgaggagtcgcctgctgagcctggggcgccgagggaacttccggtcccgggttctgcggaggaagagccgccctctggaggaggccgcgcgcaggtggcgggactgccccaccgggttcggggccctcgtggccggggccgggtctgggcgagctcccggcgtgccaccaaagcggctccccgcgcggacgaaggctcagaatccagaacccttgatgtgtccacagatgaagaggataaaatacatcactcctcagaaagtaaggatgatcagggtttgtcttctgacagttctagctctcttggagaaaaagaactttcatcaacagttaagatcccagatgcagcttttattcaggcagcccgcagaaaacgtgaattggccagggcccaagatgactatatttctttggatgtacaacatacctcctccatctctggtatgaagagagagagcgaagatgaccctgagagtgagcctgatgaccatgaaaagagaataccatttactctaagacctcaaacacttagacaaaggatggctgaggaatcaataagcagaaatgaagaaacaagtgaagaaagtcaggaagatgaaaagcaagatacttgggaacaacagcaaatgaggaaagcagttaaaatcatagaggaaagagacatagatctttcctgtggcagtggatcttcaaaagtgaagaaatttgatacttccatttcatttccgccagtaaatttagaaattataaagaagcaattaaatactagattaacattactacaggaaactcaccgctcacacctgagggagtatgaaaaatacgtacaagatgtcaaaagctcaaagagtaccatccagaacctagagagttcatcaaatcaagctctaaattgtaaattctataaaagcatgaaaatttatgtggaaaatttaattgactgccttaatgaaaagattatcaacatccaagaaatagaatcatccatgcatgcactccttttaaaacaagctatgacctttatgaaacgcaggcaagatgaattaaaacatgaatcaacgtatttacaacagttatcacgcaaagatgagacatccacaagtggaaacttctcagtagatgaaaaaactcagtggattttagaagagattgaatctcgaaggacaaaaagaagacaagcaagggtgctttctgggaattgtaaccatcaggaaggaacatctagtgatgatgaactgccttcagcagagatgattgacttccaaaaaagccaaggtgacattttacagaaacagaagaaagtttttgaagaagtgcaagatgatttttgtaacatccagaatattttgttgaaatttcagcaatggcgagaaaagtttcctgactcctattatgaagctttcattagtttatgcataccaaagcttttaaatcccctaatacgagttcagttgattgattggaatcctcttaagttggaatccacaggtttaaaagagatgccatggttcaaatctgtagaagaatttatggatagcagtgtagaagattcaaagaaggaaagtagttcagataaaaaagtcttgtctgcaatcatcaacaaaacaattattccccgacttacagactttgtagaattcctttgggatcctttgtcaacctcacagacaacaagtttaataacacattgcagagtgattcttgaagaacattccacttgtgaaaatgaagttagtaaaagcagacaggatttacttaaatccattgtttcaagaatgaaaaaggcagtagaagatgatgtttttattcctctgtatccaaagagtgctgtagaaaacaaaacatcacctcattcaaagttccaagaaagacagttctggtcaggcctaaagctcttccgcaatattcttctttggaatggactccttacagatgacaccttgcaagaactaggactagggaagctgctaaatcgttaccttattatagcacttctcaatgccacacctgggccagatgtggttaaaaagtgcaaccaggtagcagcatgtctaccagaaaaatggtttgaaaattctgccatgaggacatctattccacagctagaaaacttcattcagtttttattgcagtctgcacataaattatctagaagtgaattcagggatgaagtcgaagaaataattcttattttggtgaaaataaaagctttgaatcaagcagaatccttcataggagagcatcacctagaccatcttaaatcactaattaaagaagattgaataaactttattggaaaatgctaaaatttt

SEQ ID NO: 406297 - DNA, 2728 bp, Homo sapiens
gcgggagcgcgccctagggggcgggcactgtgaagctgcggcttgcggttcagcgggttctagggcgccgggcgctcgggcctcggccatggctcacaggccgaaaaggacttttcggcagcgcgcggctgattccagcgacagcgatggcgccgaggagtcgcctgctgagcctggggcgccgagggaacttccggtcccgggttctgcggaggaagagccgccctctggaggaggccgcgcgcaggtggcgggactgccccaccgggttcggggccctcgtggccggggccgggtctgggcgagctcccggcgtgccaccaaagcggctccccgcgcggacgaaggctcagaatccagaacccttgatgtgtccacagatgaagaggataaaatacatcactcctcagaaagtaaggatgatcagggtttgtcttctgacagttctagctctcttggagaaaaagaactttcatcaacagttaagatcccagatgcagcttttattcaggcagcccgcagaaaacgtgaattggccagggcccaagatgactatatttctttggatgtacaacatacctcctccatctctggtatgaagagagagagcgaagatgaccctgagagtgagcctgatgaccatgaaaagagaataccatttactctaagacctcaaacacttagacaaaggatggctgaggaatcaataagcagaaatgaagaaacaagtgaagaaagtcaggaagatgaaaagcaagatacttgggaacaacagcaaatgaggaaagcagttaaaatcatagaggaaagagacatagatctttcctgtggcagtggatcttcaaaagtgaagaaatttgatacttccatttcatttccgccagtaaatttagaaattataaagaagcaattaaatactagattaacattactacaggaaactcaccgctcacacctgagggagtatgaaaaatacgtacaagatgtcaaaagctcaaagagtaccatccagaacctagagagttcatcaaatcaagctctaaattgtaaattctataaaagcatgaaaatttatgtggaaaatttaattgactgccttaatgaaaagattatcaacatccaagaaatagaatcatccatgcatgcactccttttaaaacaagctatgacctttatgaaacgcaggcaagatgaattaaaacatgaatcaacgtatttacaacagttatcacgcaaagatgagacatccacaagtggaaacttctcagtagatgaaaaaactcagtggattttagaagagattgaatctcgaaggacaaaaagaagacaagcaagggtgctttctgggaattgtaaccatcaggaaggaacatctagtgatgatgaactgccttcagcagagatgattgacttccaaaaaagccaaggtgacattttacagaaacagaagaaagtttttgaagaagtgcaagatgatttttgtaacatccagaatattttgttgaaatttcagcaatggcgagaaaagtttcctgactcctattatgaagctttcattagtttatgcataccaaagcttttaaatcccctaatacgagttcagttgattgattggaatcctcttaagttggaatccacaggtttaaaagagatgccatggttcaaatctgtagaagaatttatggatagcagtgtagaagattcaaagaaggaaagtagttcagataaaaaagtcttgtctgcaatcatcaacaaaacaattattccccgacttacagactttgtagaattcctttgggatcctttgtcaacctcacagacaacaagtttaataacacattgcagagtgattcttgaagaacattccacttgtgaaaatgaagttagtaaaagcagacaggatttacttaaatccattgtttcaagaatgaaaaaggcagtagaagatgatgtttttattcctctgtatccaaagagctcttccgcaatattcttctttggaatggactccttacagatgacaccttgcaagaactaggactagggaagctgctaaatcgttaccttattatagcacttctcaatgccacacctgggccagatgtggttaaaaagtgcaaccaggtagcagcatgtctaccagaaaaatggtttgaaaattctgccatgaggacatctattccacagctagaaaacttcattcagtttttattgcagtctgcacataaattatctagaagtgaattcagggatgaagtcgaagaaataattcttattttggtgaaaataaaagctttgaatcaagcagaatccttcataggagagcatcacctagaccatcttaaatcactaattaaagaagattgaataaactttattggaaaatgctaaaattttaatatagttacactcagttcctttgtttgagaagaagctggtgcctctctcttctttattccctgtaatagaaggtaggatttgaaaaaaagcaggactccacctctgtattcccccgtgctttaccttctggcatcatgaaaagctgccatgattctgtggtgttctaaggaattaaatgcactggagctttaagagctcaacgtgtttccctttgattcttttggctggtctttcaattttcttaagaggggaactggagaaaccttgctaaaggttttagcttaagtgagcatgctactaagtcttctgtcctgaaccacaataatat

SEQ ID NO: 406298 - DNA, 2899 bp, Homo sapiens
gcgggagcgcgccctagggggcgggcactgtgaagctgcggcttgcggttcagcgggttctagggcgccgggcgctcgggcctcggccatggctcacaggccgaaaaggacttttcggcagcgcgcggctgattccagcgacagcgatggcgccgaggagtcgcctgctgagcctggggcgccgagggaacttccggtcccgggttctgcggaggaagagccgccctctggaggaggccgcgcgcaggtggcgggactgccccaccgggttcggggccctcgtggccggggccgggtctgggcgagctcccggcgtgccaccaaagcggctccccgcgcggacgaaggctcagaatccagaacccttgatgtgtccacagatgaagaggataaaatacatcactcctcagaaagtaaggatgatcagggtttgtcttctgacagttctagctctcttggagaaaaagaactttcatcaacagttaagatcccagatgcagcttttattcaggcagcccgcagaaaacgtgaattggccagggcccaagatgactatatttctttggatgtacaacatacctcctccatctctggtatgaagagagagagcgaagatgaccctgagagtgagcctgatgaccatgaaaagagaataccatttactctaagacctcaaacacttagacaaaggatggctgaggaatcaataagcagaaatgaagaaacaagtgaagaaagtcaggaagatgaaaagcaagatacttgggaacaacagcaaatgaggaaagcagttaaaatcatagaggaaagagacatagatctttcctgtggcagtggatcttcaaaagtgaagaaatttgatacttccatttcatttccgccagtaaatttagaaattataaagaagcaattaaatactagattaacattactacaggaaactcaccgctcacacctgagggagtatgaaaaatacgtacaagatgtcaaaagctcaaagagtaccatccagaacctagagagttcatcaaatcaagctctaaattgtaaattctataaaagcatgaaaatttatgtggaaaatttaattgactgccttaatgaaaagattatcaacatccaagaaatagaatcatccatgcatgcactccttttaaaacaagctatgacctttatgaaacgcaggcaagatgaattaaaacatgaatcaacgtatttacaacagttatcacgcaaagatgagacatccacaagtggaaacttctcagtagatgaaaaaactcagtggattttagaagagattgaatctcgaaggacaaaaagaagacaagcaagggtgctttctgggaattgtaaccatcaggaaggaacatctagtgatgatgaactgccttcagcagagatgattgacttccaaaaaagccaaggtgacattttacagaaacagaagaaagtttttgaagaagtgcaagatgatttttgtaacatccagaatattttgttgaaatttcagcaatggcgagaaaagtttcctgactcctattatgaagctttcattagtttatgcataccaaagcttttaaatcccctaatacgagttcagttgattgattggaatcctcttaagttggaatccacaggtttaaaagagatgccatggttcaaatctgtagaagaatttatggatagcagtgtagaagattcaaagaaggaaagtagttcagataaaaaagtcttgtctgcaatcatcaacaaaacaattattccccgacttacagactttgtagaattcctttgggatcctttgtcaacctcacagacaacaagtttaataacacattgcagagtgattcttgaagaacattccacttgtgaaaatgaagttagtaaaagcagacaggatttacttaaatccattgtttcaagaatgaaaaaggcagtagaagatgatgtttttattcctctgtatccaaagagtgctgtagaaaacaaaacatcacctcattcaaagttccaagaaagacagttctggtcaggcctaaagctcttccgcaatattcttctttggaatggactccttacagatgacaccttgcaagaactaggactagggaagctgctaaatcgttaccttattatagcacttctcaatgccacacctgggccagatgtggttaaaaagtgcaaccaggtagcagcatgtctaccagaaaaatggtttgaaaattctgccatgaggacatctattccacagctagaaaacttcattcagtttttattgcagtctgcacataaattatctagaagtgaattcaggtaatgcatattttattttcacttctataaagagagttcatggattctgtatgctctcaacaacttttagaaagatttgtatttttactgtacttttaaaaatttgttaaaactttgtagagttagtagatatttttatggttacctttgggatggcttatgcatatccatattttaaaatgtaaatctcccccaaattaagcaaattcaaaaaactatagcacaggggaatatagaattaaaactataaatcaaaaacattttattaagcactttttaaatgtgtttttaattttcctgtccatttttagagactcaacagttgttaagtacaggtctccagcttggtatttatccagcagtagctagctctctgttctgaatgtttcgttcacagcaccagctgtttgggggcttaaatacagtggtattcctgttaactccctctccaaaaaaaatttttaagcccagatttggccgggcatggtggctcacgcctgtaatgttagcactttgggaggctgagccacggcaaccggccagtgaatttatgttttgttttaaacaatttatttggaaatat

SEQ ID NO: 406299 - DNA, 2055 bp, Homo sapiens
agcggctttgtataatctcaaaaaatgttggcttgctgcaattaaaatggaaaaatactaaacgtttacatgtgagctttttttccgctagtaagcagaaatgaagaaacaagtgaagaaagtcaggaagatgaaaagcaagatacttgggaacaacagcaaatgaggaaagcagttaaaatcatagaggaaagagacatagatctttcctgtggcagtggatcttcaaaagtgaagaaatttgatacttccatttcatttccgccagtaaatttagaaattataaagaagcaattaaatactagattaacattactacaggaaactcaccgctcacacctgagggagtatgaaaaatacgtacaagatgtcaaaagctcaaagagtaccatccagaacctagagagttcatcaaatcaagctctaaattgtaaattctataaaagcatgaaaatttatgtggaaaatttaattgactgccttaatgaaaaggcaaagatgagacatccacaagtggaaacttctcagtagatgaaaaaactcagtggattttagaagagattgaatctcgaaggacaaaaagaagacaagcaagggtgctttctgggaattgtaaccatcaggaaggaacatctagtgatgatgaactgccttcagcagagatgattgacttccaaaaaagccaaggtgacattttacagaaacagaagaaagtttttgaagaagtgcaagatgatttttgtaacatccagaatattttgttgaaatttcagcaatggcgagaaaagtttcctgactcctattatgaagctttcattagtttatgcataccaaagcttttaaatcccctaatacgagttcagttgattgattggaatcctcttaagttggaatccacaggtttaaaagagatgccatggttcaaatctgtagaagaatttatggatagcagtgtagaagattcaaagaaggaaagtagttcagataaaaaagtcttgtctgcaatcatcaacaaaacaattattccccgacttacagactttgtagaattcctttgggatcctttgtcaacctcacagacaacaagtttaataacacattgcagagtgattcttgaagaacattccacttgtgaaaatgaagttagtaaaagcagacaggatttacttaaatccattgtttcaagaatgaaaaaggcagtagaagatgatgtttttattcctctgtatccaaagagtgctgtagaaaacaaaacatcacctcattcaaagttccaagaaagacagttctggtcaggcctaaagctcttccgcaatattcttctttggaatggactccttacagatgacaccttgcaagaactaggactagggaagctgctaaatcgttaccttattatagcacttctcaatgccacacctgggccagatgtggttaaaaagtgcaaccaggtagcagcatgtctaccagaaaaatggtttgaaaattctgccatgaggacatctattccacagctagaaaacttcattcagtttttattgcagtctgcacataaattatctagaagtgaattcagggatgaagtcgaagaaataattcttattttggtgaaaataaaagctttgaatcaagcagaatccttcataggagagcatcacctagaccatcttaaatcactaattaaagaagattgaataaactttattggaaaatgctaaaattttaatatagttacactcagttcctttgtttgagaagaagctggtgcctctctcttctttattccctgtaatagaaggtaggatttgaaaaaaagcaggactccacctctgtattcccccgtgctttaccttctggcatcatgaaaagctgccatgattctgtggtgttctaaggaattaaatgcactggagctttaagagctcaacgtgtttccctttgattcttttggctggtctttcaattttcttaagaggggaactggagaaaccttgctaaaggttttagcttaagtgagcatgctactaagtcttctgtcctgaaccacaataatat

SEQ ID NO: 406300 - DNA, 2156 bp, Homo sapiens
tttaagaaaaatatatttgaattctacatttatggataattcagttagtatatagtatgtgacagttgaatttgtgctgtatacattgtcattgacttaaaaattaacttttactctaatgtgtagtatgccatttttatttttcaaatatgaataagaatatcattatataaataatataaatattgctaatatatgaaaaaaataaacactcattgtctttcatcctagtacaaggattaataccatcgtaggatattttcatcctggcttttttttcaaagttataatcctaataggcatgtaaagttagtatactacttctgcttaatgttatctcattgcgtatttatagttgtctgttactgtagtcatcataatcttcagctaaagtttatgatagattcactggagcgatgtaacatctccttaaaattccctgtgattgaatagtttggtcatttccaatttttttatgtacaaacaaaatggatttccctaagtggattttccaacaaaggacccacagctggagtatataaaagacttgtacaaatcagtaataaaaagacagaacctaatacaaaaaatagcaatgttggcaagcagcttaattaggtactttgcaaaacggcttgccaagtggcaaataggaatatgaaaagatgcccaacagcacattactcaatgataattaaatgagaattaaaacaacaaaatgaaatatgactgcatacccactataattgcaaacattaaaaaacaagaaaatgcccattatcgtaagtatgtagtgaaacaggatttattttatactgcaggaatgatgtaaatgggatgccactattctagaaaccgtttggttttttgtacgtagttgaacgtatggacatgaactgtactccagccattccatttctatttatatacccattagaaatgtatgaccatgcatactaaatgacatgtacaagaatttttatggcagcattatttataatagccaccaaaccagaaatcacctaagtgttccatcaatagtattcatgcaacaaaatactatatagcaatgaaattgatccaactatacccatatgtagcaacatggataaataaggttttttttgtacccaattgatagttattttaacagctggttatgtgagtgtggataaatttgtactgcagttaaaattactttttttttggtaaatacatttctatcttctatcactgatgcttttcaaatttgtaataataggatttacttaaatccattgtttcaagaatgaaaaaggcagtagaagatgatgtttttattcctctgtatccaaagagtgctgtagaaaacaaaacatcacctcattcaaagttccaagaaagacagttctggtcaggcctaaagctcttccgcaatattcttctttggaatggactccttacagatgacaccttgcaagaactaggactagggaagctgctaaatcgttaccttattatagcacttctcaatgccacacctgggccagatgtggttaaaaagtgcaaccaggtagcagcatgtctaccagaaaaatggtttgaaaattctgccatgaggacatctattccacagctagaaaacttcattcagtttttattgcagtctgcacataaattatctagaagtgaattcagggatgaagtcgaagaaataattcttattttggtgaaaataaaagctttgaatcaagcagaatccttcataggagagcatcacctagaccatcttaaatcactaattaaagaagattgaataaactttattggaaaatgctaaaattttaatatagttacactcagttcctttgtttgagaagaagctggtgcctctctcttctttattccctgtaatagaaggtaggatttgaaaaaaagcaggactccacctctgtattcccccgtgctttaccttctggcatcatgaaaagctgccatgattctgtggtgttctaaggaattaaatgcactggagctttaagagctcaacgtgtttccctttgattcttttggctggtctttcaattttcttaagaggggaactggagaaaccttgctaaaggttttagcttaagtgagcatgctactaagtcttctgtcctgaaccacaataatat

SEQ ID NO: 406301 - DNA, 1656 bp, Homo sapiens
gcgggagcgcgccctagggggcgggcactgtgaagctgcggcttgcggttcagcgggttctagggcgccgggcgctcgggcctcggccatggctcacaggccgaaaaggacttttcggcagcgcgcggctgattccagcgacagcgatggcgccgaggagtcgcctgctgagcctggggcgccgagggaacttccggtcccgggttctgcggaggaagagccgccctctggaggaggccgcgcgcaggtggcgggactgccccaccgggttcggggccctcgtggccggggccgggtctgggcgagctcccggcgtgccaccaaagcggctccccgcgcggacgaaggctcagaatccagaacccttgatgtgtccacagatgaagaggataaaatacatcactcctcagaaagtaaggatgatcagggtttgtcttctgacagttctagctctcttggagaaaaagaactttcatcaacagttaagatcccagatgcagcttttattcaggcagcccgcagaaaacgtgaattggccagggcccaagatgactatatttctttggatgtacaacatacctcctccatctctggtatgaagagagagagcgaagatgaccctgagagtgagcctgatgaccatgaaaagagaataccatttactctaagacctcaaacacttagacaaaggatggctgaggaatcaataagcagaaatgaagaaacaagtgaagaaagtcaggaagatgaaaagcaagatacttgggaacaacagcaaatgaggaaagcagttaaaatcatagaggaaagagacatagatctttcctgtggcagtggatcttcaaaagtgaagaaatttgatacttccatttcatttccgccagtaaatttagaaattataaagaagcaattaaatactagattaacattactacaggaaactcaccgctcacacctgagggagtatgaaaaatacgtacaagatgtcaaaagctcaaagagtaccatccagaacctagagagttcatcaaatcaagctctaaattgtaaattctataaaagcatgaaaatttatgtggaaaatttaattgactgccttaatgaaaaggcaaagatgagacatccacaagtggaaacttctcagtagatgaaaaaactcagtggattttagaagagattgaatctcgaaggacaaaaagaagacaagcaagggtgctttctgggaattgtaaccatcaggaaggaacatctagtgatgatgaactgccttcagcagagatgattgacttccaaaaaagccaaggtgacattttacagaaacagaagaaagtttttgaagaagtgcaagatgatttttgtaacatccagaatattttgttgaaatttcagcaatggcgagaaaagtttcctgactcctattatgaagctttcattagtttatgcataccaaagcttttaaatcccctaatacgagttcagttgattgattggaatcctcttaaggtatttatgcttaacatatgaaaaattatcctgattatattagttgcttaaattcccttactattgtgttaggcattaaataccttttctcattcaagggggggcaggtattttaatagcttttggaacaattatttaataaaatgggggcct

SEQ ID NO: 406302 - DNA, 1464 bp, Homo sapiens
gcgggagcgcgccctagggggcgggcactgtgaagctgcggcttgcggttcagcgggttctagggcgccgggcgctcgggcctcggccatggctcacaggccgaaaaggacttttcggcagcgcgcggctgattccagcgacagcgatggcgccgaggagtcgcctgctgagcctggggcgccgagggaacttccggtcccgggttctgcggaggaagagccgccctctggaggaggccgcgcgcaggtggcgggactgccccaccgggttcggggccctcgtggccggggccgggtctgggcgagctcccggcgtgccaccaaagcggctccccgcgcggacgaaggctcagaatccagaacccttgatgtgtccacagatgaagaggataaaatacatcactcctcagaaagtaaggatgatcagggtttgtcttctgacagttctagctctcttggagaaaaagaactttcatcaacagttaagatcccagatgcagcttttattcaggcagcccgcagaaaacgtgaattggccagggcccaagatgactatatttctttggatgtacaacatacctcctccatctctggtatgaagagagagagcgaagatgaccctgagagtgagcctgatgaccatgaaaagagaataccatttactctaagacctcaaacacttagacaaaggatggctgaggaatcaataagcagaaatgaagaaacaagtgaagaaagtcaggaagatgaaaagcaagatacttgggaacaacagcaaatgaggaaagcagttaaaatcatagaggaaagagacatagatctttcctgtggcagtggatcttcaaaagtgaagaaatttgatacttccatttcatttccgccagtaaatttagaaattataaagaagcaattaaatactagattaacattactacaggaaactcaccgctcacacctgagggagtatgaaaaatacgtacaagatgtcaaaagctcaaagagtaccatccagaacctagagagttcatcaaatcaagctctaaattgtaaattctataaaagcatgaaaatttatgtggaaaatttaattgactgccttaatgaaaagattatcaacatccaagaaatagaatcatccatgcatgcactccttttaaaacaagctatgacctttatgaaacgcaggcaagatgaattaaaacatgaatcaacgtatttacaacagttatcacgcaaagatgagacatccacaagtggaaacttctcagtagatgaaaaaactcagtggattttagaagagattgaatctcgaaggtacctatataaagtgaagatttaaagaaagcatcattgagcaagtacttttcactactgaaatataattaaccacatgatgtcattaactatacctgatatacattattaatttgtaagaataatagaaaagcaaaatttagtaaaacc

SEQ ID NO: 406303 - DNA, 1026 bp, Homo sapiens
gcgggagcgcgccctagggggcgggcactgtgaagctgcggcttgcggttcagcgggttctagggcgccgggcgctcgggcctcggccatggctcacaggccgaaaaggacttttcggcagcgcgcggctgattccagcgacagcgatggcgccgaggagtcgcctgctgagcctggggcgccgagggaacttccggtcccgggttctgcggaggaagagccgccctctggaggaggccgcgcgcaggtggcgggactgcaatccagaacccttgatgtgtccacagatgaagaggataaaatacatcactcctcagaaagtaaggatgatcagggtttgtcttctgacagttctagctctcttggagaaaaagaactttcatcaacagttaagatcccagatgcagcttttattcaggcagcccgcagaaaacgtgaattggccagggcccaagatgactatatttctttggatgtacaacatacctcctccatctctggtatgaagagagagagcgaagatgaccctgagagtgagcctgatgaccatgaaaagagaataccatttactctaagacctcaaacacttagacaaaggatggctgaggaatcaagtatggatttaccaatatatgaagattaggatattttttattagaatataatatgagagaatctccataaaaaatgtaatatgctgtctcacattttatagtgttgataatggtttttaacatcgatttggtccatgatattgtgacctctaaaagatgtatctgtatcaaaatgttattatcaaggagtatgtgtaataatgtttattaatgcctgacctcccaccttgatgtttttggacaggttaaaaaaaatgtgcagtatcttactttcaaagcattgaaaacgatcgtttttacctgtataaatatattttttttaacatggaagcatctatagagattttagatgtcatgtattaaaatcttccctgctgtaataaaaaatttcctctaccaataaaaaaaagcc

SEQ ID NO: 406304 - DNA, 852 bp, Homo sapiens
gaaatcttttagaaatttttatttaaccataaactataaaatggggagaatgtaattcagctaacagtatcactatgagattatattagcaagatttcttagataactgtcattgtaaaccagccatgtgttttgattaacagggtagcagcatgtctaccagaaaaatggtttgaaaattctgccatgaggacatctattccacagctagaaaacttcattcagtttttattgcagtctgcacataaattatctagaagtgaattcaggtaatgcatattttattttcacttctataaagagagttcatggattctgtatgctctcaacaacttttagaaagatttgtatttttactgtacttttaaaaatttgttaaaactttgtagagttagtagatatttttatggttacctttgggatggcttatgcatatccatattttaaaatgtaaatctcccccaaattaagcaaattcaaaaaactatagcacaggggaatatagaattaaaactataaatcaaaaacattttattaagcactttttaaatgtgtttttaattttcctgtccatttttagagactcaacagttgttaagtacaggtctccagcttggtatttatccagcagtagctagctctctgttctgaatgtttcgttcacagcaccagctgtttgggggcttaaatacagtggtattcctgttaactccctctccaaaaaaaatttttaagcccagatttggccgggcatggtggctcacgcctgtaatgttagcactttgggaggctgagccacggcaaccggccagtgaatttatgttttgttttaaacaatttatttggaaatat

SEQ ID NO: 406305 - DNA, 816 bp, Homo sapiens
gtgtgaatatactcccaccattgcttccaccacaatgtctcatacaagctaatagcaacgcagcactactgaaatttctgatagacttactatatgcttttctaccttttacagtaattcacattgaaatttgccagaatacatccactaatgatctgtatttgaactttataattaagtggagatggcagcatctctctgtgttttatgctactttagatattggcttaaggtaaagcttttgttttagattaacaactgatgatcaggttctgaattgaccgctgttccctcatacattgcatttttaaagggagaaatttgttttgtttttcagggatgaagtcgaagaaataattcttattttggtgaaaataaaagctttgaatcaagcagaatccttcataggagagcatcacctagaccatcttaaatcactaattaaagaagattgaataaactttattggaaaatgctaaaattttaatatagttacactcagttcctttgtttgagaagaagctggtgcctctctcttctttattccctgtaatagaaggtaggatttgaaaaaaagcaggactccacctctgtattcccccgtgctttaccttctggcatcatgaaaagctgccatgattctgtggtgttctaaggaattaaatgcactggagctttaagagctcaacgtgtttccctttgattcttttggctggtctttcaattttcttaagaggggaactggagaaaccttgctaaaggttttagcttaagtgagcatgctactaagtcttctgtcctgaaccacaataatat

SEQ ID NO: 406306 - DNA, 464 bp, Homo sapiens
caatggcgagaaaagtttcctgactcctattatgaagctttcattagtttatgcataccaaagcttttaaatcccctaatacgagttcagttgattgattggaatcctcttaaggtatttatgcttaacatatgaaaaattatcctgattatattagttgcttaaattcccttactattgtgttaggcattaaataccttacccttagagtcggagctgaaatttagagctttggaacaatagtcagaaaatgtgtgctttcggctacattcttcttttcttggctgtcacttgatttttaggctaagcatcattaacatcagtaaagcaaacacatttttttttagcttcttgtacattaaatttaaaatcctcccagaaagtataaggtactgttgggtttggagaaagtagatataaaagccttgtttcaagaattcttaagttggagatgacatactggg

SEQ ID NO: 406307 - DNA, 740 bp, Homo sapiens
tagataactgtcattgtaaaccagccatgtgttttgattaacagggtagcagcatgtctaccagaaaaatggtttgaaaattctgccatgaggacatctattccacagctagaaaacttcattcagtttttattgcagtctgcacataaattatctagaagtgaattcaggtaatgcatattttattttcacttctataaagagagttcatggattctgtatgctctcaacaacttttagaaagatttgtatttttactgtacttttaaaaatttgttaaaactttgtagagttagtagatatttttatggttacctttgggatggcttatgcatatccatattttaaaatgtaaatctcccccaaattaagcaaattcaaaaaactatagcacaggggaatatagaattaaaactataaatcaaaaacattttattaagcactttttaaatgtgtttttaattttcctgtccatttttagagactcaacagttgttaagtacaggtctccagcttggtatttatccagcagtagctagctctctgttctgaatgtttcgttcacagcaccagctgtttgggggcttaaatacagtggtattcctgttaactccctctccaaaaaaaatttttaagcccagatttggccgggcatggtggctcacgcctgtaatgttagcactttgggaggctgaggcaggaggatcacttgagcccaggagtttgagaacagcctggga

SEQ ID NO: 406308 - DNA, 2664 bp, Homo sapiens
gcgggagcgcgccctagggggcgggcactgtgaagctgcggcttgcggttcagcgggttctagggcgccgggcgctcgggcctcggccatggctcacaggccgaaaaggacttttcggcagcgcgcggctgattccagcgacagcgatggcgccgaggagtcgcctgctgagcctggggcgccgagggaacttccggtcccgggttctgcggaggaagagccgccctctggaggaggccgcgcgcaggtggcgggactgccccaccgggttcggggccctcgtggccggggccgggtctgggcgagctcccggcgtgccaccaaagcggctccccgcgcggacgaaggctcagaatccagaacccttgatgtgtccacagatgaagaggataaaatacatcactcctcagaaagtaaggatgatcagggtttgtcttctgacagttctagctctcttggagaaaaagaactttcatcaacagttaagatcccagatgcagcttttattcaggcagcccgcagaaaacgtgaattggccagggcccaagatgactatatttctttggatgtacaacatacctcctccatctctggtatgaagagagagagcgaagatgaccctgagagtgagcctgatgaccatgaaaagagaataccatttactctaagacctcaaacacttagacaaaggatggctgaggaatcaataagcagaaatgaagaaacaagtgaagaaagtcaggaagatgaaaagcaagatacttgggaacaacagcaaatgaggaaagcagttaaaatcatagaggaaagagacatagatctttcctgtggcagtggatcttcaaaagtgaagaaatttgatacttccatttcatttccgccagtaaatttagaaattataaagaagcaattaaatactagattaacattactacaggaaactcaccgctcacacctgagggagtatgaaaaatacgtacaagatgtcaaaagctcaaagagtaccatccagaacctagagagttcatcaaatcaagctctaaattgtaaattctataaaagcatgaaaatttatgtggaaaatttaattgactgccttaatgaaaagattatcaacatccaagaaatagaatcatccatgcatgcactccttttaaaacaagctatgacctttatgaaacgcaggcaagatgaattaaaacatgaatcaacgtatttacaacagttatcacgcaaagatgagacatccacaagtggaaacttctcagtagatgaaaaaactcagtggattttagaagagattgaatctcgaaggacaaaaagaagacaagcaagggtgctttctgggaattgtaaccatcaggaaggaacatctagtgatgatgaactgccttcagcagagatgattgacttccaaaaaagccaaggtgacattttacagaaacagaagaaagtttttgaagaagtgcaagatgatttttgtaacatccagaatattttgttgaaatttcagcaatggcgagaaaagtttcctgactcctattatgaagctttcattagtttatgcataccaaagcttttaaatcccctaatacgagttcagttgattgattggaatcctcttaagttggaatccacaggtttaaaagagatgccatggttcaaatctgtagaagaatttatggatagcagtgtagaagattcaaagaaggaaagtagttcagataaaaaagtcttgtctgcaatcatcaacaaaacaattattccccgacttacagactttgtagaattcctttgggatcctttgtcaacctcacagacaacaagtttaataacacattgcagagtgattcttgaagaacattccacttgtgaaaatgaagttagtaaaagcagacaggatttacttaaatccattgtttcaagaatgaaaaaggcagtagaagatgatgtttttattcctctgtatccaaagagtgctgtagaaaacaaaacatcacctcattcaaagttccaagaaagacagttctggtcaggcctaaagctcttccgcaatattcttctttggaatggactccttacagatgacaccttgcaagaactaggactagggaagctgctaaatcgttaccttattatagcacttctcaatgccacacctgggccagatgtggttaaaaagtgcaaccaggtagcagcatgtctaccagaaaaatggtttgaaaattctgccatgaggacatctattccacagctagaaaacttcattcagtttttattgcagtctgcacataaattatctagaagtgaattcagggatgaagtcgaagaaataattcttattttggtgaaaataaaagctttgaatcaagcagaatccttcataggagagcatcacctagaccatcttaaatcactaattaaagaagattgaataaactttattggaaaatgctaaaattttaatatagttacactcagttcctttgtttgagaagaagctggtgcctctctcttctttattccctgtaatagaaggtaggatttgaaaaaaagcaggactccacctctgtattcccccgtgctttaccttctggcatcatgaaaagctgccatgattctgtggtgttctaaggaattaaatgcactggagctttaagagct

SEQ ID NO: 406309 - DNA, 2825 bp, Homo sapiens
gcgggagcgcgccctagggggcgggcactgtgaagctgcggcttgcggttcagcgggttctagggcgccgggcgctcgggcctcggccatggctcacaggccgaaaaggacttttcggcagcgcgcggctgattccagcgacagcgatggcgccgaggagtcgcctgctgagcctggggcgccgagggaacttccggtcccgggttctgcggaggaagagccgccctctggaggaggccgcgcgcaggtggcgggactgccccaccgggttcggggccctcgtggccggggccgggtctgggcgagctcccggcgtgccaccaaagcggctccccgcgcggacgaaggctcaggtgtccagggagacgcggggaagcggggagaatccagaacccttgatgtgtccacagatgaagaggataaaatacatcactcctcagaaagtaaggatgatcagggtttgtcttctgacagttctagctctcttggagaaaaagaactttcatcaacagttaagatcccagatgcagcttttattcaggcagcccgcagaaaacgtgaattggccagggcccaagatgactatatttctttggatgtacaacatacctcctccatctctggtatgaagagagagagcgaagatgaccctgagagtgagcctgatgaccatgaaaagagaataccatttactctaagacctcaaacacttagacaaaggatggctgaggaatcaataagcagaaatgaagaaacaagtgaagaaagtcaggaagatgaaaagcaagatacttgggaacaacagcaaatgaggaaagcagttaaaatcatagaggaaagagacatagatctttcctgtggcagtggatcttcaaaagtgaagaaatttgatacttccatttcatttccgccagtaaatttagaaattataaagaagcaattaaatactagattaacattactacaggaaactcaccgctcacacctgagggagtatgaaaaatacgtacaagatgtcaaaagctcaaagagtaccatccagaacctagagagttcatcaaatcaagctctaaattgtaaattctataaaagcatgaaaatttatgtggaaaatttaattgactgccttaatgaaaagattatcaacatccaagaaatagaatcatccatgcatgcactccttttaaaacaagctatgacctttatgaaacgcaggcaagatgaattaaaacatgaatcaacgtatttacaacagttatcacgcaaagatgagacatccacaagtggaaacttctcagtagatgaaaaaactcagtggattttagaagagattgaatctcgaaggacaaaaagaagacaagcaagggtgctttctgggaattgtaaccatcaggaaggaacatctagtgatgatgaactgccttcagcagagatgattgacttccaaaaaagccaaggtgacattttacagaaacagaagaaagtttttgaagaagtgcaagatgatttttgtaacatccagaatattttgttgaaatttcagcaatggcgagaaaagtttcctgactcctattatgaagctttcattagtttatgcataccaaagcttttaaatcccctaatacgagttcagttgattgattggaatcctcttaagttggaatccacaggtttaaaagagatgccatggttcaaatctgtagaagaatttatggatagcagtgtagaagattcaaagaaggaaagtagttcagataaaaaagtcttgtctgcaatcatcaacaaaacaattattccccgacttacagactttgtagaattcctttgggatcctttgtcaacctcacagacaacaagtttaataacacattgcagagtgattcttgaagaacattccacttgtgaaaatgaagttagtaaaagcagacaggatttacttaaatccattgtttcaagaatgaaaaaggcagtagaagatgatgtttttattcctctgtatccaaagagtgctgtagaaaacaaaacatcacctcattcaaagttccaagaaagacagttctggtcaggcctaaagctcttccgcaatattcttctttggaatggactccttacagatgacaccttgcaagaactaggactagggaagctgctaaatcgttaccttattatagcacttctcaatgccacacctgggccagatgtggttaaaaagtgcaaccaggtagcagcatgtctaccagaaaaatggtttgaaaattctgccatgaggacatctattccacagctagaaaacttcattcagtttttattgcagtctgcacataaattatctagaagtgaattcagggatgaagtcgaagaaataattcttattttggtgaaaataaaagctttgaatcaagcagaatccttcataggagagcatcacctagaccatcttaaatcactaattaaagaagattgaataaactttattggaaaatgctaaaattttaatatagttacactcagttcctttgtttgagaagaagctggtgcctctctcttctttattccctgtaatagaaggtaggatttgaaaaaaagcaggactccacctctgtattcccccgtgctttaccttctggcatcatgaaaagctgccatgattctgtggtgttctaaggaattaaatgcactggagctttaagagctcaacgtgtttccctttgattcttttggctggtctttcaattttcttaagaggggaactggagaaaccttgctaaaggttttagcttaagtgagcatgctactaagtcttctgtcctgaaccacaataatat

SEQ ID NO: 406310 - DNA, 2833 bp, Homo sapiens
gcgggagcgcgccctagggggcgggcactgtgaagctgcggcttgcggttcagcgggttctagggcgccgggcgctcgggcctcggccatggctcacaggccgaaaaggacttttcggcagcgcgcggctgattccagcgacagcgatggcgccgaggagtcgcctgctgagcctggggcgccgagggaacttccggtcccgggttctgcggaggaagagccgccctctggaggaggccgcgcgcaggtggcgggactgccccaccgggttcggggccctcgtggccggggccgggtctgggcgagctcccggcgtgccaccaaagcggctccccgcgcggacgaaggctcagaatccagaacccttgatgtgtccacagatgaagaggataaaatacatcactcctcagaaagtaaggatgatcagggtttgtcttctgacagttctagctctcttggagaaaaagaactttcatcaacagttaagatcccagatgcagcttttattcaggcagcccgcagaaaacgtgaattggccagggcccaagatgactatatttctttggatgtacaacatacctcctccatctctggtatgaagagagagagcgaagatgaccctgagagtgagcctgatgaccatgaaaagagaataccatttactctaagacctcaaacacttagacaaaggatggctgaggaatcaataagcagaaatgaagaaacaagtgaagaaagtcaggaagatgaaaagcaagatacttgggaacaacagcaaatgaggaaagcagttaaaatcatagaggaaagagacatagatctttcctgtggcagtggatcttcaaaagtgaagaaatttgatacttccatttcatttccgccagtaaatttagaaattataaagaagcaattaaatactagattaacattactacaggaaactcaccgctcacacctgagggagtatgaaaaatacgtacaagatgtcaaaagctcaaagagtaccatccagaacctagagagttcatcaaatcaagctctaaattgtaaattctataaaagcatgaaaatttatgtggaaaatttaattgactgccttaatgaaaagattatcaacatccaagaaatagaatcatccatgcatgcactccttttaaaacaagctatgacctttatgaaacgcaggcaagatgaattaaaacatgaatcaacgtatttacaacagttatcacgcaaagatgagacatccacaagtggaaacttctcagtagatgaaaaaactcagtggattttagaagagattgaatctcgaaggtacctatataaagtgaagatttaaagaaagcatcattgacaaaaagaagacaagcaagggtgctttctgggaattgtaaccatcaggaaggaacatctagtgatgatgaactgccttcagcagagatgattgacttccaaaaaagccaaggtgacattttacagaaacagaagaaagtttttgaagaagtgcaagatgatttttgtaacatccagaatattttgttgaaatttcagcaatggcgagaaaagtttcctgactcctattatgaagctttcattagtttatgcataccaaagcttttaaatcccctaatacgagttcagttgattgattggaatcctcttaagttggaatccacaggtttaaaagagatgccatggttcaaatctgtagaagaatttatggatagcagtgtagaagattcaaagaaggaaagtagttcagataaaaaagtcttgtctgcaatcatcaacaaaacaattattccccgacttacagactttgtagaattcctttgggatcctttgtcaacctcacagacaacaagtttaataacacattgcagagtgattcttgaagaacattccacttgtgaaaatgaagttagtaaaagcagacaggatttacttaaatccattgtttcaagaatgaaaaaggcagtagaagatgatgtttttattcctctgtatccaaagagtgctgtagaaaacaaaacatcacctcattcaaagttccaagaaagacagttctggtcaggcctaaagctcttccgcaatattcttctttggaatggactccttacagatgacaccttgcaagaactaggactagggaagctgctaaatcgttaccttattatagcacttctcaatgccacacctgggccagatgtggttaaaaagtgcaaccaggtagcagcatgtctaccagaaaaatggtttgaaaattctgccatgaggacatctattccacagctagaaaacttcattcagtttttattgcagtctgcacataaattatctagaagtgaattcagggatgaagtcgaagaaataattcttattttggtgaaaataaaagctttgaatcaagcagaatccttcataggagagcatcacctagaccatcttaaatcactaattaaagaagattgaataaactttattggaaaatgctaaaattttaatatagttacactcagttcctttgtttgagaagaagctggtgcctctctcttctttattccctgtaatagaaggtaggatttgaaaaaaagcaggactccacctctgtattcccccgtgctttaccttctggcatcatgaaaagctgccatgattctgtggtgttctaaggaattaaatgcactggagctttaagagctcaacgtgtttccctttgattcttttggctggtctttcaattttcttaagaggggaactggagaaaccttgctaaaggttttagcttaagtgagcatgctactaagtcttctgtcctgaaccacaataatat

SEQ ID NO: 406311 - DNA, 1119 bp, Homo sapiens
gcgggagcgcgccctagggggcgggcactgtgaagctgcggcttgcggttcagcgggttctagggcgccgggcgctcgggcctcggccatggctcacaggccgaaaaggacttttcggcagcgcgcggctgattccagcgacagcgatggcgccgaggagtcgcctgctgagcctggggcgccgagggaacttccggtcccgggttctgcggaggaagagccgccctctggaggaggccgcgcgcaggtggcgggactgccccaccgggttcggggccctcgtggccggggccgggtctgggcgagctcccggcgtgccaccaaagcggctccccgcgcggacgaaggctcagaatccagaacccttgatgtgtccacagatgaagaggataaaatacatcactcctcagaaagtaaggatgatcagggtttgtcttctgacagttctagctctcttggagaaaaagaactttcatcaacagttaagatcccagatgcagcttttattcaggcagcccgcagaaaacgtgaattggccagggcccaagatgactatatttctttggatgtacaacatacctcctccatctctggtatgaagagagagagcgaagatgaccctgagagtgagcctgatgaccatgaaaagagaataccatttactctaagacctcaaacacttagacaaaggatggctgaggaatcaagtatggatttaccaatatatgaagattaggatattttttattagaatataatatgagagaatctccataaaaaatgtaatatgctgtctcacattttatagtgttgataatggtttttaacatcgatttggtccatgatattgtgacctctaaaagatgtatctgtatcaaaatgttattatcaaggagtatgtgtaataatgtttattaatgcctgacctcccaccttgatgtttttggacaggttaaaaaaaatgtgcagtatcttactttcaaagcattgaaaacgatcgtttttacctgtataaatatattttttttaacatggaagcatctatagagattttagatgtcatgtattaaaatcttccctgctgtaataaaaaatttcctctaccaataaaaaaaagcc

SEQ ID NO: 406312 - DNA, 2944 bp, Homo sapiens
gcgggagcgcgccctagggggcgggcactgtgaagctgcggcttgcggttcagcgggttctagggcgccgggcgctcgggcctcggccatggctcacaggccgaaaaggacttttcggcagcgcgcggctgattccagcgacagcgatggcgccgaggagtcgcctgctgagcctggggcgccgagggaacttccggtcccgggttctgcggaggaagagccgccctctggaggaggccgcgcgcaggtggcgggactgccccaccgggttcggggccctcgtggccggggccgggtctgggcgagctcccggcgtgccaccaaagcggctccccgcgcggacgaaggctcagaatccagaacccttgatgtgtccacagatgaagaggataaaatacatcactcctcagaaagtaaggatgatcagggtttgtcttctgacagttctagctctcttggagaaaaagaactttcatcaacagttaagatcccagatgcagcttttattcaggcagcccgcagaaaacgtgaattggccagggcccaagatgactatatttctttggatgtacaacatacctcctccatctctggtatgaagagagagagcgaagatgaccctgagagtgagcctgatgaccatgaaaagagaataccatttactctaagacctcaaacacttagacaaaggatggctgaggaatcaataagcagaaatgaagaaacaagtgaagaaagtcaggaagatgaaaagcaagatacttgggaacaacagcaaatgaggaaagcagttaaaatcatagaggaaagagacatagatctttcctgtggcagtggatcttcaaaagtgaagaaatttgatacttccatttcatttccgccagtaaatttagaaattataaagaagcaattaaatactagattaacattactacaggaaactcaccgctcacacctgagggagtatgaaaaatacgtacaagatgtcaaaagctcaaagagtaccatccagaacctagagagttcatcaaatcaagctctaaattgtaaattctataaaagcatgaaaatttatgtggaaaatttaattgactgccttaatgaaaagattatcaacatccaagaaatagaatcatccatgcatgcactccttttaaaacaagctatgacctttatgaaacgcaggcaagatgaattaaaacatgaatcaacgtatttacaacagttatcacgcaaagatgagacatccacaagtggaaacttctcagtagatgaaaaaactcagtggattttagaagagattgaatctcgaaggacaaaaagaagacaagcaagggtgctttctgggaattgtaaccatcaggaaggaacatctagtgatgatgaactgccttcagcagagatgattgacttccaaaaaagccaaggtgacattttacagaaacagaagaaagtttttgaagaagtgcaagatgatttttgtaacatccagaatattttgttgaaatttcagcaatggcgagaaaagtttcctgactcctattatgaagctttcattagtttatgcataccaaagcttttaaatcccctaatacgagttcagttgattgattggaatcctcttaagttggaatccacaggtttaaaagagatgccatggttcaaatctgtagaagaatttatggatagcagtgtagaagattcaaagaaggaaagtagttcagataaaaaagtcttgtctgcaatcatcaacaaaacaattattccccgacttacagactttgtagaattcctttgggatcctttgtcaacctcacagacaacaagtttaataacacattgcagagtgattcttgaagaacattccacttgtgaaaatgaagttagtaaaagcagacaggatttacttaaatccattgtttcaagaatgaaaaaggcagtagaagatgatgtttttattcctctgtatccaaagagtgctgtagaaaacaaaacatcacctcattcaaagttccaagaaagacagttctggtcaggcctaaagctcttccgcaatattcttctttggaatggactccttacagatgacaccttgcaagaactaggactagggaagctgctaaatcgttaccttattatagcacttctcaatgccacacctgggccagatgtggttaaaaagtgcaaccaggtagcagcatgtctaccagaaaaatggtttgaaaattctgccatgaggacatctattccacagctagaaaacttcattcagtttttattgcagtctgcacataaattatctagaagtgaattcaggtaatgcatattttattttcacttctataaagagagttcatggattctgtatgctctcaacaacttttagaaagatttgtatttttactgtacttttaaaaatttgttaaaactttgtagagttagtagatatttttatggttacctttgggatggcttatgcatatccatattttaaaatgtaaatctcccccaaattaagcaaattcaaaaaactatagcacaggggaatatagaattaaaactataaatcaaaaacattttattaagcactttttaaatgtgtttttaattttcctgtccatttttagagactcaacagttgttaagtacaggtctccagcttggtatttatccagcagtagctagctctctgttctgaatgtttcgttcacagcaccagctgtttgggggcttaaatacagtggtattcctgttaactccctctccaaaaaaaatttttaagcccagatttggccgggcatggtggctcacgcctgtaatgttagcactttgggaggctgaggcagaggtgggaagattgcttgagcctgagaggttgaggctgcagtgagctatgattgtgccactgtactccagtctgaccagcagagccaagaccaagtcc

SEQ ID NO: 406313 - DNA, 2670 bp, Homo sapiens
gcgggagcgcgccctagggggcgggcactgtgaagctgcggcttgcggttcagcgggttctagggcgccgggcgctcgggcctcggccatggctcacaggccgaaaaggacttttcggcagcgcgcggctgattccagcgacagcgatggcgccgaggagtcgcctgctgagcctggggcgccgagggaacttccggtcccgggttctgcggaggaagagccgccctctggaggaggccgcgcgcaggtggcgggactgccccaccgggttcggggccctcgtggccggggccgggtctgggcgagctcccggcgtgccaccaaagcggctccccgcgcggacgaaggctcagaatccagaacccttgatgtgtccacagatgaagaggataaaatacatcactcctcagaaagtaaggatgatcagggtttgtcttctgacagttctagctctcttggagaaaaagaactttcatcaacagttaagatcccagatgcagcttttattcaggcagcccgcagaaaacgtgaattggccagggcccaagatgactatatttctttggatgtacaacatacctcctccatctctggtatgaagagagagagcgaagatgaccctgagagtgagcctgatgaccatgaaaagagaataccatttactctaagacctcaaacacttagacaaaggatggctgaggaatcaataagcagaaatgaagaaacaagtgaagaaagtcaggaagatgaaaagcaagatacttgggaacaacagcaaatgaggaaagcagttaaaatcatagaggaaagagacatagatctttcctgtggcagtggatcttcaaaagtgaagaaatttgatacttccatttcatttccgccagtaaatttagaaattataaagaagcaattaaatactagattaacattactacaggaaactcaccgctcacacctgagggagtatgaaaaatacgtacaagatgtcaaaagctcaaagagtaccatccagaacctagagagttcatcaaatcaagctctaaattgtaaattctataaaagcatgaaaatttatgtggaaaatttaattgactgccttaatgaaaagattatcaacatccaagaaatagaatcatccatgcatgcactccttttaaaacaagctatgacctttatgaaacgcaggcaagatgaattaaaacatgaatcaacgtatttacaacagttatcacgcaaagatgagacatccacaagtggaaacttctcagtagatgaaaaaactcagtggattttagaagagattgaatctcgaaggacaaaaagaagacaagcaagggtgctttctgggaattgtaaccatcaggaaggaacatctagtgatgatgaactgccttcagcagagatgattgacttccaaaaaagccaaggtgacattttacagaaacagaagaaagtttttgaagaagtgcaagatgatttttgtaacatccagaatattttgttgaaatttcagcaatggcgagaaaagtttcctgactcctattatgaagctttcattagtttatgcataccaaagcttttaaatcccctaatacgagttcagttgattgattggaatcctcttaagttggaatccacaggtttaaaagagatgccatggttcaaatctgtagaagaatttatggatagcagtgtagaagattcaaagaaggaaagtagttcagataaaaaagtcttgtctgcaatcatcaacaaaacaattattccccgacttacagactttgtagaattcctttgggatcctttgtcaacctcacagacaacaagtttaataacacattgcagagtgattcttgaagaacattccacttgtgaaaatgaagttagtaaaagcagacaggatttacttaaatccattgtttcaagaatgaaaaaggcagtagaagatgatgtttttattcctctgtatccaaagagtgctgtagaaaacaaaacatcacctcattcaaagttccaagaaagacagttctggtcaggcctaaagctcttccgcaatattcttctttggaatggactccttacagatgacaccttgcaagaactaggactagggaagctgctaaatcgttaccttattatagcacttctcaatgccacacctgggccagatgtggttaaaaagtgcaaccagggatgaagtcgaagaaataattcttattttggtgaaaataaaagctttgaatcaagcagaatccttcataggagagcatcacctagaccatcttaaatcactaattaaagaagattgaataaactttattggaaaatgctaaaattttaatatagttacactcagttcctttgtttgagaagaagctggtgcctctctcttctttattccctgtaatagaaggtaggatttgaaaaaaagcaggactccacctctgtattcccccgtgctttaccttctggcatcatgaaaagctgccatgattctgtggtgttctaaggaattaaatgcactggagctttaagagctcaacgtgtttccctttgattcttttggctggtctttcaattttcttaagaggggaactggagaaaccttgctaaaggttttagcttaagtgagcatgctactaagtcttctgtcctgaaccacaataatat

SEQ ID NO: 406314 - DNA, 1497 bp, Homo sapiens
gcgggagcgcgccctagggggcgggcactgtgaagctgcggcttgcggttcagcgggttctagggcgccgggcgctcgggcctcggccatggctcacaggccgaaaaggacttttcggcagcgcgcggctgattccagcgacagcgatggcgccgaggagtcgcctgctgagcctggggcgccgagggaacttccggtcccgggttctgcggaggaagagccgccctctggaggaggccgcgcgcaggtggcgggactgccccaccgggttcggggccctcgtggccggggccgggtctgggcgagctcccggcgtgccaccaaagcggctccccgcgcggacgaaggctcagaatccagaacccttgatgtgtccacagatgaagaggataaaatacatcactcctcagaaagtaaggatgatcagggtttgtcttctgacagttctagctctcttggagaaaaagaactttcatcaacagttaagatcccagatgcagcttttattcaggcagcccgcagaaaacgtgaattggccagggcccaagatgactatatttctttggatgtacaacatacctcctccatctctggtatgaagagagagagcgaagatgaccctgagagtgagcctgatgaccatgaaaagagaataccatttactctaagacctcaaacacttagacaaaggatggctgaggaatcaataagcagaaatgaagaaacaagtgaagaaagtcaggaagatgaaaagcaagatacttgggaacaacagcaaatgaggaaagcagttaaaatcatagaggaaagagacatagatctttcctgtggcagtggatcttcaaaagtgaagaaatttgatacttccatttcatttccgccagtaaatttagaaattataaagaagcaattaaatactagattaacattactacaggaaactcaccgctcacacctgagggagtatgaaaaatacgtacaagatgtcaaaagctcaaagagtaccatccagaacctagagagttcatcaaatcaagctctaaattgtaaattctataaaagcatgaaaatttatgtggaaaatttaattgactgccttaatgaaaagattatcaacatccaagaaatagaatcatccatgcatgcactccttttaaaacaagctatgacctttatgaaacgcaggcaagatgaattaaaacatgaatcaacgtatttacaacagttatcacgcaaagatgagacatccacaagtggaaacttctcagtagatgaaaaaactcagtggattttagaagagattgaatctcgaaggtacctatataaagtgaagatttaaagaaagcatcattaataggagtcaggaaacttttctcgccatatgctgaaatattcaacaaaatattctggatgtaacaaaaatcatcttgcacttcttcaaaaactatgttctgtttctgtaaaatgtcaacattggctatcttggaagtcaattat

SEQ ID NO: 406315 - DNA, 625 bp, Homo sapiens
  misc_feature (490)..(491): n is a, c, g, or t
  misc_feature (509)..(509): n is a, c, g, or t
  misc_feature (526)..(526): n is a, c, g, or t
  misc_feature (529)..(530): n is a, c, g, or t
  misc_feature (591)..(591): n is a, c, g, or t
  misc_feature (608)..(608): n is a, c, g, or t
gcgggagcgcgccctagggggcgggcactgtgaagctgcggcttgcggttcagcgggttctagggcgccgggcgctcgggcctcggccatggctcacaggccgaaaaggacttttcggcagcgcgcggctgattccagcgacagcgatggcgccgaggagtcgcctgctgagcctggggcgccgagggaacttccggtcccgggttctgcggaggaagagccgccctctggaggaggccgcgcgcaggtggcgggactgccccaccgggttcggggccctcgtggccggggccgggtctgggcgagctcccggcgtgccaccaaagcggctccccgcgcggacgaaggctcagaatccagaacccttgatgtgtccacagatgaagaggataaaatacatcactcctcagaaagtaaggatgatcagggtttgtcttctgacagttctagctctcttggagaaaaagaactttcatcaacagacagtgtnncctcgtctttggtttccnttcaagttacagatccncanngatgcagcattttaattcacgtgcagccccgcagaaaaacggtgacattggggccaggggncccccaacgaatgcacntaatactttcctttcgc

SEQ ID NO: 406316 - DNA, 539 bp, Homo sapiens
  misc_feature (492)..(492): n is a, c, g, or t
  misc_feature (524)..(524): n is a, c, g, or t
cgaggccggaactggcggactgcggcgcacttccgtagaggtggacatggcgtgcggctttcgccgcgctattgcttgccaggtatggatcccggagcgcgcagaggagtccctgaggagctagggaccccaaaggcctttcaccgctgcgggccagtcctcagtcagctggagggtgggtcccacggaatcctgttagtttctaccacctcctcccccttctctggagctggtggagcttcagaagtcctgtggagcgtcggctgggatcagtttgtctcggtgaaaagtaaactttgaaagctttccagagtgttgaatcttccaccagaaaacttgatcacatcaatatctgcagttccaatttcccaaaaagaagaagtagctgattttcagctttctgtggattctttattggaaaaagacaatgaccattcaagaccaggaagcccactttcaccccttctattcaacacaggactggaagttctngccagagccatcagtccagagaaataaataangggcatccaaatcag

SEQ ID NO: 406317 - DNA, 606 bp, Homo sapiens
aatttggatttctttccctttaatgtaggcaggggaaatgtcattatcaaaggtaaaatagcctaaattaggcaagtaattactcattctgaatctgttcttgattgtcagcatacatttttggcagatgttaccttcacttggatccatgattggcacagtgtcatgtagactaaagatagctgcctttgtctgtttcagcaactaaagaactcaagaacccacaagagactgcagagagggtcgggctcgcagcactcattattcaggtctgttaagactcctacctgtgaggcccttttgtttggtactagagcaaatcccagcagtgaagatttcctctgtcgttttaggacttcaaaggtttactcttatctgactacaagttcagctgggatcgtgttttccagagtcgcggggacacaggagtcttcctacagtacacacacgcccgcctccacaggtgagaagaggctgcagggaaaccttgtgctgcactgtgcttacttaggctaggtcctgtgattctaagaccagaggccctgttttctgggcttttccaatatcttctattcacatctgactagagtagaccttcttttagga

SEQ ID NO: 406318 - DNA, 1812 bp, Homo sapiens
tgttcctgaattatttaagtttcttatagattctggatattagacctttcttagatgcatagcttatgaatattttctcccattatttaggttgtagggaaagggagagcttttgattttttttaagcattacagataatgttgaagtcactgatatatatttgtttgactgcattccctaccctgcttccctagagagaactgatctcatgatgcaaatgatttattttcacgaatcagttgctttgtgtttgtttctttgtttttgtatttttttttcacctacccagtgaaaaggataaatggcattgtccatctctttaatgaactactgagtgttaagaagaatattcttctttttctcatgttgaaactcaaattacaacatttaaaaaatatgtcatttggaggtcagtggagaggtttgaattagaagcatgtatttggagtagtagaggaagcattgtagaagaggtaaagagacctgggcttttttctcagtctgtttttttttgcagtaggattttaaaggagacatttagcttgccagacatcagttttcatgtctataaaataaggtggctagtataagaggaagaattttttgagactaggtcttgctctgtcacccagactggagtgcagtggcatgatctcagctcactgcaacctctgcctcctgggttcaagcaattctcgtgcctaagcctcccgagtagctgggcttacgggcacatgccaccacgcctggctaatttttgtatttttagtagagatggggtttttccatgttggccaggctggtctcaaactcctgaccttaagtggtccacttgcctcggcctcccaaagtgctgggatctgtgcccagacagaagaggaagaattttataagatgataagaaaaacattctgaataaatactaggttatttctcattttcttgcttttaattttgttttttatttatttattttattttatttacttttttgagacagagtttcgctcttgtcacccaggctggagtgcagtggcacaatcttgactcgctgcagtctccacctccaggattcaagcgattcccctgcctcagtctcccaagcagctgggattgtaggtacacaccaccatgcctggctaatttttgtgtgtgtgtgtgtatttttagtagagatggggttttaccatgtggccaggctggtctagaactcaacctcaggtgatccgcctgccttagcctcccaaagtgctgggattacaggcatgagccaccgctctcggcccccttgcttttaattttgaaagtacacataacaccttcttctggtaaaggtatgtctcaatggagaactcatagtgattagtctttgtttaacaactaatgcttttaaggtaacagttctatctcgtttcgatgtctgtctttagagaagtagctgattttcagctttctgtggattctttattggaaaaagacaatgaccattcaagaccagatattcaagttcaagccaagagactagcagagaaggtacgttagcactattatctctttttgacattgtaataaacttgttattaaaaaaagtactttgcaggctatctcagccataatagtgaatttaatagtgtttctttgaggcatcttgtgtaatataatttaaattcattttagccatgtactataaggttataatgatttttcagattagttataaagcactcctcttgagctgacattgttcaattttttgattaaccacttacaggaagactgaagtgttaattaaatttacagattgaagctgg

SEQ ID NO: 406319 - DNA, 932 bp, Homo sapiens
cgaggccggaactggcggactgcggcgcacttccgtagaggtggacatggcgtgcggctttcgccgcgctattgcttgccaggtatggatcccggagcgcgcagaggagtccctgaggagctagggaccccaaaggcctttcaccgctgcgggccagtcctcagtcagctggagggtgggtcccacggaatcctgttagtttctaccacctcctcccccttctctggagctggtggagcttcagaagtcctgtggagcgtcggctgggatcagtttgtctcggtgaaaagtaaactttgaaagctttccagagtgttgaatcttccaccagaaaacttgatcacatcaatatctgcagttccaatttcccaaaaagaagaagtagctgattttcagctttctgtggattctttattggaaaaagacaatgaccattcaagaccagatattcaagttcaagccaagagactagcagagaagctaagatgtgatacagtggtgagtgaaatcagtactggtcaaaggactgtaaatttcaaaataaacagagagctcttaacaaagacagtgctacaacaagtaattgaagatggctcaaaatatggattaaaaagtgaacttttctctggacttccccagaagaagattgtggttgaattcagttcacctaatgttgccaaaaaatttcatgttggacatttgcgttctaccatcataggaaattttatagcaaatctcaaagaagctttaggacatcaagtaataagaataaattaccttggcgattggggcatgcagtttggtctagagacaagatcgctatgtagacacaccgtgaaccatttcccactgtgggcctgcaccaccccaggggcttcctagcttctgctcttctggaagtcttccccatctcctccccattccaggtaatt

SEQ ID NO: 406320 - DNA, 576 bp, Homo sapiens
gcaggacttcaaaggtttactcttatctgaataatgagtgctgcgagcccgaccctctctgcagtctctgtgggttcttgagttctttagttgtcttaattgaagccatgttctgacttcaaaggtttactcttatctgactacaagttcagctgggatcgtgttttccagagtcgcggggacacaggagtcttcctacagtacacacacgcccgcctccacagtttggaagagacttttggatgtgggtacctgaatgacttcaacactgcttgtttacaagagccacagtctgtttcaattcttcagcatcttctcaggttcgacgaggtgctttataaatcatctcaggactttcaacccaggcatatcgtcagttaccttctaactttaagtcatcttgcagctgtggcacacaaaacactacaaataaaagatagtcctcctgaagtggctggggccagacttcatcttttcaaagctgtccgttctgtcctagccaatggaatgaaacttcttggaataacacctgtatgtaggatgtaatttccattaaaatggcttttaaaatgtcaa

SEQ ID NO: 406321 - DNA, 504 bp, Homo sapiens
ttttgtatttttagtagagaatggggtttcatcatattggccaggctgctctcaaactcctgacctcatgatccacccacctcagtctcccaaagtgctgggattacagacgtgagacactgcgcctggccataccttctactcttaatcgtgtcgagtcaaccttatattcacaatcttttaatgtctaatgtcttagtgtaatgtgtacagtcttttcctgttcactgttcctgtcatcttttagggttcgacgaggtgctttataaatcatctcaggactttcaacccaggcatatcgtcagttaccttctaactttaagtcatcttgcagctgtggcacacaaaacactacaaataaaagatagtcctcctgaagtggctggggccagacttcatcttttcaaagctgtccgttctgtcctagccaatggaatgaaacttcttggaataacacctgtatgtaggatgtaatttccattaaaatggcttttaaaatgtcaa

SEQ ID NO: 406322 - DNA, 870 bp, Homo sapiens
cgaggccggaactggcggactgcggcgcacttccgtagaggtggacatggcgtgcggctttcgccgcgctattgcttgccagctttccagagtgttgaatcttccaccagaaaacttgatcacatcaatatctgcagttccaatttcccaaaaagaagaagtagctgattttcagctttctgtggattctttattggaaaaagacaatgaccattcaagaccagatattcaagttcaagccaagagactagcagagaagctaagatgtgatacagtggtgagtgaaatcagtactggtcaaaggactgtaaatttcaaaataaacagagagctcttaacaaagacagtgctacaacaagtaattgaagatggctcaaaatatggattaaaaagtgaacttttctctggacttccccagaagaagattgtggttgaattcagggagactcatgcatctgtatgccgtgtgcgtggactgcctggaaggggttcacaagatcatctgcatcaagtgtaagtcacggtgggatggcagctggcaccagctgggcactatgtacacctacgacatcctggctgcctctccatgttgtcaggcccgcctgaactgtaagcactgtgggaagccggtgatcgacgtgaggatcgggatgcagtacttctccgaatatagcaacgtccagcagtgtccacactgtgggaacctggactaccacttcgtgaagccattttcctccttcaaagttctcgaagcttattgatgaaagctttgctttagtaatagctattttattgatattattactttattacatatcttttatagggaaacattctgtgacattaatttcctttctaatttaaaggaga

SEQ ID NO: 406323 - DNA, 2034 bp, Homo sapiens
cgaggccggaactggcggactgcggcgcacttccgtagaggtggacatggcgtgcggctttcgccgcgctattgcttgccaggtatggatcccggagcgcgcagaggagtccctgaggagctagggaccccaaaggcctttcaccgctgcgggccagtcctcagtcagctggagggtgggtcccacggaatcctgttagtttctaccacctcctcccccttctctggagctggtggagcttcagaagtcctgtggagcgtcggctgggatcagtttgtctcggtgaaaagtaaactttgaaagctttccagagtgttgaatcttccaccagaaaacttgatcacatcaatatctgcagttccaatttcccaaaaagaagaagtagctgattttcagctttctgtggattctttattggaaaaagacaatgaccattcaagaccagatattcaagttcaagccaagagactagcagagaagctaagatgtgatacagtggtgagtgaaatcagtactggtcaaaggactgtaaatttcaaaataaacagagagctcttaacaaagacagtgctacaacaagtaattgaagatggctcaaaatatggattaaaaagtgaacttttctctggacttccccagaagaagattgtggttgaattcagttcacctaatgttgccaaaaaatttcatgttggacatttgcgttctaccatcataggaaattttatagcaaatctcaaagaagctttaggacatcaagtaataagaataaattaccttggcgattggggcatgcagtttggtcttctgggaactggcttccagctgtttggctatgaggaaaaactgcagtccaatcctctacagcatctctttgaagtttatgtacaagttaataaagaagcagcagatgataaaagtgtagcaaaagcagcacaggagttcttccaacgattggaactgggcgatgtgcaagcactttcactgtggcaaaaatttcgggacttgagcattgaagagtacattcgggtttacaagcgtctgggagtatattttgatgaatattcaggagaatcattttatcgtgaaaaatctcaagaggtcttaaagttgctggagagtaaaggactcctactgaaaacaataaaaggaacggctgtagtagatctctctgggaatggcgacccctcctcaatttgtactgtaatgcgaagtgatgggacttctctctatgcaaccagagatcttgcagctgctatagatcgaatggacaagtataattttgatacaatgatatatgtgacagataaaggacaaaaaaagcattttcagcaagtattccaaatgctgaagatcatgggatatgactgggcagaaaggtgccagcacgtgccctttggagtagtacagggaatgaagactcgaagaggagatgtcactttcctggaagatgttttaaatgagattcaattaaggatgctacagaacatggcttcaattaagacaactaaagaactcaagaacccacaagagactgcagagagggtcgggctcgcagcactcattattcaggacttcaaaggtttactcttatctgactacaagttcagctgggatcgtgttttccagagtcgcggggacacaggagtcttcctacagtacacacacgcccgcctccacagtttggaagagacttttggatgtgggtacctgaatgacttcaacactgcttgtttacaagagccacagtctgtttcaattcttcagcatcttctcaggttcgacgaggtgctttataaatcatctcaggactttcaacccaggcatatcgtcagttaccttctaactttaagtcatcttgcagctgtggcacacaaaacactacaaataaaagatagtcctcctgaagtggctggggccagacttcatcttttcaaagctgtccgttctgtcctagccaatggaatgaaacttcttggaataacacctgtatgtaggatgtaatttccattaaaatggcttttaaaatgtcaa

SEQ ID NO: 406324 - DNA, 2027 bp, Homo sapiens
cgaggccggaactggcggactgcggcgcacttccgtagaggtggacatggcgtgcggctttcgccgcgctattgcttgccagctttccagagtgttgaatcttccaccagaaaacttgatcacatcaatatctgcagttccaatttcccaaaaagaagaagtagctgattttcagctttctgtggattctttattggaaaaagacaatgaccattcaagaccagatattcaagttcaagccaagagactagcagagaagctaagatgtgatacagtggtgagtgaaatcagtactggtcaaaggactgtaaatttcaaaataaacagagagctcttaacaaagacagtgctacaacaagtaattgaagatggctcaaaatatggattaaaaagtgaacttttctctggacttccccagaagaagattgtggttgaattcagttcacctaatgttgccaaaaaatttcatgttggacatttgcgttctaccatcataggaaattttatagcaaatctcaaagaagctttaggacatcaagtaataagaataaattaccttggcgattggggcatgcagtttggtcttctgggaactggcttccagctgtttggctatgaggaaaaactgcagtccaatcctctacagcatctctttgaagtttatgtacaagttaataaagaagcagcagatgataaaagtgtagcaaaagcagcacaggagttcttccaacgattggaactgggcgatgtgcaagcactttcactgtggcaaaaatttcgggacttgagcattgaagagtacattcgggtttacaagcgtctgggagtatattttgatgaatattcaggagaatcattttatcgtgaaaaatctcaagaggtcttaaagttgctggagagtaaaggactcctactgaaaacaataaaaggaacggctgtagtagatctctctgggaatggcgacccctcctcaatttgtactgtaatgcgaagtgatgggacttctctctatgcaaccagagatcttgcagctgctatagatcgaatggacaagtataattttgatacaatgatatatgtgacagataaaggacaaaaaaagcattttcagcaagtattccaaatgctgaagatcatgggatatgactgggcagaaaggtgccagcacgtgccctttggagtagtacagggaatgaagactcgaagaggagatgtcactttcctggaagatgttttaaatgagattcaattaaggatgctacagaacatggcttcaattaagacaactaaagaactcaagaacccacaagagactgcagagagggtcgggctcgcagcactcattattcaggacttcaaaggtttactcttatctgactacaagttcagctgggatcgtgttttccagagtcgcggggacacaggagtcttcctacagtacacacacgcccgcctccacagtttggaagagacttttggatgtgggtacctgaatgacttcaacactgcttgtttacaagagccacagtctgtttcaattcttcagcatcttctcaggttcgacgaggtgctttataaatcatctcaggactttcaacccaggcatatcgtcagttaccttctaactttaagtcatcttgcagctgtggcacacaaaacactacaaataaaagatagtcctcctgaagtggctggggccagacttcatcttttcaaagctgtccgttctgtcctagccaatggaatgaaacttcttggaataacacctgtatgtaggatgtaatttccattaaaatggcttttaaaatgtcaacatttaacaattgggttttcacaactgtcctcatcccctccctccccacacactctcgggggctcctattcccgggctcccgccacacgacgtctcccacatgggcccctcggctcctccgctggtccccggacccagcttctttcgccccagcggggaccatcccgcggcccccctaaccggcccgctcattccgcatcagcccggtctgagt

SEQ ID NO: 406325 - DNA, 3088 bp, Homo sapiens
tgttcctgaattatttaagtttcttatagattctggatattagacctttcttagatgcatagcttatgaatattttctcccattatttaggttgtagggaaagggagagcttttgattttttttaagcattacagataatgttgaagtcactgatatatatttgtttgactgcattccctaccctgcttccctagagagaactgatctcatgatgcaaatgatttattttcacgaatcagttgctttgtgtttgtttctttgtttttgtatttttttttcacctacccagtgaaaaggataaatggcattgtccatctctttaatgaactactgagtgttaagaagaatattcttctttttctcatgttgaaactcaaattacaacatttaaaaaatatgtcatttggaggtcagtggagaggtttgaattagaagcatgtatttggagtagtagaggaagcattgtagaagaggtaaagagacctgggcttttttctcagtctgtttttttttgcagtaggattttaaaggagacatttagcttgccagacatcagttttcatgtctataaaataaggtggctagtataagaggaagaattttttgagactaggtcttgctctgtcacccagactggagtgcagtggcatgatctcagctcactgcaacctctgcctcctgggttcaagcaattctcgtgcctaagcctcccgagtagctgggcttacgggcacatgccaccacgcctggctaatttttgtatttttagtagagatggggtttttccatgttggccaggctggtctcaaactcctgaccttaagtggtccacttgcctcggcctcccaaagtgctgggatctgtgcccagacagaagaggaagaattttataagatgataagaaaaacattctgaataaatactaggttatttctcattttcttgcttttaattttgttttttatttatttattttattttatttacttttttgagacagagtttcgctcttgtcacccaggctggagtgcagtggcacaatcttgactcgctgcagtctccacctccaggattcaagcgattcccctgcctcagtctcccaagcagctgggattgtaggtacacaccaccatgcctggctaatttttgtgtgtgtgtgtgtatttttagtagagatggggttttaccatgtggccaggctggtctagaactcaacctcaggtgatccgcctgccttagcctcccaaagtgctgggattacaggcatgagccaccgctctcggcccccttgcttttaattttgaaagtacacataacaccttcttctggtaaaggtatgtctcaatggagaactcatagtgattagtctttgtttaacaactaatgcttttaaggtaacagttctatctcgtttcgatgtctgtctttagagaagtagctgattttcagctttctgtggattctttattggaaaaagacaatgaccattcaagaccagatattcaagttcaagccaagagactagcagagaagctaagatgtgatacagtggtgagtgaaatcagtactggtcaaaggactgtaaatttcaaaataaacagagagctcttaacaaagacagtgctacaacaagtaattgaagatggctcaaaatatggattaaaaagtgaacttttctctggacttccccagaagaagattgtggttgaattcagttcacctaatgttgccaaaaaatttcatgttggacatttgcgttctaccatcataggaaattttatagcaaatctcaaagaagctttaggacatcaagtaataagaataaattaccttggcgattggggcatgcagtttggtcttctgggaactggcttccagctgtttggctatgaggaaaaactgcagtccaatcctctacagcatctctttgaagtttatgtacaagttaataaagaagcagcagatgataaaagtgtagcaaaagcagcacaggagttcttccaacgattggaactgggcgatgtgcaagcactttcactgtggcaaaaatttcgggacttgagcattgaagagtacattcgggtttacaagcgtctgggagtatattttgatgaatattcaggagaatcattttatcgtgaaaaatctcaagaggtcttaaagttgctggagagtaaaggactcctactgaaaacaataaaaggaacggctgtagtagatctctctgggaatggcgacccctcctcaatttgtactgtaatgcgaagtgatgggacttctctctatgcaaccagagatcttgcagctgctatagatcgaatggacaagtataattttgatacaatgatatatgtgacagataaaggacaaaaaaagcattttcagcaagtattccaaatgctgaagatcatgggatatgactgggcagaaaggtgccagcacgtgccctttggagtagtacagggaatgaagactcgaagaggagatgtcactttcctggaagatgttttaaatgagattcaattaaggatgctacagaacatggcttcaattaagacaactaaagaactcaagaacccacaagagactgcagagagggtcgggctcgcagcactcattattcaggacttcaaaggtttactcttatctgactacaagttcagctgggatcgtgttttccagagtcgcggggacacaggagtcttcctacagtacacacacgcccgcctccacagtttggaagagacttttggatgtgggtacctgaatgacttcaacactgcttgtttacaagagccacagtctgtttcaattcttcagcatcttctcaggttcgacgaggtgctttataaatcatctcaggactttcaacccaggcatatcgtcagttaccttctaactttaagtcatcttgcagctgtggcacacaaaacactacaaataaaagatagtcctcctgaagtggctggggccagacttcatcttttcaaagctgtccgttctgtcctagccaatggaatgaaacttcttggaataacacctgtatgtaggatgtaatttccattaaaatggcttttaaaatgtcaa

SEQ ID NO: 406326 - DNA, 2259 bp, Homo sapiens
cgaggccggaactggcggactgcggcgcacttccgtagaggtggacatggcgtgcggctttcgccgcgctattgcttgccagctttccagagtgttgaatcttccaccagaaaacttgatcacatcaatatctgcagttccaatttcccaaaaagaagaagtagctgattttcagctttctgtggattctttattggaaaaagacaatgaccattcaagaccagatattcaagttcaagccaagagactagcagagaagctaagatgtgatacagtggtgagtgaaatcagtactggtcaaaggactgtaaatttcaaaataaacagagagctcttaacaaagacagtgctacaacaagtaattgaagatggctcaaaatatggattaaaaagtgaacttttctctggacttccccagaagaagattgtggttgaattcagttcacctaatgttgccaaaaaatttcatgttggacatttgcgttctaccatcataggaaattttatagcaaatctcaaagaagctttaggacatcaagtaataagaataaattaccttggcgattggggcatgcagtttggtcttctgggaactggcttccagctgtttggctatgaggaaaaactgcagtccaatcctctacagcatctctttgaagtttatgtacaagttaataaagaagcagcagatgataaaagtgtagcaaaagcagcacaggagttcttccaacgattggaactgggcgatgtgcaagcactttcactgtggcaaaaatttcgggacttgagcattgaagagtacattcgggtttacaagcgtctgggagtatattttgatgaatattcaggagaatcattttatcgtgaaaaatctcaagaggtcttaaagttgctggagagtaaaggactcctactgaaaacaataaaaggaacggctgtagtagatctctctgggaatggcgacccctcctcaatttgtactgtaatgcgaagtgatgggacttctctctatgcaaccagagatcttgcagctgctatagatcgaatggacaagtataattttgatacaatgatatatgtgacagataaaggacaaaaaaagcattttcagcaagtattccaaatgctgaagatcatgggatatgactgggcagaaaggtgccagcacgtgccctttggagtagtacagggaatgaagactcgaagaggagatgtcactttcctggaagatgttttaaatgagattcaattaaggatgctacagaacatggcttcaattaagacaactaaagaactcaagaacccacaagagactgcagagagggtcgggctcgcagcactcattattcaggacttcaaaggtttactcttatctgactacaagttcagctgggatcgtgttttccagagtcgcggggacacaggagtcttcctacagtacacacacgcccgcctccacagtttggaagagacttttggatgtgggtacctgaatgacttcaacactgcttgtttacaagagccacagtctgtttcaattcttcagcatcttctcaggtatgatgttttccagggatcatcaagtgtgcttctgcttatcaaaatggctattagcatttttgctgcccagtagagtcaacagtccagtagctgccttctgcctctagacttttcccaaaggtatgccttaaaaagtgattatttgcattttgaggacagagggcatagattaagccaatgcccaaggaggacagtctttgggtcttcagaatattatcactgatgaatagcgcacatgtctagctgcctctagctcacataaagccttataaaagcataaccttttttagttttagtttgagaaagagcatcttcttgctctctgtggtaagtgaaggaaaatacctgcctttgtgcagcttcccagagaccgtaagtccttcatttgcctcttggtttcggttcacaatctcaaatacatatatgtatgtgatgctcccatgctaggcaagacacccacacattttagctctgacgggcattgttggtgaagccaaacatgccagagattagtctctagaagggatgtggatggttatgaacaaggtggttttctttgattgccatatagtagtcagtggttctttcctggaatcagaaaaatttactcacatgtacaatagggaatgtacggaaaaataagccaactgggttttcttagcattgagggtagactttgctaatttatattttatattc

SEQ ID NO: 406327 - DNA, 2157 bp, Homo sapiens
cgaggccggaactggcggactgcggcgcacttccgtagaggtggacatggcgtgcggctttcgccgcgctattgcttgccagctttccagagtgttgaatcttccaccagaaaacttgatcacatcaatatctgcagttccaatttcccaaaaagaagaagtagctgattttcagctttctgtggattctttattggaaaaagacaatgaccattcaagaccagatattcaagttcaagccaagagactagcagagaagctaagatgtgatacagtggtgagtgaaatcagtactggtcaaaggactgtaaatttcaaaataaacagagagctcttaacaaagacagtgctacaacaagtaattgaagatggctcaaaatatggattaaaaagtgaacttttctctggacttccccagaagaagattgtggttgaattcagttcacctaatgttgccaaaaaatttcatgttggacatttgcgttctaccatcataggaaattttatagcaaatctcaaagaagctttaggacatcaagtaataagaataaattaccttggcgattggggcatgcagtttggtcttctgggaactggcttccagctgtttggctatgaggaaaaactgcagtccaatcctctacagcatctctttgaagtttatgtacaagttaataaagaagcagcagatgataaaagtgtagcaaaagcagcacaggagttcttccaacgattggaactgggcgatgtgcaagcactttcactgtggcaaaaatttcgggacttgagcattgaagagtacattcgggtttacaagcgtctgggagtatattttgatgaatattcaggagaatcattttatcgtgaaaaatctcaagaggtcttaaagttgctggagagtaaaggactcctactgaaaacaataaaaggaacggctgtagtagatctctctgggaatggcgacccctcctcaatttgtactgtaatgcgaagtgatgggacttctctctatgcaaccagagatcttgcagctgctatagatcgaatggacaagtataattttgatacaatgatatatgtgacagataaaggacaaaaaaagcattttcagcaagtattccaaatgctgaagatcatgggatatgactgggcagaaaggtgccagcacgtgccctttggagtagtacagggaatgaagactcgaagaggagatgtcactttcctggaagatgttttaaatgagattcaattaaggatgctacagaacatggcttcaattaagacaactaaagaactcaagaacccacaagagactgcagagagggtcgggctcgcagcactcattattcaggacttcaaaggtttactcttatctgactacaagttcagctgggatcgtgttttccagagtcgcggggacacaggagtcttcctacagtacacacacgcccgcctccacagtttggaagagacttttggatgtgggtacctgaatgacttcaacactgcttgtttacaagagccacagtctgtttcaattcttcagcatcttctcaggttcgacgaggtgctttataaatcatctcaggactttcaacccaggcatatcgtcagttaccttctaactttaagatggtgtctcgctctgttgtccaggctggagcgtgatctcggctcactgcaacctccacctgctggattcaagcgattctcctgcctcagcctccctagtagctgggattacagtcatcttgcagctgtggcacacaaaacactacaaataaaagatagtcctcctgaagtggctggggccagacttcatcttttcaaagctgtccgttctgtcctagccaatggaatgaaacttcttggaataacacctgtatgtaggatgtaatttccattaaaatggcttttaaaatgtcaaaaaaaaaaaaaaaagaacgaaaaacaaaacaaacaaaaacacgacggggcctacatagatccgggggggggcggggaaaagagcgtatatggacaggggaccatggggtccaatacgtggtttctgaccccaggtttctgtgtgcacaaggggggaaaagctgccggggtcccccaatgggggggcggatgaactcggaaagccggggacccggaaagtacgcacaaaaa

SEQ ID NO: 406328 - DNA, 1936 bp, Homo sapiens
cgaggccggaactggcggactgcggcgcacttccgtagaggtggacatggcgtgcggctttcgccgcgctattgcttgccagctttccagagtgttgaatcttccaccagaaaacttgatcacatcaatatctgcagttccaatttcccaaaaagaagaagtagctgattttcagctttctgtggattctttattggaaaaagacaatgaccattcaagaccagatattcaagttcaagccaagagactagcagagaagctaagatgtgatacagtggtgagtgaaatcagtactggtcaaaggactgtaaatttcaaaataaacagagagctcttaacaaagacagtgctacaacaagtaattgaagatggctcaaaatatggattaaaaagtgaacttttctctggacttccccagaagaagattgtggttgaattcagttcacctaatgttgccaaaaaatttcatgttggacatttgcgttctaccatcataggaaattttatagcaaatctcaaagaagctttaggacatcaagtaataagaataaattaccttggcgattggggcatgcagtttggtcttctgggaactggcttccagctgtttggctatgaggaaaaactgcagtccaatcctctacagcatctctttgaagtttatgtacaagttaataaagaagcagcagatgataaaagtgtagcaaaagcagcacaggagttcttccaacgattggaactgggcgatgtgcaagcactttcactgtggcaaaaatttcgggacttgagcattgaagagtacattcgggtttacaagcgtctgggagtatattttgatgaatattcaggagaatcattttatcgtgaaaaatctcaagaggtcttaaagttgctggagagtaaaggactcctactgaaaacaataaaaggaacggctgtagtagatctctctgggaatggcgacccctcctcaatttgtactgtaatgcgaagtgatgggacttctctctatgcaaccagagatcttgcagctgctatagatcgaatggacaagtataattttgatacaatgatatatgtgacagataaaggacaaaaaaagcattttcagcaagtattccaaatgctgaagatcatgggatatgactgggcagaaaggtgccagcacgtgccctttggagtagtacagggaatgaagactcgaagaggagatgtcactttcctggaagatgttttaaatgagattcaattaaggatgctacagaacatggcttcaattaagacaactaaagaactcaagaacccacaagagactgcagagagggtcgggctcgcagcactcattattcaggacttcaaaggtttactcttatctgactacaagttcagctgggatcgtgttttccagagtcgcggggacacaggagtcttcctacagtacacacacgcccgcctccacagtttggaagagacttttggatgtgggtacctgaatgacttcaacactgcttgtttacaagagccacagtctgtttcaattcttcagcatcttctcaggtatgatgttttccagggatcatcaagtgtgcttctgcttatcaaaatggctattagcatttttgctgcccagtagagtcaacagtccagtagctgccttctgcctctagacttttcccaaaggttcgacgaggtgctttataaatcatctcaggactttcaacccaggcatatcgtcagttaccttctaactttaagtcatcttgcagctgtggcacacaaaacactacaaataaaagatagtcctcctgaagtggctggggccagacttcatcttttcaaagctgtccgttctgtcctagccaatggaatgaaacttcttggaataacacctgtatgtaggatgtaatttccattaaaatggcttttaaaatgtcaa

SEQ ID NO: 406329 - DNA, 1626 bp, Homo sapiens
cgaggccggaactggcggactgcggcgcacttccgtagaggtggacatggcgtgcggctttcgccgcgctattgcttgccagctttccagagtgttgaatcttccaccagaaaacttgatcacatcaatatctgcagttccaatttcccaaaaagaacagtgctacaacaagtaattgaagatggctcaaaatatggattaaaaagtgaacttttctctggacttccccagaagaagattgtggttgaattcagttcacctaatgttgccaaaaaatttcatgttggacatttgcgttctaccatcataggaaattttatagcaaatctcaaagaagctttaggacatcaagtaataagaataaattaccttggcgattggggcatgcagtttggtcttctgggaactggcttccagctgtttggctatgaggaaaaactgcagtccaatcctctacagcatctctttgaagtttatgtacaagttaataaagaagcagcagatgataaaagtgtagcaaaagcagcacaggagttcttccaacgattggaactgggcgatgtgcaagcactttcactgtggcaaaaatttcgggacttgagcattgaagagtacattcgggtttacaagcgtctgggagtatattttgatgaatattcaggagaatcattttatcgtgaaaaatctcaagaggtcttaaagttgctggagagtaaaggactcctactgaaaacaataaaaggaacggctgtagtagatctctctgggaatggcgacccctcctcaatttgtactgtaatgcgaagtgatgggacttctctctatgcaaccagagatcttgcagctgctatagatcgaatggacaagtataattttgatacaatgatatatgtgacagataaaggacaaaaaaagcattttcagcaagtattccaaatgctgaagatcatgggatatgactgggcagaaaggtgccagcacgtgccctttggagtagtacagggaatgaagactcgaagaggagatgtcactttcctggaagatgttttaaatgagattcaattaaggatgctacagaacatggcttcaattaagacaactaaagaactcaagaacccacaagagactgcagagagggtcgggctcgcagcactcattattcaggacttcaaaggtttactcttatctgactacaagttcagctgggatcgtgttttccagagtcgcggggacacaggagtcttcctacagtacacacacgcccgcctccacagtttggaagagacttttggatgtgggtacctgaatgacttcaacactgcttgtttacaagagccacagtctgtttcaattcttcagcatcttctcaggttcgacgaggtgctttataaatcatctcaggactttcaacccaggcatatcgtcagttaccttctaactttaagtcatcttgcagctgtggcacacaaaacactacaaataaaagatagtcctcctgaagtggctggggccagacttcatcttttcaaagctgtccgttctgtcctagccaatggaatgaaacttcttggaataacacctgtatgtaggatgtaatttccattaaaatggcttttaaaatgtcaa

SEQ ID NO: 406330 - DNA, 1604 bp, Homo sapiens
cgaggccggaactggcggactgcggcgcacttccgtagaggtggacatggcgtgcggctttcgccgcgctattgcttgccagctttccagagtgttgaatcttccaccagaaaacttgatcacatcaatatctgcagttccaatttcccaaaaagaagaagtagctgattttcagctttctgtggattctttattggaaaaagacaatgaccattcaagaccagatattcaagttcaagccaagagactagcagagaagctaagatgtgatacagtggtgagtgaaatcagtactggtcaaaggactgtaaatttcaaaataaacagagagctcttaacaaagacagtgctacaacaagtaattgaagatggctcaaaatatggattaaaaagtgaacttttctctggacttccccagaagaagattgtggttgaattcagttcacctaatgttgccaaaaaatttcatgttggacatttgcgttctaccatcataggaaattttatagcaaatctcaaagaagctttaggacatcaagtaataagaataaattaccttggcgattggggcatgcagtttggtcttctgggaactggcttccagctgtttggctatgaggaaaaactgcagtccaatcctctacagcatctctttgaagtttatgtacaagttaataaagaagcagcagatgataaaagtgtagcaaaagcagcacaggagttcttccaacgattggaactgggcgatgtgcaagcactttcactgtggcaaaaatttcgggacttgagcattgaagagtacattcgggtttacaagcgtctgggagtatattttgatgaatattcaggagaatcattttatcgtgaaaaatctcaagaggtcttaaagttgctggagagtaaaggactcctactgaaaacaataaaaggaacggctgtagtagatctctctgggaatggcgacccctcctcaatttgtactgtaatgcgaagtgatgggacttctctctatgcaaccagagatcttgcagctgctatagatcgaatggacaagtataattttgatacaatgatatatgtgacagataaaggacaaaaaaagcattttcagcaagtattccaaatgctgaagatcatgggatatgactgggcagaaaggtgccagcacgtgccctttggagtagtacagggaatgaagactcgaagaggagatgtcactttcctggaagatgttttaaatgagattcaattaaggatgctacagaacatggcttcaattaagacaactaaagaactcaagaacccacaagagactgcagagagggtcgggctcgcagcactcattattcaggacttcaaaggtttactcttatctgactacaagttcagctgggatcgtgttttccagagtcgcggggacacaggagtcttcctacagtacacacacgcccgcctccacaggtgagaagaggctgcagggaaaccttgtgctgcactgtgcttacttaggctaggtcctgtgattctaagaccagaggccctgttttctgggcttttccaatatcttctattcacatctgactagagtagaccttcttttagga

SEQ ID NO: 406331 - DNA, 1476 bp, Homo sapiens
cgaggccggaactggcggactgcggcgcacttccgtagaggtggacatggcgtgcggctttcgccgcgctattgcttgccagctttccagagtgttgaatcttccaccagaaaacttgatcacatcaatatctgcagttccaatttcccaaaaagaagaagtagctgattttcagctttctgtggattctttattggaaaaagacaatgaccattcaagaccagatattcaagttcaagccaagagactagcagagaagctaagatgtgatacagtggtgagtgaaatcagtactggtcaaaggactgtaaatttcaaaataaacagagagctcttaacaaagacagtgctacaacaagtaattgaagatggctcaaaatatggattaaaaagtgaacttttctctggacttccccagaagaagattgtggttgaattcagttcacctaatgttgccaaaaaatttcatgttggacatttgcgttctaccatcataggaaattttatagcaaatctcaaagaagctttaggacatcaagtaataagaataaattaccttggcgattggggcatgcagtttggtcttctgggaactggcttccagctgtttggctatgaggaaaaactgcagtccaatcctctacagcatctctttgaagtttatgtacaagttaataaagaagcagcagatgataaaagtgtagcaaaagcagcacaggagttcttccaacgattggaactgggcgatgtgcaagcactttcactgtggcaaaaatttcgggacttgagcattgaagagtacattcgggtttacaagcgtctgggagtatattttgatgaatattcaggagaatcattttatcgtgaaaaatctcaagaggtcttaaagttgctggagagtaaaggactcctactgaaaacaataaaaggaacggctgtagtagatctctctgggaatggcgacccctcctcaatttgtactgtaatgcgaagtgatgggacttctctctatgcaaccagagatcttgcagctgctatagatcgaatggacaagtataattttgatacaatgatatatgtgacagataaaggacaaaaaaagcattttcagcaagtattccaaatgctgaagatcatgggatatgactgggcagaaaggtgccagcacgtgccctttggagtagtacagggaatgaagactcgaagaggagatgtcactttcctggaagatgttttaaatgagattcaattaaggatgctacagaacatggcttcaattaagagtgaattcagttttttcttattaaagtcataacttacgtgccacttttatgttattctggactttgggcagtgtgatttattatgtctgtccctccattgaagtgtcactaactttgtcaaaaatacctttcactaattagaggtgccagaatttttatactcgctactcaggaattggtcacttcaataatc

SEQ ID NO: 406332 - DNA, 1673 bp, Homo sapiens
cgaggccggaactggcggactgcggcgcacttccgtagaggtggacatggcgtgcggctttcgccgcgctattgcttgccagctttccagagtgttgaatcttccaccagaaaacttgatcacatcaatatctgcagttccaatttcccaaaaagaagaagtagctgattttcagctttctgtggattctttattggaaaaagacaatgaccattcaagaccagatattcaagttcaagccaagagactagcagagaagctaagatgtgatacagtggtgagtgaaatcagtactggtcaaaggactgtaaatttcaaaataaacagagagctcttaacaaagacagtgctacaacaagtaattgaagatggctcaaaatatggattaaaaagtgaacttttctctggacttccccagaagaagattgtggttgaattcaggtcttctgggaactggcttccagctgtttggctatgaggaaaaactgcagtccaatcctctacagcatctctttgaagtttatgtacaagttaataaagaagcagcagatgataaaagtgtagcaaaagcagcacaggagttcttccaacgattggaactgggcgatgtgcaagcactttcactgtggcaaaaatttcgggacttgagcattgaagagtacattcgggtttacaagcgtctgggagtatattttgatgaatattcaggagaatcattttatcgtgaaaaatctcaagaggtcttaaagttgctggagagtaaaggactcctactgaaaacaataaaaggaacggctgtagtagatctctctgggaatggcgacccctcctcaatttgtactgtaatgcgaagtgatgggacttctctctatgcaaccagagatcttgcagctgctatagatcgaatggacaagtataattttgatacaatgatatatgtgacagataaaggacaaaaaaagcattttcagcaagtattccaaatgctgaagatcatgggatatgactgggcagaaaggtgccagcacgtgccctttggagtagtacagggaatgaagactcgaagaggagatgtcactttcctggaagatgttttaaatgagattcaattaaggatgctacagaacatggcttcaattaagacaactaaagaactcaagaacccacaagagactgcagagagggtcgggctcgcagcactcattattcaggacttcaaaggtttactcttatctgactacaagttcagctgggatcgtgttttccagagtcgcggggacacaggagtcttcctacagtacacacacgcccgcctccacagtttggaagagacttttggatgtgggtacctgaatgacttcaacactgcttgtttacaagagccacagtctgtttcaattcttcagcatcttctcaggttcgacgaggtgctttataaatcatctcaggactttcaacccaggcatatcgtcagttaccttctaactttaagtcatcttgcagctgtggcacacaaaacactacaaataaaagatagtcctcctgaagtggctggggccagacttcatcttttcaaagctgtccgttctgtcctagccaatggaatgaaacttcttggaataacacctgtatgtaggatgtaatttccattaaaatggcttttaaaatgtcaa

SEQ ID NO: 406333 - DNA, 731 bp, Homo sapiens
aatttggatttctttccctttaatgtaggcaggggaaatgtcattatcaaaggtaaaatagcctaaattaggcaagtaattactcattctgaatctgttcttgattgtcagcatacatttttggcagatgttaccttcacttggatccatgattggcacagtgtcatgtagactaaagatagctgcctttgtctgtttcagcaactaaagaactcaagaacccacaagagactgcagagagggtcgggctcgcagcactcattattcaggacttcaaaggtttactcttatctgactacaagttcagctgggatcgtgttttccagagtcgcggggacacaggagtcttcctacagtacacacacgcccgcctccacagtttggaagagacttttggatgtgggtacctgaatgacttcaacactgcttgtttacaagagccacagtctgtttcaattcttcagcatcttctcaggttcgacgaggtgctttataaatcatctcaggactttcaacccaggcatatcgtcagttaccttctaactttaagtcatcttgcagctgtggcacacaaaacactacaaataaaagatagtcctcctgaagtggctggggccagacttcatcttttcaaagctgtccgttctgtcctagccaatggaatgaaacttcttggaataacacctgtatgtaggatgtaatttccattaaaatggcttttaaaatgtcaa

SEQ ID NO: 406334 - DNA, 1009 bp, Homo sapiens
cgaggccggaactggcggactgcggcgcacttccgtagaggtggacatggcgtgcggctttcgccgcgctattgcttgccaggtatggatcccggagcgcgcagaggagtccctgaggagctagggaccccaaaggcctttcaccgctgcgggccagtcctcagtcagctggagggtgggtcccacggaatcctgttagtttctaccacctcctcccccttctctggagctggtggagcttcagaagtcctgtggagcgtcggctgggatcagtttgtctcggtgaaaagtaaactttgaaagctttccagagtgttgaatcttccaccagaaaacttgatcacatcaatatctgcagttccaatttcccaaaaagaagaagtagctgattttcagctttctgtggattctttattggaaaaagacaatgaccattcaagaccagatattcaagttcaagccaagagactagcagagaagctaagatgtgatacagtggtgagtgaaatcagtactggtcaaaggactgtaaatttcaaaataaacagagagctcttaacaaagacagtgctacaacaagtaattgaagatggctcaaaatatggattaaaaagtgaacttttctctggacttccccagaagaagattgtggttgaattcagttcacctaatgttgccaaaaaatttcatgttggacatttgcgttctaccatcataggaaattttatagcaaatctcaaagaagctttaggacatcaagtaataagaataaattaccttggcgattggggcatgcagtttggtcttctgggaactggcttccagctgtttggctatgaggaaaaactgcagtccaatcctctacagcatctctttgaagtctagagacaagatcgctatgtagacacaccgtgaaccatttcccactgtgggcctgcaccaccccaggggcttcctagcttctgctcttctggaagtcttccccatctcctccccattccaggtaatt

SEQ ID NO: 406335 - DNA, 815 bp, Homo sapiens
aatttggatttctttccctttaatgtaggcaggggaaatgtcattatcaaaggtaaaatagcctaaattaggcaagtaattactcattctgaatctgttcttgattgtcagcatacatttttggcagatgttaccttcacttggatccatgattggcacagtgtcatgtagactaaagatagctgcctttgtctgtttcagcaactaaagaactcaagaacccacaagagactgcagagagggtcgggctcgcagcactcattattcaggtctgttaagactcctacctgtgaggcccttttgtttggtactagagcaaatcccagcagtgaagatttcctctgtcgttttaggacttcaaaggtttactcttatctgactacaagttcagctgggatcgtgttttccagagtcgcggggacacaggagtcttcctacagtacacacacgcccgcctccacagtttggaagagacttttggatgtgggtacctgaatgacttcaacactgcttgtttacaagagccacagtctgtttcaattcttcagcatcttctcaggttcgacgaggtgctttataaatcatctcaggactttcaacccaggcatatcgtcagttaccttctaactttaagtcatcttgcagctgtggcacacaaaacactacaaataaaagatagtcctcctgaagtggctggggccagacttcatcttttcaaagctgtccgttctgtcctagccaatggaatgaaacttcttggaataacacctgtatgtaggatgtaatttccattaaaatggcttttaaaatgtcaa

SEQ ID NO: 406336 - DNA, 935 bp, Homo sapiens
cgaggccggaactggcggactgcggcgcacttccgtagaggtggacatggcgtgcggctttcgccgcgctattgcttgccagctttccagagtgttgaatcttccaccagaaaacttgatcacatcaatatctgcagttccaatttcccaaaaagaagaagtagctgattttcagctttctgtggattctttattggaaaaagacaatgaccattcaagaccagatattcaagttcaagccaagagactagcagagaagctaagatgtgatacagtggtgagtgaaatcagtactggtcaaaggactgtaaatttcaaaataaacagagagctcttaacaaagacagtgctacaacaagtaattgaagatggctcaaaatatggattaaaaagtgaacttttctctggacttccccagaagaagattgtggttgaattcagttcacctaatgttgccaaaaaatttcatgttggacatttgcgttctaccatcataggtaagtgtttagtttcacataaaatgctaaacgttcctttgaggaagtatttgatagttcaatttaatgttttaatgcttaaataacaaaatagcaaaaaacaaaaagtttaaatttatatgagcctcctgccaattcaggaaatggatgacattggttaccactgttttgtggaaacacaaaattgatttcaaaaccaaaagattcactgagaaactaattttaactgctatatatgttatgatttttaactttctaaaaataagtataaatatggggaagacctgaaagatgcaaaagtaaaaatagttatgtggggatgtataacctttcagatttttttgttcatttattttgtggtttttttgtcacttaggcagaggttgcagtgagctgcgcaccactgcactacagcctgggtgacagagctaggttctg

SEQ ID NO: 406337 - DNA, 549 bp, Homo sapiens
atgttagaaatacatttatgtgtattatcttagtcctcagaataaccctgtcgaaaaatatactgttacctccactgtgtatggatattaaggagaccaaaattgtgtattataaggtcatgttcatcacttgcagctctgtgcccttgtatgactttttaatcttttgatgtttttaactttaaacttttgataagtttggaagagacttttggatgtgggtacctgaatgacttcaacactgcttgtttacaagagccacagtctgtttcaattcttcagcatcttctcaggttcgacgaggtgctttataaatcatctcaggactttcaacccaggcatatcgtcagttaccttctaactttaagtcatcttgcagctgtggcacacaaaacactacaaataaaagatagtcctcctgaagtggctggggccagacttcatcttttcaaagctgtccgttctgtcctagccaatggaatgaaacttcttggaataacacctgtatgtaggatgtaatttccattaaaatggcttttaaaatgtcaa

SEQ ID NO: 406338 - DNA, 385 bp, Homo sapiens
tttaaacaaaaataatgaggtcctcgccatcttgcccaggctgggcttgaactcctgggcgcaagtgatcctcctgcctcagcctcccaaagtgctgggattatgggcatgagccaccacactcagcccttgatttaatttttattgtgttcatgtgtgtgacaggtggtagagcatccttaattttgccttagggtaagaataggagattcaattaacatttctttgtctttttgtttctgaactcttttagcgtctgggagtatattttgatgaatattcaggagaatcattttatcgtgaaaaatctcaagaggtcttaaagttgctggagagtaaaggactcctactgaaaacaatgtatgatcaggttactattcttcag

SEQ ID NO: 406339 - DNA, 1813 bp, Homo sapiens
cgaggccggaactggcggactgcggcgcacttccgtagaggtggacatggcgtgcggctttcgccgcgctattgcttgccagctttccagagtgttgaatcttccaccagaaaacttgatcacatcaatatctgcagttccaatttcccaaaaagaagaagtagctgattttcagctttctgtggattctttattggaaaaagacaatgaccattcaagaccagatattcaagttcaagccaagagactagcagagaagctaagatgtgatacagtggtgagtgaaatcagtactggtcaaaggactgtaaatttcaaaataaacagagagctcttaacaaagacagtgctacaacaagtaattgaagatggctcaaaatatggattaaaaagtgaacttttctctggacttccccagaagaagattgtggttgaattcagttcacctaatgttgccaaaaaatttcatgttggacatttgcgttctaccatcataggaaattttatagcaaatctcaaagaagctttaggacatcaagtaataagaataaattaccttggcgattggggcatgcagtttggtcttctgggaactggcttccagctgtttggctatgaggaaaaactgcagtccaatcctctacagcatctctttgaagtttatgtacaagttaataaagaagcagcagatgataaaagtgtagcaaaagcagcacaggagttcttccaacgattggaactgggcgatgtgcaagcactttcactgtggcaaaaatttcgggacttgagcattgaagagtacattcgggtttacaagcgtctgggagtatattttgatgaatattcaggagaatcattttatcgtgaaaaatctcaagaggtcttaaagttgctggagagtaaaggactcctactgaaaacaataaaaggaacggctgtagtagatctctctgggaatggcgacccctcctcaatttgtactgtaatgcgaagtgatgggacttctctctatgcaaccagagatcttgcagctgctatagatcgaatggacaagtataattttgatacaatgatatatgtgacagataaaggacaaaaaaagcattttcagcaagtattccaaatgctgaagatcatgggatatgactgggcagaaaggtgccagcacgtgccctttggagtagtacagggaatgaagactcgaagaggagatgtcactttcctggaagatgttttaaatgagattcaattaaggatgctacagaacatggcttcaattaagacaactaaagaactcaagaacccacaagagactgcagagagggtcgggctcgcagcactcattattcaggacttcaaaggtttactcttatctgactacaagttcagctgggatcgtgttttccagagtcgcggggacacaggagtcttcctacagtacacacacgcccgcctccacagtttggaagagacttttggatgtgggtacctgaatgacttcaacactgcttgtttacaagagccacagtctgtttcaattcttcagcatcttctcaggttcgacgaggtgctttataaatcatctcaggactttcaacccaggcatatcgtcagttaccttctaactttaagtcatcttgcagctgtggcacacaaaacactacaaataaaagatagtcctcctgaagtggctggggccagacttcatcttttcaaagctgtccgttctgtcctagccaatggaatgaaacttcttggaataacacctgtatgtaggatgtaatttccattaaaatggcttttaaaatgtcaa

SEQ ID NO: 406340 - DNA, 563 bp, Homo sapiens
cgaggccggaactggcggactgcggcgcacttccgtagaggtggacatggcgtgcggctttcgccgcgctattgcttgccagctttccagagtgttgaatcttccaccagaaaacttgatcacatcaatatctgcagttccaatttcccaaaaagagctggagtgcagtggcacaatcttgactcgctgcagtctccacctccaggattcaagcgattcccctgcctcagtctcccaagcagctgggattgtagagaagtagctgattttcagctttctgtggattctttattggaaaaagacaatgaccattcaagaccagatattcaagttcaagccaagagactagcagagaagctaagatgtgatacagtggtgagtgaaatcagtactggtcaaaggactgtaaatttcaaaataaacagagagctcttaacaaagacagtgctacaacaagtaattgaagatggctcaaaatatggattaaaaagtgaacttttctctggacttccccagaagaagattgtggttgaattcagggtagcaagacctctttacaaagg

SEQ ID NO: 406341 - DNA, 1975 bp, Homo sapiens
cgaggccggaactggcggactgcggcgcacttccgtagaggtggacatggcgtgcggctttcgccgcgctattgcttgccagctttccagagtgttgaatcttccaccagaaaacttgatcacatcaatatctgcagttccaatttcccaaaaagaagaagtagctgattttcagctttctgtggattctttattggaaaaagacaatgaccattcaagaccagatattcaagttcaagccaagagactagcagagaagctaagatgtgatacagtggtgagtgaaatcagtactggtcaaaggactgtaaatttcaaaataaacagagagctcttaacaaagacagtgctacaacaagtaattgaagatggctcaaaatatggattaaaaagtgaacttttctctggacttccccagaagaagattgtggttgaattcagttcacctaatgttgccaaaaaatttcatgttggacatttgcgttctaccatcataggaaattttatagcaaatctcaaagaagctttaggacatcaagtaataagaataaattaccttggcgattggggcatgcagtttggtcttctgggaactggcttccagctgtttggctatgaggaaaaactgcagtccaatcctctacagcatctctttgaagtttatgtacaagttaataaagaagcagcagatgataaaagtgtagcaaaagcagcacaggagttcttccaacgattggaactgggcgatgtgcaagcactttcactgtggcaaaaatttcgggacttgagcattgaagagtacattcgggtttacaagcgtctgggagtatattttgatgaatattcaggagaatcattttatcgtgaaaaatctcaagaggtcttaaagttgctggagagtaaaggactcctactgaaaacaataaaaggaacggctgtagtagatctctctgggaatggcgacccctcctcaatttgtactgtaatgcgaagtgatgggacttctctctatgcaaccagagatcttgcagctgctatagatcgaatggacaagtataattttgatacaatgatatatgtgacagataaaggacaaaaaaagcattttcagcaagtattccaaatgctgaagatcatgggatatgactgggcagaaaggtgccagcacgtgccctttggagtagtacagggaatgaagactcgaagaggagatgtcactttcctggaagatgttttaaatgagattcaattaaggatgctacagaacatggcttcaattaagacaactaaagaactcaagaacccacaagagactgcagagagggtcgggctcgcagcactcattattcaggacttcaaaggtttactcttatctgactacaagttcagctgggatcgtgttttccagagtcgcggggacacaggagtcttcctacagtacacacacgcccgcctccacagtttggaagagacttttggatgtgggtacctgaatgacttcaacactgcttgtttacaagagccacagtctgtttcaattcttcagcatcttctcaggttcgacgaggtgctttataaatcatctcaggactttcaacccaggcatatcgtcagttaccttctaactttaagtcatcttgcagctgtggcacacaaaacactacaaataaaagatagtcctcctgaagtggctggggccagacttcatcttttcaaagctgtccgttctgtcctagccaatggaatgaaacttcttggaataacacctgtatgtaggatgtaatttccattaaaatggcttttaaaatgtcaaaaaaaaaaaagagggggggtaaaatactgaggggcaattggtacggtttgaaaggccataggggttagagaagggggtaaggggggaaggtgatttgagactcttgggaatggaacagagtggaatagtagagtcggggtattagtgaaggggaagaagaaa

SEQ ID NO: 406342 - DNA, 1913 bp, Homo sapiens
cgaggccggaactggcggactgcggcgcacttccgtagaggtggacatggcgtgcggctttcgccgcgctattgcttgccagctttccagagtgttgaatcttccaccagaaaacttgatcacatcaatatctgcagttccaatttcccaaaaagaagaagtagctgattttcagctttctgtggattctttattggaaaaagacaatgaccattcaagaccagatattcaagttcaagccaagagactagcagagaagctaagatgtgatacagtggtgagtgaaatcagtactggtcaaaggactgtaaatttcaaaataaacagagagctcttaacaaagacagtgctacaacaagtaattgaagatggctcaaaatatggattaaaaagtgaacttttctctggacttccccagaagaagattgtggttgaattcagttcacctaatgttgccaaaaaatttcatgttggacatttgcgttctaccatcataggaaattttatagcaaatctcaaagaagctttaggacatcaagtaataagaataaattaccttggcgattggggcatgcagtttggtcttctgggaactggcttccagctgtttggctatgaggaaaaactgcagtccaatcctctacagcatctctttgaagtttatgtacaagttaataaagaagcagcagatgataaaagtgtagcaaaagcagcacaggagttcttccaacgattggaactgggcgatgtgcaagcactttcactgtggcaaaaatttcgggacttgagcattgaagagtacattcgggtttacaagcgtctgggagtatattttgatgaatattcaggagaatcattttatcgtgaaaaatctcaagaggtcttaaagttgctggagagtaaaggactcctactgaaaacaataaaaggaacggctgtagtagatctctctgggaatggcgacccctcctcaatttgtactgtaatgcgaagtgatgggacttctctctatgcaaccagagatcttgcagctgctatagatcgaatggacaagtataattttgatacaatgatatatgtgacagataaaggacaaaaaaagcattttcagcaagtattccaaatgctgaagatcatgggatatgactgggcagaaaggtgccagcacgtgccctttggagtagtacagggaatgaagactcgaagaggagatgtcactttcctggaagatgttttaaatgagattcaattaaggatgctacagaacatggcttcaattaagacaactaaagaactcaagaacccacaagagactgcagagagggtcgggctcgcagcactcattattcaggacttcaaaggtttactcttatctgactacaagttcagctgggatcgtgttttccagagtcgcggggacacaggagtcttcctacagtacacacacgcccgcctccacagtttggaagagacttttggatgtgggtacctgaatgacttcaacactgcttgtttacaagagccacagtctgtttcaattcttcagcatcttctcaggttcgacgaggtgctttataaatcatctcaggactttcaacccaggcatatcgtcagttaccttctaactttaagtcatcttgcagctgtggcacacaaaacactacaaataaaagatagtcctcctgaagtggctggggccagacttcatcttttcaaagctgtccgttctgtcctagccaatggaatgaaacttcttggaataacacctgtatgtaggatgtaatttccattaaaatggcttttaaaatgtcaacatcctacatacaggtgttattccaagaagtttcattccattggctaggacagaacggacagctttggtcgacgcgggggggaatttagtagtagtaggc

SEQ ID NO: 406343 - DNA, 1978 bp, Homo sapiens
cgaggccggaactggcggactgcggcgcacttccgtagaggtggacatggcgtgcggctttcgccgcgctattgcttgccaggtatggatcccggagcgcgcagaggagtccctgaggagctagggaccccaaaggcctttcaccgctgcgggccagtcctcagtcagctggagggtgggtcccacggaatcctgttagtttctaccacctcctcccccttctctggagctggtggagcttcagaagtcctgtggagcgtcggctgggatcagtttgtctcggtgaaaagtaaactttgaaagctttccagagtgttgaatcttccaccagaaaacttgatcacatcaatatctgcagttccaatttcccaaaaagaagaagtagctgattttcagctttctgtggattctttattggaaaaagacaatgaccattcaagaccagatattcaagttcaagccaagagactagcagagaagctaagatgtgatacagtggtgagtgaaatcagtactggtcaaaggactgtaaatttcaaaataaacagagagctcttaacaaagacagtgctacaacaagtaattgaagatggctcaaaatatggattaaaaagtgaacttttctctggacttccccagaagaagattgtggttgaattcaggaaattttatagcaaatctcaaagaagctttaggacatcaagtaataagaataaattaccttggcgattggggcatgcagtttggtcttctgggaactggcttccagctgtttggctatgaggaaaaactgcagtccaatcctctacagcatctctttgaagtttatgtacaagttaataaagaagcagcagatgataaaagtgtagcaaaagcagcacaggagttcttccaacgattggaactgggcgatgtgcaagcactttcactgtggcaaaaatttcgggacttgagcattgaagagtacattcgggtttacaagcgtctgggagtatattttgatgaatattcaggagaatcattttatcgtgaaaaatctcaagaggtcttaaagttgctggagagtaaaggactcctactgaaaacaataaaaggaacggctgtagtagatctctctgggaatggcgacccctcctcaatttgtactgtaatgcgaagtgatgggacttctctctatgcaaccagagatcttgcagctgctatagatcgaatggacaagtataattttgatacaatgatatatgtgacagataaaggacaaaaaaagcattttcagcaagtattccaaatgctgaagatcatgggatatgactgggcagaaaggtgccagcacgtgccctttggagtagtacagggaatgaagactcgaagaggagatgtcactttcctggaagatgttttaaatgagattcaattaaggatgctacagaacatggcttcaattaagacaactaaagaactcaagaacccacaagagactgcagagagggtcgggctcgcagcactcattattcaggacttcaaaggtttactcttatctgactacaagttcagctgggatcgtgttttccagagtcgcggggacacaggagtcttcctacagtacacacacgcccgcctccacagtttggaagagacttttggatgtgggtacctgaatgacttcaacactgcttgtttacaagagccacagtctgtttcaattcttcagcatcttctcaggttcgacgaggtgctttataaatcatctcaggactttcaacccaggcatatcgtcagttaccttctaactttaagtcatcttgcagctgtggcacacaaaacactacaaataaaagatagtcctcctgaagtggctggggccagacttcatcttttcaaagctgtccgttctgtcctagccaatggaatgaaacttcttggaataacacctgtatgtaggatgtaatttccattaaaatggcttttaaaatgtcaa

SEQ ID NO: 406344 - DNA, 1619 bp, Homo sapiens
  misc_feature (1570)..(1570): n is a, c, g, or t
cgaggccggaactggcggactgcggcgcacttccgtagaggtggacatggcgtgcggctttcgccgcgctattgcttgccagctttccagagtgttgaatcttccaccagaaaacttgatcacatcaatatctgcagttccaatttcccaaaaagaagaagtagctgattttcagctttctgtggattctttattggaaaaagacaatgaccattcaagaccagatattcaagttcaagccaagagactagcagagaagctaagatgtgatacagtggtgagtgaaatcagtactggtcaaaggactgtaaatttcaaaataaacagagagctcttaacaaagacagtgctacaacaagtaattgaagatggctcaaaatatggattaaaaagtgaacttttctctggacttccccagaagaagattgtggttgaattcagttcacctaatgttgccaaaaaatttcatgttggacatttgcgttctaccatcataggaaattttatagcaaatctcaaagaagctttaggacatcaagtaataagaataaattaccttggcgattggggcatgcagtttggtcttctgggaactggcttccagctgtttggctatgaggaaaaactgcagtccaatcctctacagcatctctttgaagtttatgtacaagttaataaagaagcagcagatgataaaagtgtagcaaaagcagcacaggagttcttccaacgattggaactgggcgatgtgcaagcactttcactgtggcaaaaatttcgggacttgagcattgaagagtacattcgggtttacaagcgtctgggagtatattttgatgaatattcaggagaatcattttatcgtgaaaaatctcaagaggtcttaaagttgctggagagtaaaggactcctactgaaaacaataaaaggaacggctgtagtagatctctctgggaatggcgacccctcctcaatttgtactgtaatgcgaagtgatgggacttctctctatgcaaccagagatcttgcagctgctatagatcgaatggacaagtataattttgatacaatgatatatgtgacagataaaggacaaaaaaagcattttcagcaagtattccaaatgctgaagatcatgggatatgactgggcagaaaggtgccagcacgtgccctttggagtagtacagggaatgaagactcgaagaggagatgtcactttcctggaagatgttttaaatgagattcaattaaggatgctacagaacatggcttcaattaagacaactaaagaactcaagaacccacaagagactgcagagagggtcgggctcgcagcactcattattcaggacttcaaaggtttactcttatctgactacaagttcagctgggatcgtgttttccagagtcgcggggacacaggagtcttcctacagtacacacacgcccgcctccacagtttggaagagacttttggatgtgggtacctgaatgacttcaacactgcttgtttacaagagccacagtctgtttcaattcttcagcatcttctcagtcgacgggtgctnttaaatcatctcgtctcttctcttgtacatctctctcttctggaccccc

SEQ ID NO: 406345 - DNA, 1722 bp, Homo sapiens
agcagtcttcccatctcagtctcccaaagtgctgagattacaggcatgagccattgtgctgggggtatttttacatttttaaattttgatttctgatacagtaaatactagcagataccacttacgtgaatgctattacttcaggagtcacaagatcaatttcattaacacaatgtcaaaatttcgagttctaatttatctttgctctaaatttttaacttttaacttatctttgccctaataccaaaggccatactccacagttttgtcaaagtatggaggcatgacctagttgattcttagaagtcttaagtcttagaatagagaaatgtttcccattttttttgcagttcacctaatgttgccaaaaaatttcatgttggacatttgcgttctaccatcataggaaattttatagcaaatctcaaagaagctttaggacatcaagtaataagaataaattaccttggcgattggggcatgcagtttggtcttctgggaactggcttccagctgtttggctatgaggaaaaactgcagtccaatcctctacagcatctctttgaagtttatgtacaagttaataaagaagcagcagatgataaaagtgtagcaaaagcagcacaggagttcttccaacgattggaactgggcgatgtgcaagcactttcactgtggcaaaaatttcgggacttgagcattgaagagtacattcgggtttacaagcgtctgggagtatattttgatgaatattcaggagaatcattttatcgtgaaaaatctcaagaggtcttaaagttgctggagagtaaaggactcctactgaaaacaataaaaggaacggctgtagtagatctctctgggaatggcgacccctcctcaatttgtactgtaatgcgaagtgatgggacttctctctatgcaaccagagatcttgcagctgctatagatcgaatggacaagtataattttgatacaatgatatatgtgacagataaaggacaaaaaaagcattttcagcaagtattccaaatgctgaagatcatgggatatgactgggcagaaaggtgccagcacgtgccctttggagtagtacagggaatgaagactcgaagaggagatgtcactttcctggaagatgttttaaatgagattcaattaaggatgctacagaacatggcttcaattaagacaactaaagaactcaagaacccacaagagactgcagagagggtcgggctcgcagcactcattattcaggacttcaaaggtttactcttatctgactacaagttcagctgggatcgtgttttccagagtcgcggggacacaggagtcttcctacagtacacacacgcccgcctccacagtttggaagagacttttggatgtgggtacctgaatgacttcaacactgcttgtttacaagagccacagtctgtttcaattcttcagcatcttctcaggttcgacgaggtgctttataaatcatctcaggactttcaacccaggcatatcgtcagttaccttctaactttaagtcatcttgcagctgtggcacacaaaacactacaaataaaagatagtcctcctgaagtggctggggccagacttcatcttttcaaagctgtccgttctgtcctagccaatggaatgaaacttcttggaataacacctgtatgtaggatgtaatttccattaaaatggcttttaaaatgtcaa

SEQ ID NO: 406346 - DNA, 1688 bp, Homo sapiens
cgaggccggaactggcggactgcggcgcacttccgtagaggtggacatggcgtgcggctttcgccgcgctattgcttgccagctttccagagtgttgaatcttccaccagaaaacttgatcacatcaatatctgcagttccaatttcccaaaaagaagaagtagctgattttcagctttctgtggattctttattggaaaaagacaatgaccattcaagaccagatattcaagttcaagccaagagactagcagagaagctaagatgtgatacagtggtgagtgaaatcagtactggtcaaaggactgtaaatttcaaaataaacagagagctcttaacaaagacagtgctacaacaagtaattgaagatggctcaaaatatggattaaaaagtgaacttttctctggacttccccagaagaagattgtggttgaattcagttcacctaatgttgccaaaaaatttcatgttggacatttgcgttctaccatcataggaaattttatagcaaatctcaaagaagctttaggacatcaagtaataagaataaattaccttggcgattggggcatgcagtttggtcttctgggaactggcttccagctgtttggctatgaggaaaaactgcagtccaatcctctacagcatctctttgaagtttatgtacaagttaataaagaagcagcagatgataaaagtgtagcaaaagcagcacaggagttcttccaacgattggaactgggcgatgtgcaagcactttcactgtggcaaaaatttcgggacttgagcattgaagagtacattcgggtttacaagcgtctgggagtatattttgatgaatattcaggagaatcattttatcgtgaaaaatctcaagaggtcttaaagttgctggagagtaaaggactcctactgaaaacaataaaaggaacggctgtagtagatctctctgggaatggcgacccctcctcaatttgtactgtaatgcgaagtgatgggacttctctctatgcaaccagagatcttgcagctgctatagatcgaatggacaagtataattttgatacaatgatatatgtgacagataaaggacaaaaaaagcattttcagcaagtattccaaatgctgaagatcatgggatatgactgggcagaaaggtgccagcacgtgccctttggagtagtacagggaatgaagactcgaagaggagatgtcactttcctggaagatgttttaaatgagattcaattaaggatgctacagaacatggcttcaattaagacaactaaagaactcaagaacccacaagagactgcagagagggtcgggctcgcagcactcattattcaggtctgttaagactcctacctgtgaggcccttttgtttggtactagagcaaatcccagcagtgaagatttcctctgtcgttttaggacttcaaaggtttactcttatctgactacaagttcagctgggatcgtgttttccagagtcgcggggacacaggagtcttcctacagtacacacacgcccgcctccacaggtgagaagaggctgcagggaaaccttgtgctgcactgtgcttacttaggctaggtcctgtgattctaagaccagaggccctgttttctgggcttttccaatatcttctattcacatctgactagagtagaccttcttttagga

SEQ ID NO: 406347 - DNA, 1820 bp, Homo sapiens
cgaggccggaactggcggactgcggcgcacttccgtagaggtggacatggcgtgcggctttcgccgcgctattgcttgccaggtatggatcccggagcgcgcagaggagtccctgaggagctagggaccccaaaggcctttcaccgctgcgggccagtcctcagtcagctggagggtgggtcccacggaatcctgttagtttctaccacctcctcccccttctctggagctggtggagcttcagaagtcctgtggagcgtcggctgggatcagtttgtctcggtgaaaagtaaactttgaaagagaagtagctgattttcagctttctgtggattctttattggaaaaagacaatgaccattcaagaccagatattcaagttcaagccaagagactagcagagaagctaagatgtgatacagtggtgagtgaaatcagtactggtcaaaggactgtaaatttcaaaataaacagagagctcttaacaaagacagtgctacaacaagtaattgaagatggctcaaaatatggattaaaaagtgaacttttctctggacttccccagaagaagattgtggttgaattcaggtcttctgggaactggcttccagctgtttggctatgaggaaaaactgcagtccaatcctctacagcatctctttgaagtttatgtacaagttaataaagaagcagcagatgataaaagtgtagcaaaagcagcacaggagttcttccaacgattggaactgggcgatgtgcaagcactttcactgtggcaaaaatttcgggacttgagcattgaagagtacattcgggtttacaagcgtctgggagtatattttgatgaatattcaggagaatcattttatcgtgaaaaatctcaagaggtcttaaagttgctggagagtaaaggactcctactgaaaacaataaaaggaacggctgtagtagatctctctgggaatggcgacccctcctcaatttgtactgtaatgcgaagtgatgggacttctctctatgcaaccagagatcttgcagctgctatagatcgaatggacaagtataattttgatacaatgatatatgtgacagataaaggacaaaaaaagcattttcagcaagtattccaaatgctgaagatcatgggatatgactgggcagaaaggtgccagcacgtgccctttggagtagtacagggaatgaagactcgaagaggagatgtcactttcctggaagatgttttaaatgagattcaattaaggatgctacagaacatggcttcaattaagacaactaaagaactcaagaacccacaagagactgcagagagggtcgggctcgcagcactcattattcaggacttcaaaggtttactcttatctgactacaagttcagctgggatcgtgttttccagagtcgcggggacacaggagtcttcctacagtacacacacgcccgcctccacagtttggaagagacttttggatgtgggtacctgaatgacttcaacactgcttgtttacaagagccacagtctgtttcaattcttcagcatcttctcaggttcgacgaggtgctttataaatcatctcaggactttcaacccaggcatatcgtcagttaccttctaactttaagtcatcttgcagctgtggcacacaaaacactacaaataaaagatagtcctcctgaagtggctggggccagacttcatcttttcaaagctgtccgttctgtcctagccaatggaatgaaacttcttggaataacacctgtatgtaggatgtaatttccattaaaatggcttttaaaatgtcaa

SEQ ID NO: 406348 - DNA, 1156 bp, Homo sapiens
cgaggccggaactggcggactgcggcgcacttccgtagaggtggacatggcgtgcggctttcgccgcgctattgcttgccaggtatggatcccggagcgcgcagaggagtccctgaggagctagggaccccaaaggcctttcaccgctgcgggccagtcctcagtcagctggagggtgggtcccacggaatcctgttagtttctaccacctcctcccccttctctggagctggtggagcttcagaagtcctgtggagcgtcggctgggatcagtttgtctcggtgaaaagtaaactttgaaagctttccagagtgttgaatcttccaccagaaaacttgatcacatcaatatctgcagttccaatttcccaaaaagaagaagtagctgattttcagctttctgtggattctttattggaaaaagacaatgaccattcaagaccagatattcaagttcaagccaagagactagcagagaagctaagatgtgatacagtggtgagtgaaatcagtactggtcaaaggactgtaaatttcaaaataaacagagagctcttaacaaagacagtgctacaacaagtaattgaagatggctcaaaatatggattaaaaagtgaacttttctctggacttccccagaagaagattgtggttgaattcagttcacctaatgttgccaaaaaatttcatgttggacatttgcgttctaccatcataggtaagtgtttagtttcacataaaatgctaaacgttcctttgaggaagtatttgatagttcaatttaatgttttaatgcttaaataacaaaatagcaaaaaacaaaaagtttaaatttatatgagcctcctgccaattcaggaaatggatgacattggttaccactgttttgtggaaacacaaaattgatttcaaaaccaaaagattcactgagaaactaattttaactgctatatatgttatgatttttaactttctaaaaataagtataaatatggggaagacctgaaagatgcaaaagtaaaaatagttatgtggggatgtataacctttcagatttttttgttcatttattttgtggtttttttgtcacttaggcagaggttgcagtgagctgcgcaccactgcactacagcctgggtgacagagctaggttctg

SEQ ID NO: 406349 - DNA, 4547 bp, Homo sapiens
  misc_feature (87)..(87): n is a, c, g, or t
cgcccagcagttgctcagtcgtcggcgcgcgcggctgggagcggtagctgtgcctcggcgtccccgagctggtgccgagcgcagcgncccaggagcccccccatccccgcgccggcccacggtcacccgccatgtcgaccttgctggacattaagagcagcgtgctcaggcaggtgcaggtgtgcccgtccttccgccgcaggactgagcaggacccagggagtgccagcgccgacccgcaggagcctgccacgggggcctggaaacccggggatggcgtggagttctttgcccacatgcgcctcatgctgaagaagggggaaggcagacagggcttgccgtgcctcgaggtccccctgcgcagtggctcgccagcacccccggagcctgtggatcccagcctcggcctgagagccctggccccagaggaggtggagatgctctacgaggaggccctgtacacggtgctttaccgcgcgggtaccatgggccctgaccaggtggacgacgaggaggccctgctcagctatctccagcaggtgtttggcaccagccttgaggagcacactgaggccatcgagcgagtgaggaaggccaaggcccccacgtatgccctgaaagtctctgtcatgcgtgccaagaaccttctggccaaggaccccaacggcttcagcgacccatactgcatgctgggcatcctgcctgcctcggacgccacgcgggagccccgtgcacagaaggagcagcgcttcggcttccgcaagggcagcaagcgcggtggacccctgcctgccaagtgcatccaggtcaccgaggtgaagagcagcaccctgaaccccgtctggaaggagcacttcctcttcgagattgaggatgtgagcacggaccagctgcacctggacatctgggatcatgacgacgatgtatccctggtagaagcgtgcaggaagctgaatgaagtcatcggcctgaagggcatgggcaggtacttcaaacagatcgtcaagtcagcccgcgcaaacgggacagcaggacccatcgaggaccacaccgatgacttcctggggtgcctcaacatacctgtccgggaggtgcctgtggctggcgtcgaccgctggttcaagctggagccacgctccagtgcctcgcgtgtgcagggacactgccacctggttctcaagctgatcactacgcagagggatacggccatgagccagcgcgggcgatccggcttcctgtcccacctgctgctgctcagccatctgctgcggttggagcactcagcagaggagcccaactccagcagctggcgaggagagctcagcacaccagccgccaccatcctctgcctgcacggagcccagagcaacctgtcacccttgcagctggccgtgctgcactggcaggtcagcagccgccaccatcaaacctgcacgctggactacagctacctgctggggctgctggaggacatgcaggcacactgggaagaggctccttcactgccccaggagcaggaggagagcctggctgatagcctttccgccttctctgagttcgggctgcagctgctgcgccagctccgagactacttccctgccaccaacagcaccgctgtccaccgcctggagctgctgctgaagtgtctgggcaagctgcagctcttccaaccctcctttgagatctgccccttcgagtcggagctgaacatggacattgctgcggccctgaagagaggcaaccgtgagtggtacgacaggatcctgaatgacaagagtccccgagagcagccaggaccacagcgcctgcctgggctggttgtgctggctgacgccgtctatgatgaccttcagttctgctacagtgtgtacgccagcctcttccacagcatcctcaatgtggacgtcttcaccctgaccttccggcagctggagcgtctggtggctgaggaggcgtgggtgctgacggaggagctgagccccaagatgaccctggaggtggcctcggggctctttgagctctacctgaccctggctgacctccagcgcttctgggatagcatccctggccgggacagccgctctctggccctggctggcatccacgcccccttcctgcctgctgtgaagctctggttccaagtgctgagggaccaggccaagtggaggcttcagggagccgtggacatggacacgctggagcccgtggacgcctcctccaggcacagcagctccgcagccactgctggtctctgcctcagccacatccaggagttgtgggtgcgcctggcgtggcctgaccctgcccaggctcaggggctgggcacccagcttggccaggacgtgtgtgaggccaccctcttctatacggagctgcttcggaagaaggtggacactcagccaggggcggccggtgaagcagtgagcgaggcgctctgcgtggtcctcaacaatgtggagctcgtgcgcaaggctgctgggcaggccttgaagggcctggcatggccagagggggccacggggcccgagggggtgctcccccgccctctgctcagctgcacacaggccctggacgatgatctgcaacgggaggcccacacggtgacagcgcacctgacctctaagatggtgggcgacatccgcaagtatgtacagcacatcagtctctcgcctgactccatccagaacgatgaggccgtggccccgctcatgaagtacctggatgagaagctggccctgctgaacgcctcgctggtgaaggggaacctgagcagggtgctggaggccctgtgggagctactcctccaggccattctgcaggcgctgggtgcaaaccgtgacgtctctgctgatttctacagccgcttccatttcacgctggaggccctggtcagttttttccacgcagagggtcagggtttgcccctggagagcctgagggatggaagctacaagaggctgaaggaggagctgcggctgcacaaatgttccacccgcgagtgcatcgagcagttctacctggacaagctcaaacagaggaccctggagcagaaccggtttggacgcctgagcgtccgttgccattacgaggcggctgagcagcggctggccgtggaggtgctgcacgccgcggacctgctccccctggacgccaacggcttaagtgacccctttgtgatcgtggagctgggcccaccgcatctctttccactggtccgcagccagaggacccaggtgaagacccggacgctgcaccctgtatacgacgaactcttctacttttccgtgcctgccgaggcgtgccgccgccgcgcggcctgtgtgttgttcaccgtcatggaccacgactggctgtccaccaacgacttcgctggggaggcggccctcggcctaggtggcgtcactggtgtcgcccggccccaggtgggcgggggtgcaagggctgggcagcctgtcaccctgcacctgtgccggcccagagcccaggtgagatctgcgctgaggaggctggaaggccgcaccagcaaggaggcgcaggagttcgtgaagaaactcaaggagctggagaagtgcatggaggcggacccctgagtccatcagctgccagccccggccctggcccccaccccaagttccctgaagcatcctccagctcactgtggccagctttgtgcaaccagggcccacggcgcccctcctgtgctgtgacgtgtgtgtcgtggctggccccgcggcgcctaccgccctggccgtgtctgtctggtgtgtgctgtgaacccctgcacccaaccccacatctgggtggccaacttggcaggacttggccagcagctgcccaggacacagtgcaggccagagcgggcttgaccacctggtgggcctccctgcccgcttccttgggctccccggccctgggtgggcggtgcgcagctggtctccagggactcagtgagtggctgtgctctctgcacaacgggcaatgtgcagacgcatttttggtaatcacagctggggagtgaaaagggtgccactggcaccactgggtggatggtccagagcctccacccacagaggggatgcaaagggcaggtgagtcaagaaccgcataggtctccagtccccacggggctcccaggccggggaaaggttcccctgaggtcactctgaggccagggacgtcacccaaggctggtggtcagtgtgaagggctccgtgccaactggtcagctgtccttcacgcacatatccgtggccacctgagacctgctccacgacccttccaggcagagccgagagttcgccccaacccttccccaggcccagtgtgaaaaacagactcacaaggggcttcttggcctgcagcttcatttgcgagagcgccgaggcaggacacagagcacagctgtgctggaagtgtggggagaacccggacagctcagtcctgccagcagccgcaaagagccgaggctgccaggcccatttatgtccctcatgtctctagattttctcgtcacccagcctcaaaaatatatgtgtctgcaaccctca

SEQ ID NO: 406350 - DNA, 475 bp, Homo sapiens
agcctgggccccgctcgtacagttgcgcaagcgcggtggacccctgcctgccaagtgcatccaggtcaccgaggtgaagagcagcaccctgaaccccgtctggaaggagcacttcctcttcgagattgaggatgtgagcacggaccagctgcacctggacatctgggatcatgacgacgatgtatccctggtagaagcgtgcaggaagctgaatgaagtcatcggcctgaagggcatgggcaggtacttcaaacagatcgtcaagtcagcccgcgcaaacgggacagcaggacccatcgaggaccacaccgatgacttcctggggtgcctcaacatacctgtccgggaggtgcctgtggctggcgtcgaccgctggttcaagctggagccacgctccagtgcctcgcgtgtgcagggacactgccacctggttctcaagctgatcactacgcaggtacggcggggagtgggcgtc

SEQ ID NO: 406351 - DNA, 839 bp, Homo sapiens
cgtcctccctggctagctggagtcaacgtcatccacaaaaagcccccagccgaggacagattcctcttcctccctgtgctctccacacccaaacctctccagtgggacatgcactgcaggttttctagtcagaagaccatcggggtgttgtttacaacaccacccccaggcagcaggaagggctcaggccagaggtagaagagagccctgggtctgagtgatcatgaaattaagcccaaggacctaccgggtgctggccacaggcctgttggggtttccaaactctctccctgaatccacatcgaagggatctgagccgagagaggaaagtggcctctaagtgagctcagagcaggaccaggcctcccaccccccaggctttggagggccttggttcccaccccgccaaggctcaccgatctcctcctcctgggggctctccttggcattggccaagaactcctgctccgcctgcagcacctcctccgggctgccgcaggccgcgtacttgtccaggagctggcggttcaggtccaagaagcccttgccccatttaaacttccgcagcaaaatgacagcaaggtctggaaagcctgacggtgtgagaaacaggaaacccaaagaagtcgacggtcccctcaagtgcctcctgatcaccctgctgccggatggcggcgctctcccaagtaaccgcagggtccccagcaaacatcagctcacagtcctgagaacccgtgctgcccccagcctgcacctcccttgctacagtccacacctctgcaaccgaccaagtccccctcctttgctgcgaaacaaacattcccaccaagactgcccca

SEQ ID NO: 406352 - DNA, 4627 bp, Homo sapiens
  misc_feature (87)..(87): n is a, c, g, or t
cgcccagcagttgctcagtcgtcggcgcgcgcggctgggagcggtagctgtgcctcggcgtccccgagctggtgccgagcgcagcgncccaggagcccccccatccccgcgccggcccacggtcacccgccatgtcgaccttgctggacattaagagcagcgtgctcaggcaggtgcaggtgtgcccgtccttccgccgcaggactgagcaggacccagggagtgccagcgccgacccgcaggagcctgccacgggggcctggaaacccggggatggcgtggagttctttgcccacatgcgcctcatgctgaagaagggggaaggcagacagggcttgccgtgcctcgaggtccccctgcgcagtggctcgccagcacccccggagcctgtggatcccagcctcggcctgagagccctggccccagaggaggtggagatgctctacgaggaggccctgtacacggtgctttaccgcgcgggtaccatgggccctgaccaggtggacgacgaggaggccctgctcagctatctccagcaggtgtttggcaccagccttgaggagcacactgaggccatcgagcgagtgaggaaggccaaggcccccacgtatgccctgaaagtctctgtcatgcgtgccaagaaccttctggccaaggaccccaacggcttcagcgacccatactgcatgctgggcatcctgcctgcctcggacgccacgcgggagccccgtgcacagaaggagcagcgcttcggcttccgcaagggcagcaagcgcggtggacccctgcctgccaagtgcatccaggtcaccgaggtgaagagcagcaccctgaaccccgtctggaaggagcacttcctcttcgagattgaggatgtgagcacggaccagctgcacctggacatctgggatcatgacgacgatgtatccctggtagaagcgtgcaggaagctgaatgaagtcatcggcctgaagggcatgggcaggtacttcaaacagatcgtcaagtcagcccgcgcaaacgggacagcaggacccatcgaggaccacaccgatgacttcctggggtgcctcaacatacctgtccgggaggtgcctgtggctggcgtcgaccgctggttcaagctggagccacgctccagtgcctcgcgtgtgcagggacactgccacctggttctcaagctgatcactacgcagagggatacggccatgagccagcgcgggcgatccggcttcctgtcccacctgctgctgctcagccatctgctgcggttggagcactcagcagaggagcccaactccagcagctggcgaggagagctcagcacaccagccgccaccatcctctgcctgcacggagcccagagcaacctgtcacccttgcagctggccgtgctgcactggcaggtcagcagccgccaccatcaaacctgcacgctggactacagctacctgctggggctgctggaggacatgcaggcacactgggaagaggctccttcactgccccaggagcaggaggagagcctggctgatagcctttccgccttctctgagttcgggctgcagctgctgcgccagctccgagactacttccctgccaccaacagcaccgctgtccaccgcctggagctgctgctgaagtgggtgcagcgccgcgtgtcagcgtgggtgggggcggctggcagggcaggccccacgtcagcgtgctgcccccacccaggtgtctgggcaagctgcagctcttccaaccctcctttgagatctgccccttcgagtcggagctgaacatggacattgctgcggccctgaagagaggcaaccgtgagtggtacgacaggatcctgaatgacaagagtccccgagagcagccaggaccacagcgcctgcctgggctggttgtgctggctgacgccgtctatgatgaccttcagttctgctacagtgtgtacgccagcctcttccacagcatcctcaatgtggacgtcttcaccctgaccttccggcagctggagcgtctggtggctgaggaggcgtgggtgctgacggaggagctgagccccaagatgaccctggaggtggcctcggggctctttgagctctacctgaccctggctgacctccagcgcttctgggatagcatccctggccgggacagccgctctctggccctggctggcatccacgcccccttcctgcctgctgtgaagctctggttccaagtgctgagggaccaggccaagtggaggcttcagggagccgtggacatggacacgctggagcccgtggacgcctcctccaggcacagcagctccgcagccactgctggtctctgcctcagccacatccaggagttgtgggtgcgcctggcgtggcctgaccctgcccaggctcaggggctgggcacccagcttggccaggacgtgtgtgaggccaccctcttctatacggagctgcttcggaagaaggtggacactcagccaggggcggccggtgaagcagtgagcgaggcgctctgcgtggtcctcaacaatgtggagctcgtgcgcaaggctgctgggcaggccttgaagggcctggcatggccagagggggccacggggcccgagggggtgctcccccgccctctgctcagctgcacacaggccctggacgatgatctgcaacgggaggcccacacggtgacagcgcacctgacctctaagatggtgggcgacatccgcaagtatgtacagcacatcagtctctcgcctgactccatccagaacgatgaggccgtggccccgctcatgaagtacctggatgagaagctggccctgctgaacgcctcgctggtgaaggggaacctgagcagggtgctggaggccctgtgggagctactcctccaggccattctgcaggcgctgggtgcaaaccgtgacgtctctgctgatttctacagccgcttccatttcacgctggaggccctggtcagttttttccacgcagagggtcagggtttgcccctggagagcctgagggatggaagctacaagaggctgaaggaggagctgcggctgcacaaatgttccacccgcgagtgcatcgagcagttctacctggacaagctcaaacagaggaccctggagcagaaccggtttggacgcctgagcgtccgttgccattacgaggcggctgagcagcggctggccgtggaggtgctgcacgccgcggacctgctccccctggacgccaacggcttaagtgacccctttgtgatcgtggagctgggcccaccgcatctctttccactggtccgcagccagaggacccaggtgaagacccggacgctgcaccctgtatacgacgaactcttctacttttccgtgcctgccgaggcgtgccgccgccgcgcggcctgtgtgttgttcaccgtcatggaccacgactggctgtccaccaacgacttcgctggggaggcggccctcggcctaggtggcgtcactggtgtcgcccggccccaggtgggcgggggtgcaagggctgggcagcctgtcaccctgcacctgtgccggcccagagcccaggtgagatctgcgctgaggaggctggaaggccgcaccagcaaggaggcgcaggagttcgtgaagaaactcaaggagctggagaagtgcatggaggcggacccctgagtccatcagctgccagccccggccctggcccccaccccaagttccctgaagcatcctccagctcactgtggccagctttgtgcaaccagggcccacggcgcccctcctgtgctgtgacgtgtgtgtcgtggctggccccgcggcgcctaccgccctggccgtgtctgtctggtgtgtgctgtgaacccctgcacccaaccccacatctgggtggccaacttggcaggacttggccagcagctgcccaggacacagtgcaggccagagcgggcttgaccacctggtgggcctccctgcccgcttccttgggctccccggccctgggtgggcggtgcgcagctggtctccagggactcagtgagtggctgtgctctctgcacaacgggcaatgtgcagacgcatttttggtaatcacagctggggagtgaaaagggtgccactggcaccactgggtggatggtccagagcctccacccacagaggggatgcaaagggcaggtgagtcaagaaccgcataggtctccagtccccacggggctcccaggccggggaaaggttcccctgaggtcactctgaggccagggacgtcacccaaggctggtggtcagtgtgaagggctccgtgccaactggtcagctgtccttcacgcacatatccgtggccacctgagacctgctccacgacccttccaggcagagccgagagttcgccccaacccttccccaggcccagtgtgaaaaacagactcacaaggggcttcttggcctgcagcttcatttgcgagagcgccgaggcaggacacagagcacagctgtgctggaagtgtggggagaacccggacagctcagtcctgccagcagccgcaaagagccgaggctgccaggcccatttatgtccctcatgtctctagattttctcgtcacccagcctcaaaaatatatgtgtctgcaaccctca

SEQ ID NO: 406353 - DNA, 3885 bp, Homo sapiens
agcctgggccccgctcgtacagttgcgcaagcgcggtggacccctgcctgccaagtgcatccaggtcaccgaggtgaagagcagcaccctgaaccccgtctggaaggagcacttcctcttcgagattgaggatgtgagcacggaccagctgcacctggacatctgggatcatgacgacgatgtatccctggtagaagcgtgcaggaagctgaatgaagtcatcggcctgaagggcatgggcaggtacttcaaacagatcgtcaagtcagcccgcgcaaacgggacagcaggacccatcgaggaccacaccgatgacttcctggggtgcctcaacatacctgtccgggaggtgcctgtggctggcgtcgaccgctggttcaagctggagccacgctccagtgcctcgcgtgtgcagggacactgccacctggttctcaagctgatcactacgcagagggatacggccatgagccagcgcgggcgatccggcttcctgtcccacctgctgctgctcagccatctgctgcggttggagcactcagcagaggagcccaactccagcagctggcgaggagagctcagcacaccagccgccaccatcctctgcctgcacggagcccagagcaacctgtcacccttgcagctggccgtgctgcactggcaggtcagcagccgccaccatcaaacctgcacgctggactacagctacctgctggggctgctggaggacatgcaggcacactgggaagaggctccttcactgccccaggagcaggaggagagcctggctgatagcctttccgccttctctgagttcgggctgcagctgctgcgccagctccgagactacttccctgccaccaacagcaccgctgtccaccgcctggagctgctgctgaagtgggtgcagcgccgcgtgtcagcgtgggtgggggcggctggcagggcaggccccacgtcagcgtgctgcccccacccaggtgtctgggcaagctgcagctcttccaaccctcctttgagatctgccccttcgagtcggagctgaacatggacattgctgcggccctgaagagaggcaaccgtgagtggtacgacaggatcctgaatgacaagagtccccgagagcagccaggaccacagcgcctgcctgggctggttgtgctggctgacgccgtctatgatgaccttcagttctgctacagtgtgtacgccagcctcttccacagcatcctcaatgtggacgtcttcaccctgaccttccggcagctggagcgtctggtggctgaggaggcgtgggtgctgacggaggagctgagccccaagatgaccctggaggtggcctcggggctctttgagctctacctgaccctggctgacctccagcgcttctgggatagcatccctggccgggacagccgctctctggccctggctggcatccacgcccccttcctgcctgctgtgaagctctggttccaagtgctgagggaccaggccaagtggaggcttcagggagccgtggacatggacacgctggagcccgtggacgcctcctccaggcacagcagctccgcagccactgctggtctctgcctcagccacatccaggagttgtgggtgcgcctggcgtggcctgaccctgcccaggctcaggggctgggcacccagcttggccaggacgtgtgtgaggccaccctcttctatacggagctgcttcggaagaaggtggacactcagccaggggcggccggtgaagcagtgagcgaggcgctctgcgtggtcctcaacaatgtggagctcgtgcgcaaggctgctgggcaggccttgaagggcctggcatggccagagggggccacggggcccgagggggtgctcccccgccctctgctcagctgcacacaggccctggacgatgatctgcaacgggaggcccacacggtgacagcgcacctgacctctaagatggtgggcgacatccgcaagtatgtacagcacatcagtctctcgcctgactccatccagaacgatgaggccgtggccccgctcatgaagtacctggatgagaagctggccctgctgaacgcctcgctggtgaaggggaacctgagcagggtgctggaggccctgtgggagctactcctccaggccattctgcaggcgctgggtgcaaaccgtgacgtctctgctgatttctacagccgcttccatttcacgctggaggccctggtcagttttttccacgcagagggtcagggtttgcccctggagagcctgagggatggaagctacaagaggctgaaggaggagctgcggctgcacaaatgttccacccgcgagtgcatcgagcagttctacctggacaagctcaaacagaggaccctggagcagaaccggtttggacgcctgagcgtccgttgccattacgaggcggctgagcagcggctggccgtggaggtgctgcacgccgcggacctgctccccctggacgccaacggcttaagtgacccctttgtgatcgtggagctgggcccaccgcatctctttccactggtccgcagccagaggacccaggtgaagacccggacgctgcaccctgtatacgacgaactcttctacttttccgtgcctgccgaggcgtgccgccgccgcgcggcctgtgtgttgttcaccgtcatggaccacgactggctgtccaccaacgacttcgctggggaggcggccctcggcctaggtggcgtcactggtgtcgcccggccccaggtgggcgggggtgcaagggctgggcagcctgtcaccctgcacctgtgccggcccagagcccaggtgagatctgcgctgaggaggctggaaggccgcaccagcaaggaggcgcaggagttcgtgaagaaactcaaggagctggagaagtgcatggaggcggacccctgagtccatcagctgccagccccggccctggcccccaccccaagttccctgaagcatcctccagctcactgtggccagctttgtgcaaccagggcccacggcgcccctcctgtgctgtgacgtgtgtgtcgtggctggccccgcggcgcctaccgccctggccgtgtctgtctggtgtgtgctgtgaacccctgcacccaaccccacatctgggtggccaacttggcaggacttggccagcagctgcccaggacacagtgcaggccagagcgggcttgaccacctggtgggcctccctgcccgcttccttgggctccccggccctgggtgggcggtgcgcagctggtctccagggactcagtgagtggctgtgctctctgcacaacgggcaatgtgcagacgcatttttggtaatcacagctggggagtgaaaagggtgccactggcaccactgggtggatggtccagagcctccacccacagaggggatgcaaagggcaggtgagtcaagaaccgcataggtctccagtccccacggggctcccaggccggggaaaggttcccctgaggtcactctgaggccagggacgtcacccaaggctggtggtcagtgtgaagggctccgtgccaactggtcagctgtccttcacgcacatatccgtggccacctgagacctgctccacgacccttccaggcagagccgagagttcgccccaacccttccccaggcccagtgtgaaaaacagactcacaaggggcttcttggcctgcagcttcatttgcgagagcgccgaggcaggacacagagcacagctgtgctggaagtgtggggagaacccggacagctcagtcctgccagcagccgcaaagagccgaggctgccaggcccatttatgtccctcatgtctctagattttctcgtcacccagcctcaaaaatatatgtgtctgcaaccctca

SEQ ID NO: 406354 - DNA, 5563 bp, Homo sapiens
  misc_feature (87)..(87): n is a, c, g, or t
cgcccagcagttgctcagtcgtcggcgcgcgcggctgggagcggtagctgtgcctcggcgtccccgagctggtgccgagcgcagcgncccaggagcccccccatccccgcgccggcccacggtcacccgccatgtcgaccttgctggacattaagagcagcgtgctcaggcaggtgcaggtgtgcccgtccttccgccgcaggactgagcaggacccagggagtgccagcgccgacccgcaggagcctgccacgggggcctggaaacccggggatggcgtggagttctttgcccacatgcgcctcatgctgaagaagggggaaggcagacagggcttgccgtgcctcgaggtccccctgcgcagtggctcgccagcacccccggagcctgtggatcccagcctcggcctgagagccctggccccagaggaggtggagatgctctacgaggaggccctgtacacggtgctttaccgcgcgggtaccatgggccctgaccaggtggacgacgaggaggccctgctcagctatctccagcaggtgtttggcaccagccttgaggagcacactgaggccatcgagcgagtgaggaaggccaaggcccccacgtatgccctgaaagtctctgtcatgcgtgccaagaaccttctggccaaggaccccaacggcttcagcgacccatactgcatgctgggcatcctgcctgcctcggacgccacgcgggagccccgtgcacagaaggagcagcgcttcggcttccgcaagggcagcaagcgcggtggacccctgcctgccaagtgcatccaggtcaccgaggtgaagagcagcaccctgaaccccgtctggaaggagcacttcctcttcgagattgaggatgtgagcacggaccagctgcacctggacatctgggatcatgacgacgatgtatccctggtagaagcgtgcaggaagctgaatgaagtcatcggcctgaagggcatgggcaggtacttcaaacagatcgtcaagtcagcccgcgcaaacgggacagcaggacccatcgaggaccacaccgatgacttcctggggtgcctcaacatacctgtccgggaggtgcctgtggctggcgtcgaccgctggttcaagctggagccacgctccagtgcctcgcgtgtgcagggacactgccacctggttctcaagctgatcactacgcagagggatacggccatgagccagcgcgggcgatccggcttcctgtcccacctgctgctgctcagccatctgctgcggttggagcactcagcagaggagcccaactccagcagctggcgaggagagctcagcacaccagccgccaccatcctctgcctgcacggagcccagagcaacctgtcacccttgcagctggccgtgctgcactggcaggtcagcagccgccaccatcaaacctgcacgctggactacagctacctgctggggctgctggaggacatgcaggcacactgggaagaggctccttcactgccccaggagcaggaggagagcctggctgatagcctttccgccttctctgagttcgggctgcagctgctgcgccagctccgagactacttccctgccaccaacagcaccgctgtccaccgcctggagctgctgctgaagtgggtgcagcgccgcgtgtcagcgtgggtgggggcggctggcagggcaggccccacgtcagcgtgctgcccccacccaggtgtctgggcaagctgcagctcttccaaccctcctttgagatctgccccttcgagtcggagctgaacatggacattgctgcggccctgaagagaggcaaccgtgagtggtacgacaggatcctgaatgacaagagtccccgagagcagccaggaccacagcgcctgcctgggctggttgtgctggctgacgccgtctatgatgaccttcagttctgctacagtgtgtacgccagcctcttccacagcatcctcaatgtggacgtcttcaccctgaccttccggcagctggagcgtctggtggctgaggaggcgtgggtgctgacggaggagctgagccccaagatgaccctggaggtggcctcggggctctttgagctctacctgaccctggctgacctccagcgcttctgggatagcatccctggccgggacagccgctctctggccctggctggcatccacgcccccttcctgcctgctgtgaagctctggttccaagtgctgagggaccaggccaagtggaggcttcagggagccgtggacatggacacgctggagcccgtggacgcctcctccaggcacagcagctccgcagccactgctggtctctgcctcagccacatccaggagttgtgggtgcgcctggcgtggcctgaccctgcccaggctcaggggctgggcacccagcttggccaggacgtgtgtgaggccaccctcttctatacggagctgcttcggaagaaggtggacactcagccaggggcggccggtgaagcagtgagcgaggcgctctgcgtggtcctcaacaatgtggagctcgtgcgcaaggctgctgggcaggccttgaagggcctggcatggccagagggggccacggggcccgagggggtgctcccccgccctctgctcagctgcacacaggccctggacgatgatctgcaacgggaggcccacacggtgacagcgcacctgacctctaagatggtgggcgacatccgcaagtatgtacagcacatcagtctctcgcctgactccatccagaacgatgaggccgtggccccgctcatgaagtacctggatgagaagctggccctgctgaacgcctcgctggtgaaggggaacctgagcagggtgctggaggccctgtgggagctactcctccaggccattctgcaggcgctgggtgcaaaccgtgacgtctctgctgatttctacagccgcttccatttcacgctggaggccctggtcagttttttccacgcagagggtcagggtttgcccctggagagcctgagggatggaagctacaaggtgaggtgggaccctctgtggggcgggggtgtggatgaggggactgagttcaaactgcagccccacacgggctgtgtccttgagcatgaggtggccccacgggcagtcaggtctccaagtgccagcgctgaccaccagcacccaggggcccctcctgatgcgcttccccctgcagaggctgaaggaggagctgcggctgcacaaatgttccacccgcgagtgcatcgagcagttctacctggacaagctcaaacagaggaccctggagcagaaccggtttggacgcctgagcgtccgttgccattacgaggcggctgagcagcggctggccgtggaggtgctgcacgccgcggacctgctccccctggacgccaacggcttaagtgacccctttgtgatcgtggagctgggcccaccgcatctctttccactggtccgcagccagaggacccaggtgaagacccggacgctgcaccctgtatacgacgaactcttctacttttccgtgcctgccgaggcgtgccgccgccgcgcggcctgtgtgttgttcaccgtcatggaccacgactggctgtccaccaacgacttcgctggggaggcggccctcggcctaggtggcgtcactggtgtcgcccggccccaggtgggcgggggtgcaagggctgggcagcctgtcaccctgcacctgtgccggcccagagcccaggtgagatctgcgctgaggaggctggaaggccgcaccagcaaggaggcgcaggagttcgtgaagaaactcaaggagctggagaagtgcatggaggcggacccctgagtccatcagctgccagccccggccctggcccccaccccaagttccctgaagcatcctccagctcactgtggccagctttgtgcaaccagggcccacggcgcccctcctgtgctgtgacgtgtgtgtcgtggctggccccgcggcgcctaccgccctggccgtgtctgtctggtgtgtgctgtgaacccctgcacccaaccccacatctgggtggccaacttggcaggacttggccagcagctgcccaggacacagtgcaggccagagcgggcttgaccacctggtgggcctccctgcccgcttccttgggctccccggccctgggtgggcggtgcgcagctggtctccagggactcagtgagtggctgtgctctctgcacaacgggcaatgtgcagacgcatttttggtaatcacagctggggagtgaaaagggtgccactggcaccactgggtggatggtccagagcctccacccacagaggggatgcaaagggcaggtgagtcaagaaccgcataggtctccagtccccacggggctcccaggccggggaaaggttcccctgaggtcactctgaggccagggacgtcacccaaggctggtggtcagtgtgaagggctccgtgccaactggtcagctgtccttcacgcacatatccgtggccacctgagacctgctccacgacccttccaggcagagccgagagttcgccccaacccttccccaggcccagtgtgaaaaacagactcacaaggggcttcttggcctgcagcttcatttgcgagagcgccgaggcaggacacagagcacagctgtgctggaagtgtggggagaacccggacagctcagtcctgccagcagccgcaaagagccgaggctgccaggcccatttatgtccctcatgtctctagattttctcgtcacccagcctcaaaaatatatgtgtctgcaaccctcagtctctctgccgtttcttgattcctttccaaacctcagccggggccctggcctcagccccccgtccctgcgtctgctcctcttcacagcagctgctgctggctcctccgcgctcggcgccaggccctgggtcctcagacgcatcactgtcatcagtgtccgagggcagccgggtgctggccacaggcctgttggggtttccaaactctctccctgaatccacatcgaagggatctgagccgagagaggaaagtggcctctaagtgagctcagagcaggaccaggcctcccaccccccaggctttggagggccttggttcccaccccgccaaggctcaccgatctcctcctcctgggggctctccttggcattggccaagaactcctgctccgcctgcagcacctcctccgggctgccgcaggccgcgtacttgtccaggagctggcggttcaggtccaagaagcccttgccccatttaaacttccgcagcaaaatgacagcaaggtctggaaagcctgacggtgtgagaaacaggaaacccaaagaagtcgacggtcccctcaagtgcctcctgatcaccctgctgccggatggcggcgctctcccaagtaaccgcagggtccccagcaaacatcagctcacagtcctgagaacccgtgctgcccccagcctgcacctcccttgctacagtccacacctctgcaaccgaccaagtccccctcctttgctgcgaaacaaacattcccaccaagactgcccca

SEQ ID NO: 406355 - DNA, 1193 bp, Homo sapiens
  misc_feature (134)..(134): n is a, c, g, or t
  misc_feature (139)..(140): n is a, c, g, or t
  misc_feature (142)..(142): n is a, c, g, or t
  misc_feature (149)..(149): n is a, c, g, or t
  misc_feature (151)..(151): n is a, c, g, or t
  misc_feature (153)..(154): n is a, c, g, or t
  misc_feature (161)..(161): n is a, c, g, or t
  misc_feature (214)..(214): n is a, c, g, or t
  misc_feature (216)..(216): n is a, c, g, or t
  misc_feature (221)..(221): n is a, c, g, or t
tctccccaattcctatcagggttacccctgcgtttttctaaatttttttcgcccccccctctatttggggccccccccatttctcccccccttgttgcacaaaaaaaactggcctcccggaacaacccttttgnccccnngnccccttncntnnaccctcnttttctccccccccccaatataatttccccccaggtttttttttttttttttntnttttntttttttttttttcttggcctgcagcttcatttgcgagagcgccgaggcaggacacagagcacagctgtgctggaagtgtggggagaacccggacagctcagtcctgccagcagccgcaaagagccgaggctgccaggcccatttatgtccctcatgtctctagattttctcgtcacccagcctcaaaaatatatgtgtctgcaaccctcagtctctctgccgtttcttgattcctttccaaacctcagccggggccctggcctcagccccccgtccctgcgtctgctcctcttcacagcagctgctgctggctcctccgcgctcggcgccaggccctgggtcctcagacgcatcactgtcatcagtgtccgagggcagccgggtgctggccacaggcctgttggggtttccaaactctctccctgaatccacatcgaagggatctgagccgagagaggaaagtggcctctaagtgagctcagagcaggaccaggcctcccaccccccaggctttggagggccttggttcccaccccgccaaggctcaccgatctcctcctcctgggggctctccttggcattggccaagaactcctgctccgcctgcagcacctcctccgggctgccgcaggccgcgtacttgtccaggagctggcggttcaggtccaagaagcccttgccccatttaaacttccgcagcaaaatgacagcaaggtctggaaagcctgacggtgtgagaaacaggaaacccaaagaagtcgacggtcccctcaagtgcctcctgatcaccctgctgccggatggcggcgctctcccaagtaaccgcagggtccccagcaaacatcagctcacagtcctgagaacccgtgctgcccccagcctgcacctcccttgctacagtccacacctctgcaaccgaccaagtccccctcctttgctgcgaaacaaacattcccaccaagactgcccca

SEQ ID NO: 406356 - DNA, 4521 bp, Homo sapiens
atgagaccccggggagcagcgtttgcagcgggcccgccaggtgacctgcacctgggcaccgccatcggcttcgcaggggccatctggaggagtcggtcacccgccatgtcgaccttgctggacattaagagcagcgtgctcaggcaggtgcaggtgtgcccgtccttccgccgcaggactgagcaggacccagggagtgccagcgccgacccgcaggagcctgccacgggggcctggaaacccggggatggcgtggagttctttgcccacatgcgcctcatgctgaagaagggggaaggcagacagggcttgccgtgcctcgaggtccccctgcgcagtggctcgccagcacccccggagcctgtggatcccagcctcggcctgagagccctggccccagaggaggtggagatgctctacgaggaggccctgtacacggtgctttaccgcgcgggtaccatgggccctgaccaggtggacgacgaggaggccctgctcagctatctccagcaggtgtttggcaccagccttgaggagcacactgaggccatcgagcgagtgaggaaggccaaggcccccacgtatgccctgaaagtctctgtcatgcgtgccaagaaccttctggccaaggaccccaacggcttcagcgacccatactgcatgctgggcatcctgcctgcctcggacgccacgcgggagccccgtgcacagaaggagcagcgcttcggcttccgcaagggcagcaagcgcggtggacccctgcctgccaagtgcatccaggtcaccgaggtgaagagcagcaccctgaaccccgtctggaaggagcacttcctcttcgagattgaggatgtgagcacggaccagctgcacctggacatctgggatcatgacgacgatgtatccctggtagaagcgtgcaggaagctgaatgaagtcatcggcctgaagggcatgggcaggtacttcaaacagatcgtcaagtcagcccgcgcaaacgggacagcaggacccatcgaggaccacaccgatgacttcctggggtgcctcaacatacctgtccgggaggtgcctgtggctggcgtcgaccgctggttcaagctggagccacgctccagtgcctcgcgtgtgcagggacactgccacctggttctcaagctgatcactacgcagagggatacggccatgagccagcgcgggcgatccggcttcctgtcccacctgctgctgctcagccatctgctgcggttggagcactcagcagaggagcccaactccagcagctggcgaggagagctcagcacaccagccgccaccatcctctgcctgcacggagcccagagcaacctgtcacccttgcagctggccgtgctgcactggcaggtcagcagccgccaccatcaaacctgcacgctggactacagctacctgctggggctgctggaggacatgcaggcacactgggaagaggctccttcactgccccaggagcaggaggagagcctggctgatagcctttccgccttctctgagttcgggctgcagctgctgcgccagctccgagactacttccctgccaccaacagcaccgctgtccaccgcctggagctgctgctgaagtgtctgggcaagctgcagctcttccaaccctcctttgagatctgccccttcgagtcggagctgaacatggacattgctgcggccctgaagagaggcaaccgtgagtggtacgacaggatcctgaatgacaagagtccccgagagcagccaggaccacagcgcctgcctgggctggttgtgctggctgacgccgtctatgatgaccttcagttctgctacagtgtgtacgccagcctcttccacagcatcctcaatgtggacgtcttcaccctgaccttccggcagctggagcgtctggtggctgaggaggcgtgggtgctgacggaggagctgagccccaagatgaccctggaggtggcctcggggctctttgagctctacctgaccctggctgacctccagcgcttctgggatagcatccctggccgggacagccgctctctggccctggctggcatccacgcccccttcctgcctgctgtgaagctctggttccaagtgctgagggaccaggccaagtggaggcttcagggagccgtggacatggacacgctggagcccgtggacgcctcctccaggcacagcagctccgcagccactgctggtctctgcctcagccacatccaggagttgtgggtgcgcctggcgtggcctgaccctgcccaggctcaggggctgggcacccagcttggccaggacgtgtgtgaggccaccctcttctatacggagctgcttcggaagaaggtggacactcagccaggggcggccggtgaagcagtgagcgaggcgctctgcgtggtcctcaacaatgtggagctcgtgcgcaaggctgctgggcaggccttgaagggcctggcatggccagagggggccacggggcccgagggggtgctcccccgccctctgctcagctgcacacaggccctggacgatgatctgcaacgggaggcccacacggtgacagcgcacctgacctctaagatggtgggcgacatccgcaagtatgtacagcacatcagtctctcgcctgactccatccagaacgatgaggccgtggccccgctcatgaagtacctggatgagaagctggccctgctgaacgcctcgctggtgaaggggaacctgagcagggtgctggaggccctgtgggagctactcctccaggccattctgcaggcgctgggtgcaaaccgtgacgtctctgctgatttctacagccgcttccatttcacgctggaggccctggtcagttttttccacgcagagggtcagggtttgcccctggagagcctgagggatggaagctacaagaggctgaaggaggagctgcggctgcacaaatgttccacccgcgagtgcatcgagcagttctacctggacaagctcaaacagaggaccctggagcagaaccggtttggacgcctgagcgtccgttgccattacgaggcggctgagcagcggctggccgtggaggtgctgcacgccgcggacctgctccccctggacgccaacggcttaagtgacccctttgtgatcgtggagctgggcccaccgcatctctttccactggtccgcagccagaggacccaggtgaagacccggacgctgcaccctgtatacgacgaactcttctacttttccgtgcctgccgaggcgtgccgccgccgcgcggcctgtgtgttgttcaccgtcatggaccacgactggctgtccaccaacgacttcgctggggaggcggccctcggcctaggtggcgtcactggtgtcgcccggccccaggtgggcgggggtgcaagggctgggcagcctgtcaccctgcacctgtgccggcccagagcccaggtgagatctgcgctgaggaggctggaaggccgcaccagcaaggaggcgcaggagttcgtgaagaaactcaaggagctggagaagtgcatggaggcggacccctgagtccatcagctgccagccccggccctggcccccaccccaagttccctgaagcatcctccagctcactgtggccagctttgtgcaaccagggcccacggcgcccctcctgtgctgtgacgtgtgtgtcgtggctggccccgcggcgcctaccgccctggccgtgtctgtctggtgtgtgctgtgaacccctgcacccaaccccacatctgggtggccaacttggcaggacttggccagcagctgcccaggacacagtgcaggccagagcgggcttgaccacctggtgggcctccctgcccgcttccttgggctccccggccctgggtgggcggtgcgcagctggtctccagggactcagtgagtggctgtgctctctgcacaacgggcaatgtgcagacgcatttttggtaatcacagctggggagtgaaaagggtgccactggcaccactgggtggatggtccagagcctccacccacagaggggatgcaaagggcaggtgagtcaagaaccgcataggtctccagtccccacggggctcccaggccggggaaaggttcccctgaggtcactctgaggccagggacgtcacccaaggctggtggtcagtgtgaagggctccgtgccaactggtcagctgtccttcacgcacatatccgtggccacctgagacctgctccacgacccttccaggcagagccgagagttcgccccaacccttccccaggcccagtgtgaaaaacagactcacaaggggcttcttggcctgcagcttcatttgcgagagcgccgaggcaggacacagagcacagctgtgctggaagtgtggggagaacccggacagctcagtcctgccagcagccgcaaagagccgaggctgccaggcccatttatgtccctcatgtctctagattttctcgtcacccagcctcaaaaatatatgtgtctgcaaccctca

SEQ ID NO: 406357 - DNA, 4678 bp, Homo sapiens
  misc_feature (87)..(87): n is a, c, g, or t
cgcccagcagttgctcagtcgtcggcgcgcgcggctgggagcggtagctgtgcctcggcgtccccgagctggtgccgagcgcagcgncccaggagcccccccatccccgcgccggcccacggtcacccgccatgtcgaccttgctggacattaagagcagcgtgctcaggcaggtgcaggtgtgcccgtccttccgccgcaggactgagcaggacccagggagtgccagcgccgacccgcaggagcctgccacgggggcctggaaacccggggatggcgtggagttctttgcccacatgcgcctcatgctgaagaagggggaaggcagacagggcttgccgtgcctcgaggcctggggctctccctgccgtcagagccctcaccctgggccccacacacaggtccccctgcgcagtggctcgccagcacccccggagcctgtggatcccagcctcggcctgagagccctggccccagaggaggtggagatgctctacgaggaggccctgtacacggtgctttaccgcgcgggtaccatgggccctgaccaggtggacgacgaggaggccctgctcagctatctccagcaggtgtttggcaccagccttgaggagcacactgaggccatcgagcgagtgaggaaggccaaggcccccacgtatgccctgaaagtctctgtcatgcgtgccaagaaccttctggccaaggaccccaacggcttcagcgacccatactgcatgctgggcatcctgcctgcctcggacgccacgcgggagccccgtgcacagaaggagcagcgcttcggcttccgcaagggcagcaagcgcggtggacccctgcctgccaagtgcatccaggtcaccgaggtgaagagcagcaccctgaaccccgtctggaaggagcacttcctcttcgagattgaggatgtgagcacggaccagctgcacctggacatctgggatcatgacgacgatgtatccctggtagaagcgtgcaggaagctgaatgaagtcatcggcctgaagggcatgggcaggtacttcaaacagatcgtcaagtcagcccgcgcaaacgggacagcaggacccatcgaggaccacaccgatgacttcctggggtgcctcaacatacctgtccgggaggtgcctgtggctggcgtcgaccgctggttcaagctggagccacgctccagtgcctcgcgtgtgcagggacactgccacctggttctcaagctgatcactacgcagagggatacggccatgagccagcgcgggcgatccggcttcctgtcccacctgctgctgctcagccatctgctgcggttggagcactcagcagaggagcccaactccagcagctggcgaggagagctcagcacaccagccgccaccatcctctgcctgcacggagcccagagcaacctgtcacccttgcagctggccgtgctgcactggcaggtcagcagccgccaccatcaaacctgcacgctggactacagctacctgctggggctgctggaggacatgcaggcacactgggaagaggctccttcactgccccaggagcaggaggagagcctggctgatagcctttccgccttctctgagttcgggctgcagctgctgcgccagctccgagactacttccctgccaccaacagcaccgctgtccaccgcctggagctgctgctgaagtgggtgcagcgccgcgtgtcagcgtgggtgggggcggctggcagggcaggccccacgtcagcgtgctgcccccacccaggtgtctgggcaagctgcagctcttccaaccctcctttgagatctgccccttcgagtcggagctgaacatggacattgctgcggccctgaagagaggcaaccgtgagtggtacgacaggatcctgaatgacaagagtccccgagagcagccaggaccacagcgcctgcctgggctggttgtgctggctgacgccgtctatgatgaccttcagttctgctacagtgtgtacgccagcctcttccacagcatcctcaatgtggacgtcttcaccctgaccttccggcagctggagcgtctggtggctgaggaggcgtgggtgctgacggaggagctgagccccaagatgaccctggaggtggcctcggggctctttgagctctacctgaccctggctgacctccagcgcttctgggatagcatccctggccgggacagccgctctctggccctggctggcatccacgcccccttcctgcctgctgtgaagctctggttccaagtgctgagggaccaggccaagtggaggcttcagggagccgtggacatggacacgctggagcccgtggacgcctcctccaggcacagcagctccgcagccactgctggtctctgcctcagccacatccaggagttgtgggtgcgcctggcgtggcctgaccctgcccaggctcaggggctgggcacccagcttggccaggacgtgtgtgaggccaccctcttctatacggagctgcttcggaagaaggtggacactcagccaggggcggccggtgaagcagtgagcgaggcgctctgcgtggtcctcaacaatgtggagctcgtgcgcaaggctgctgggcaggccttgaagggcctggcatggccagagggggccacggggcccgagggggtgctcccccgccctctgctcagctgcacacaggccctggacgatgatctgcaacgggaggcccacacggtgacagcgcacctgacctctaagatggtgggcgacatccgcaagtatgtacagcacatcagtctctcgcctgactccatccagaacgatgaggccgtggccccgctcatgaagtacctggatgagaagctggccctgctgaacgcctcgctggtgaaggggaacctgagcagggtgctggaggccctgtgggagctactcctccaggccattctgcaggcgctgggtgcaaaccgtgacgtctctgctgatttctacagccgcttccatttcacgctggaggccctggtcagttttttccacgcagagggtcagggtttgcccctggagagcctgagggatggaagctacaagaggctgaaggaggagctgcggctgcacaaatgttccacccgcgagtgcatcgagcagttctacctggacaagctcaaacagaggaccctggagcagaaccggtttggacgcctgagcgtccgttgccattacgaggcggctgagcagcggctggccgtggaggtgctgcacgccgcggacctgctccccctggacgccaacggcttaagtgacccctttgtgatcgtggagctgggcccaccgcatctctttccactggtccgcagccagaggacccaggtgaagacccggacgctgcaccctgtatacgacgaactcttctacttttccgtgcctgccgaggcgtgccgccgccgcgcggcctgtgtgttgttcaccgtcatggaccacgactggctgtccaccaacgacttcgctggggaggcggccctcggcctaggtggcgtcactggtgtcgcccggccccaggtgggcgggggtgcaagggctgggcagcctgtcaccctgcacctgtgccggcccagagcccaggtgagatctgcgctgaggaggctggaaggccgcaccagcaaggaggcgcaggagttcgtgaagaaactcaaggagctggagaagtgcatggaggcggacccctgagtccatcagctgccagccccggccctggcccccaccccaagttccctgaagcatcctccagctcactgtggccagctttgtgcaaccagggcccacggcgcccctcctgtgctgtgacgtgtgtgtcgtggctggccccgcggcgcctaccgccctggccgtgtctgtctggtgtgtgctgtgaacccctgcacccaaccccacatctgggtggccaacttggcaggacttggccagcagctgcccaggacacagtgcaggccagagcgggcttgaccacctggtgggcctccctgcccgcttccttgggctccccggccctgggtgggcggtgcgcagctggtctccagggactcagtgagtggctgtgctctctgcacaacgggcaatgtgcagacgcatttttggtaatcacagctggggagtgaaaagggtgccactggcaccactgggtggatggtccagagcctccacccacagaggggatgcaaagggcaggtgagtcaagaaccgcataggtctccagtccccacggggctcccaggccggggaaaggttcccctgaggtcactctgaggccagggacgtcacccaaggctggtggtcagtgtgaagggctccgtgccaactggtcagctgtccttcacgcacatatccgtggccacctgagacctgctccacgacccttccaggcagagccgagagttcgccccaacccttccccaggcccagtgtgaaaaacagactcacaaggggcttcttggcctgcagcttcatttgcgagagcgccgaggcaggacacagagcacagctgtgctggaagtgtggggagaacccggacagctcagtcctgccagcagccgcaaagagccgaggctgccaggcccatttatgtccctcatgtctctagattttctcgtcacccagcctcaaaaatatatgtgtctgcaaccctca

SEQ ID NO: 406358 - DNA, 5388 bp, Homo sapiens
  misc_feature (87)..(87): n is a, c, g, or t
cgcccagcagttgctcagtcgtcggcgcgcgcggctgggagcggtagctgtgcctcggcgtccccgagctggtgccgagcgcagcgncccaggagcccccccatccccgcgccggcccacggtcacccgccatgtcgaccttgctggacattaagagcagcgtgctcaggcaggtgcaggtgtgcccgtccttccgccgcaggactgagcaggacccagggagtgccagcgccgacccgcaggagcctgccacgggggcctggaaacccggggatggcgtggagttctttgcccacatgcgcctcatgctgaagaagggggaaggcagacagggcttgccgtgcctcgaggtccccctgcgcagtggctcgccagcacccccggagcctgtggatcccagcctcggcctgagagccctggccccagaggaggtggagatgctctacgaggaggccctgtacacggtgctttaccgcgcgggtaccatgggccctgaccaggtggacgacgaggaggccctgctcagctatctccagcaggtgtttggcaccagccttgaggagcacactgaggccatcgagcgagtgaggaaggccaaggcccccacgtatgccctgaaagtctctgtcatgcgtgccaagaaccttctggccaaggaccccaacggcttcagcgacccatactgcatgctgggcatcctgcctgcctcggacgccacgcgggagccccgtgcacagaaggagcagcgcttcggcttccgcaagggcagcaagcgcggtggacccctgcctgccaagtgcatccaggtcaccgaggtgaagagcagcaccctgaaccccgtctggaaggagcacttcctcttcgagattgaggatgtgagcacggaccagctgcacctggacatctgggatcatgacgacgatgtatccctggtagaagcgtgcaggaagctgaatgaagtcatcggcctgaagggcatgggcaggtacttcaaacagatcgtcaagtcagcccgcgcaaacgggacagcaggacccatcgaggaccacaccgatgacttcctggggtgcctcaacatacctgtccgggaggtgcctgtggctggcgtcgaccgctggttcaagctggagccacgctccagtgcctcgcgtgtgcagggacactgccacctggttctcaagctgatcactacgcagagggatacggccatgagccagcgcgggcgatccggcttcctgtcccacctgctgctgctcagccatctgctgcggttggagcactcagcagaggagcccaactccagcagctggcgaggagagctcagcacaccagccgccaccatcctctgcctgcacggagcccagagcaacctgtcacccttgcagctggccgtgctgcactggcaggtcagcagccgccaccatcaaacctgcacgctggactacagctacctgctggggctgctggaggacatgcaggcacactgggaagaggctccttcactgccccaggagcaggaggagagcctggctgatagcctttccgccttctctgagttcgggctgcagctgctgcgccagctccgagactacttccctgccaccaacagcaccgctgtccaccgcctggagctgctgctgaagtgggtgcagcgccgcgtgtcagcgtgggtgggggcggctggcagggcaggccccacgtcagcgtgctgcccccacccaggtgtctgggcaagctgcagctcttccaaccctcctttgagatctgccccttcgagtcggagctgaacatggacattgctgcggccctgaagagaggcaaccgtgagtggtacgacaggatcctgaatgacaagagtccccgagagcagccaggaccacagcgcctgcctgggctggttgtgctggctgacgccgtctatgatgaccttcagttctgctacagtgtgtacgccagcctcttccacagcatcctcaatgtggacgtcttcaccctgaccttccggcagctggagcgtctggtggctgaggaggcgtgggtgctgacggaggagctgagccccaagatgaccctggaggtggcctcggggctctttgagctctacctgaccctggctgacctccagcgcttctgggatagcatccctggccgggacagccgctctctggccctggctggcatccacgcccccttcctgcctgctgtgaagctctggttccaagtgctgagggaccaggccaagtggaggcttcagggagccgtggacatggacacgctggagcccgtggacgcctcctccaggcacagcagctccgcagccactgctggtctctgcctcagccacatccaggagttgtgggtgcgcctggcgtggcctgaccctgcccaggctcaggggctgggcacccagcttggccaggacgtgtgtgaggccaccctcttctatacggagctgcttcggaagaaggtggacactcagccaggggcggccggtgaagcagtgagcgaggcgctctgcgtggtcctcaacaatgtggagctcgtgcgcaaggctgctgggcaggccttgaagggcctggcatggccagagggggccacggggcccgagggggtgctcccccgccctctgctcagctgcacacaggccctggacgatgatctgcaacgggaggcccacacggtgacagcgcacctgacctctaagatggtgggcgacatccgcaagtatgtacagcacatcagtctctcgcctgactccatccagaacgatgaggccgtggccccgctcatgaagtacctggatgagaagctggccctgctgaacgcctcgctggtgaaggggaacctgagcagggtgctggaggccctgtgggagctactcctccaggccattctgcaggcgctgggtgcaaaccgtgacgtctctgctgatttctacagccgcttccatttcacgctggaggccctggtcagttttttccacgcagagggtcagggtttgcccctggagagcctgagggatggaagctacaagaggctgaaggaggagctgcggctgcacaaatgttccacccgcgagtgcatcgagcagttctacctggacaagctcaaacagaggaccctggagcagaaccggtttggacgcctgagcgtccgttgccattacgaggcggctgagcagcggctggccgtggaggtgctgcacgccgcggacctgctccccctggacgccaacggcttaagtgacccctttgtgatcgtggagctgggcccaccgcatctctttccactggtccgcagccagaggacccaggtgaagacccggacgctgcaccctgtatacgacgaactcttctacttttccgtgcctgccgaggcgtgccgccgccgcgcggcctgtgtgttgttcaccgtcatggaccacgactggctgtccaccaacgacttcgctggggaggcggccctcggcctaggtggcgtcactggtgtcgcccggccccaggtgggcgggggtgcaagggctgggcagcctgtcaccctgcacctgtgccggcccagagcccaggtgagatctgcgctgaggaggctggaaggccgcaccagcaaggaggcgcaggagttcgtgaagaaactcaaggagctggagaagtgcatggaggcggacccctgagtccatcagctgccagccccggccctggcccccaccccaagttccctgaagcatcctccagctcactgtggccagctttgtgcaaccagggcccacggcgcccctcctgtgctgtgacgtgtgtgtcgtggctggccccgcggcgcctaccgccctggccgtgtctgtctggtgtgtgctgtgaacccctgcacccaaccccacatctgggtggccaacttggcaggacttggccagcagctgcccaggacacagtgcaggccagagcgggcttgaccacctggtgggcctccctgcccgcttccttgggctccccggccctgggtgggcggtgcgcagctggtctccagggactcagtgagtggctgtgctctctgcacaacgggcaatgtgcagacgcatttttggtaatcacagctggggagtgaaaagggtgccactggcaccactgggtggatggtccagagcctccacccacagaggggatgcaaagggcaggtgagtcaagaaccgcataggtctccagtccccacggggctcccaggccggggaaaggttcccctgaggtcactctgaggccagggacgtcacccaaggctggtggtcagtgtgaagggctccgtgccaactggtcagctgtccttcacgcacatatccgtggccacctgagacctgctccacgacccttccaggcagagccgagagttcgccccaacccttccccaggcccagtgtgaaaaacagactcacaaggggcttcttggcctgcagcttcatttgcgagagcgccgaggcaggacacagagcacagctgtgctggaagtgtggggagaacccggacagctcagtcctgccagcagccgcaaagagccgaggctgccaggcccatttatgtccctcatgtctctagattttctcgtcacccagcctcaaaaatatatgtgtctgcaaccctcagtctctctgccgtttcttgattcctttccaaacctcagccggggccctggcctcagccccccgtccctgcgtctgctcctcttcacagcagctgctgctggctcctccgcgctcggcgccaggccctgggtcctcagacgcatcactgtcatcagtgtccgagggcagccgggtgctggccacaggcctgttggggtttccaaactctctccctgaatccacatcgaagggatctgagccgagagaggaaagtggcctctaagtgagctcagagcaggaccaggcctcccaccccccaggctttggagggccttggttcccaccccgccaaggctcaccgatctcctcctcctgggggctctccttggcattggccaagaactcctgctccgcctgcagcacctcctccgggctgccgcaggccgcgtacttgtccaggagctggcggttcaggtccaagaagcccttgccccatttaaacttccgcagcaaaatgacagcaaggtctggaaagcctgacggtgtgagaaacaggaaacccaaagaagtcgacggtcccctcaagtgcctcctgatcaccctgctgccggatggcggcgctctcccaagtaaccgcagggtccccagcaaacatcagctcacagtcctgagaacccgtgctgcccccagcctgcacctcccttgctacagtccacacctctgcaaccgaccaagtccccctcctttgctgcgaaacaaacattcccaccaagactgcccca

SEQ ID NO: 406359 - DNA, 5219 bp, Homo sapiens
  misc_feature (87)..(87): n is a, c, g, or t
cgcccagcagttgctcagtcgtcggcgcgcgcggctgggagcggtagctgtgcctcggcgtccccgagctggtgccgagcgcagcgncccaggagcccccccatccccgcgccggcccacggtcacccgccatgtcgaccttgctggacattaagagcagcgtgctcaggcaggtgcaggtgtgcccgtccttccgccgcaggactgagcaggacccagggagtgccagcgccgacccgcaggagcctgccacgggggcctggaaacccggggatggcgtggagttctttgcccacatgcgcctcatgctgaagaagggggaaggcagacagggcttgccgtgcctcgaggtccccctgcgcagtggctcgccagcacccccggagcctgtggatcccagcctcggcctgagagccctggccccagaggaggtggagatgctctacgaggaggccctgtacacggtgctttaccgcgcgggtaccatgggccctgaccaggtggacgacgaggaggccctgctcagctatctccagcaggtgtttggcaccagccttgaggagcacactgaggccatcgagcgagtgaggaaggccaaggcccccacgtatgccctgaaagtctctgtcatgcgtgccaagaaccttctggccaaggaccccaacggcttcagcgacccatactgcatgctgggcatcctgcctgcctcggacgccacgcgggagccccgtgcacagaaggagcagcgcttcggcttccgcaagggcagcaagcgcggtggacccctgcctgccaagtgcatccaggtcaccgaggtgaagagcagcaccctgaaccccgtctggaaggagcacttcctcttcgagattgaggatgtgagcacggaccagctgcacctggacatctgggatcatgacgacgatgtatccctggtagaagcgtgcaggaagctgaatgaagtcatcggcctgaagggcatgggcaggtacttcaaacagatcgtcaagtcagcccgcgcaaacgggacagcaggacccatcgaggaccacaccgatgacttcctggggtgcctcaacatacctgtccgggaggtgcctgtggctggcgtcgaccgctggttcaagctggagccacgctccagtgcctcgcgtgtgcagggacactgccacctggttctcaagctgatcactacgcagagggatacggccatgagccagcgcgggcgatccggcttcctgtcccacctgctgctgctcagccatctgctgcggttggagcactcagcagaggagcccaactccagcagctggcgaggagagctcagcacaccagccgccaccatcctctgcctgcacggagcccagagcaacctgtcacccttgcagctggccgtgctgcactggcaggtcagcagccgccaccatcaaacctgcacgctggactacagctacctgctggggctgctggaggacatgcaggcacactgggaagaggctccttcactgccccaggagcaggaggagagcctggctgatagcctttccgccttctctgagttcgggctgcagctgctgcgccagctccgagactacttccctgccaccaacagcaccgctgtccaccgcctggagctgctgctgaagtgggtgcagcgccgcgtgtcagcgtgggtgggggcggctggcagggcaggccccacgtcagcgtgctgcccccacccaggtgtctgggcaagctgcagctcttccaaccctcctttgagatctgccccttcgagtcggagctgaacatggacattgctgcggccctgaagagaggcaaccgtgagtggtacgacaggatcctgaatgacaagagtccccgagagcagccaggaccacagcgcctgcctgggctggttgtgctggctgacgccgtctatgatgaccttcagttctgctacagtgtgtacgccagcctcttccacagcatcctcaatgtggacgtcttcaccctgaccttccggcagctggagcgtctggtggctgaggaggcgtgggtgctgacggaggagctgagccccaagatgaccctggaggtggcctcggggctctttgagctctacctgaccctggctgacctccagcgcttctgggatagcatccctggccgggacagccgctctctggccctggctggcatccacgcccccttcctgcctgctgtgaagctctggttccaagtgctgagggaccaggccaagtggaggcttcagggagccgtggacatggacacgctggagcccgtggacgcctcctccaggcacagcagctccgcagccactgctggtctctgcctcagccacatccaggagttgtgggtgcgcctggcgtggcctgaccctgcccaggctcaggggctgggcacccagcttggccaggacgtgtgtgaggccaccctcttctatacggagctgcttcggaagaaggtggacactcagccaggggcggccggtgaagcagtgagcgaggcgctctgcgtggtcctcaacaatgtggagctcgtgcgcaaggctgctgggcaggccttgaagggcctggcatggccagagggggccacggggcccgagggggtgctcccccgccctctgctcagctgcacacaggccctggacgatgatctgcaacgggaggcccacacggtgacagcgcacctgacctctaagatggtgggcgacatccgcaagtatgtacagcacatcagtctctcgcctgactccatccagaacgatgaggccgtggccccgctcatgaagtacctggatgagaagctggccctgctgaacgcctcgctggtgaaggggaacctgagcagggtgctggaggccctgtgggagctactcctccaggccattctgcaggcgctgggtgcaaaccgtgacgtctctgctgatttctacagccgcttccatttcacgctggaggccctggtcagttttttccacgcagagggtcagggtttgcccctggagagcctgagggatggaagctacaagaggctgaaggaggagctgcggctgcacaaatgttccacccgcgagtgcatcgagcagttctacctggacaagctcaaacagaggaccctggagcagaaccggtttggacgcctgagcgtccgttgccattacgaggcggctgagcagcggctggccgtggaggtgctgcacgccgcggacctgctccccctggacgccaacggcttaagtgacccctttgtgatcgtggagctgggcccaccgcatctctttccactggtccgcagccagaggacccaggtgaagacccggacgctgcaccctgtatacgacgaactcttctacttttccgtgcctgccgaggcgtgccgccgccgcgcggcctgtgtgttgttcaccgtcatggaccacgactggctgtccaccaacgacttcgctggggaggcggccctcggcctaggtggcgtcactggtgtcgcccggccccaggtgggcgggggtgcaagggctgggcagcctgtcaccctgcacctgtgccggcccagagcccaggtgagatctgcgctgaggaggctggaaggccgcaccagcaaggaggcgcaggagttcgtgaagaaactcaaggagctggagaagtgcatggaggcggacccctgagtccatcagctgccagccccggccctggcccccaccccaagttccctgaagcatcctccagctcactgtggccagctttgtgcaaccagggcccacggcgcccctcctgtgctgtgacgtgtgtgtcgtggctggccccgcggcgcctaccgccctggccgtgtctgtctggtgtgtgctgtgaacccctgcacccaaccccacatctgggtggccaacttggcaggacttggccagcagctgcccaggacacagtgcaggccagagcgggcttgaccacctggtgggcctccctgcccgcttccttgggctccccggccctgggtgggcggtgcgcagctggtctccagggactcagtgagtggctgtgctctctgcacaacgggcaatgtgcagacgcatttttggtaatcacagctggggagtgaaaagggtgccactggcaccactgggtggatggtccagagcctccacccacagaggggatgcaaagggcaggtgagtcaagaaccgcataggtctccagtccccacggggctcccaggccggggaaaggttcccctgaggtcactctgaggccagggacgtcacccaaggctggtggtcagtgtgaagggctccgtgccaactggtcagctgtccttcacgcacatatccgtggccacctgagacctgctccacgacccttccaggcagagccgagagttcgccccaacccttccccaggcccagtgtgaaaaacagactcacaaggggcttcttggcctgcagcttcatttgcgagagcgccgaggcaggacacagagcacagctgtgctggaagtgtggggagaacccggacagctcagtcctgccagcagccgcaaagagccgaggctgccaggcccatttatgtccctcatgtctctagattttctcgtcacccagcctcaaaaatatatgtgtctgcaaccctcagtctctctgccgtttcttgattcctttccaaacctcagccggggccctggcctcagccccccgtccctgcgtctgctcctcttcacagcagctgctgctggctcctccgcgctcggcgccaggccctgggtcctcagacgcatcactgtcatcagtgtccgagggcagccgatctcctcctcctgggggctctccttggcattggccaagaactcctgctccgcctgcagcacctcctccgggctgccgcaggccgcgtacttgtccaggagctggcggttcaggtccaagaagcccttgccccatttaaacttccgcagcaaaatgacagcaaggtctggaaagcctgacggtgtgagaaacaggaaacccaaagaagtcgacggtcccctcaagtgcctcctgatcaccctgctgccggatggcggcgctctcccaagtaaccgcagggtccccagcaaacatcagctcacagtcctgagaacccgtgctgcccccagcctgcacctcccttgctacagtccacacctctgcaaccgaccaagtccccctcctttgctgcgaaacaaacattcccaccaagactgcccca

SEQ ID NO: 406360 - DNA, 10722 bp, Homo sapiens
  misc_feature (1529)..(1529): n is a, c, g, or t
cgccagggtgtcacgggagacagaatggaggtgctgccggactcggaaatggggtccaagggtagccaaggatggctgcagcttcatatgatcagttgttaaagcaagttgaggcactgaagatggagaactcaaatcttcgacaagagctagaagataattccaatcatcttacaaaactggaaactgaggcatctaatatgaaggaagtacttaaacaactacaaggaagtattgaagatgaagctatggcttcttctggacagattgatttattagagcgtcttaaagagcttaacttagatagcagtaatttccctggagtaaaactgcggtcaaaaatgtccctccgttcttatggaagccgggaaggatctgtatcaagccgttctggagagtgcagtcctgttcctatgggttcatttccaagaagagggtttgtaaatggaagcagagaaagtactggatatttagaagaacttgagaaagagaggtcattgcttcttgctgatcttgacaaagaagaaaaggaaaaagactggtattacgctcaacttcagaatctcactaaaagaatagatagtcttcctttaactgaaaatttttccttacaaacagatatgaccagaaggcaattggaatatgaagcaaggcaaatcagagttgcgatggaagaacaactaggtacctgccaggatatggaaaaacgagcacagcgaagaatagccagaattcagcaaatcgaaaaggacatacttcgtatacgacagcttttacagtcccaagcaacagaagcagagaggtcatctcagaacaagcatgaaaccggctcacatgatgctgagcggcagaatgaaggtcaaggagtgggagaaatcaacatggcaacttctggtaatggtcagggttcaactacacgaatggaccatgaaacagccagtgttttgagttctagtagcacacactctgcacctcgaaggctgacaagtcatctgggaaccaaggtggaaatggtgtattcattgttgtcaatgcttggtactcatgataaggatgatatgtcgcgaactttgctagctatgtctagctcccaagacagctgtatatccatgcgacagtctggatgtcttcctctcctcatccagcttttacatggcaatgacaaagactctgtattgttgggaaattcccggggcagtaaagaggctcgggccagggccagtgcagcactccacaacatcattcactcacagcctgatgacaagagaggcaggcgtgaaatccgagtccttcatcttttggaacagatacgcgcttactgtgaaacctgttgggagtggcaggaagctcatgaaccaggcatggaccaggacaaaaatccaatgccagctcctgttgaacatcagatctgtcctgctgtgtgtgttctaatgaaactttcatttgatgaagagcatagacatgcaatgaatgaactagggggactacaggccattgcagaattattgcaagtggactgtgaaatgtangggcttactaatgaccactacagtattacactaagacgatatgctggaatggctttgacaaacttgacttttggagatgtagccaacaaggctacgctatgctctatgaaaggctgcatgagagcacttgtggcccaactaaaatctgaaagtgaagacttacagcaggttattgcaagtgttttgaggaatttgtcttggcgagcagatgtaaatagtaaaaagacgttgcgagaagttggaagtgtgaaagcattgatggaatgtgctttagaagttaaaaaggaatcaaccctcaaaagcgtattgagtgccttatggaatttgtcagcacattgcactgagaataaagctgatatatgtgctgtagatggtgcacttgcatttttggttggcactcttacttaccggagccagacaaacactttagccattattgaaagtggaggtgggatattacggaatgtgtccagcttgatagctacaaatgaggaccacaggcaaatcctaagagagaacaactgtctacaaactttattacaacacttaaaatctcatagtttgacaatagtcagtaatgcatgtggaactttgtggaatctctcagcaagaaatcctaaagaccaggaagcattatgggacatgggggcagttagcatgctcaagaacctcattcattcaaagcacaaaatgattgctatgggaagtgctgcagctttaaggaatctcatggcaaataggcctgcgaagtacaaggatgccaatattatgtctcctggctcaagcttgccatctcttcatgttaggaaacaaaaagccctagaagcagaattagatgctcagcacttatcagaaacttttgacaatatagacaatttaagtcccaaggcatctcatcgtagtaagcagagacacaagcaaagtctctatggtgattatgtttttgacaccaatcgacatgatgataataggtcagacaattttaatactggcaacatgactgtcctttcaccatatttgaatactacagtgttacccagctcctcttcatcaagaggaagcttagatagttctcgttctgaaaaagatagaagtttggagagagaacgcggaattggtctaggcaactaccatccagcaacagaaaatccaggaacttcttcaaagcgaggtttgcagatctccaccactgcagcccagattgccaaagtcatggaagaagtgtcagccattcatacctctcaggaagacagaagttctgggtctaccactgaattacattgtgtgacagatgagagaaatgcacttagaagaagctctgctgcccatacacattcaaacacttacaatttcactaagtcggaaaattcaaataggacatgttctatgccttatgccaaattagaatacaagagatcttcaaatgatagtttaaatagtgtcagtagtagtgatggttatggtaaaagaggtcaaatgaaaccctcgattgaatcctattctgaagatgatgaaagtaagttttgcagttatggtcaatacccagccgacctagcccataaaatacatagtgcaaatcatatggatgataatgatggagaactagatacaccaataaattatagtcttaaatattcagatgagcagttgaactctggaaggcaaagtccttcacagaatgaaagatgggcaagacccaaacacataatagaagatgaaataaaacaaagtgagcaaagacaatcaaggaatcaaagtacaacttatcctgtttatactgagagcactgatgataaacacctcaagttccaaccacattttggacagcaggaatgtgtttctccatacaggtcacggggagccaatggttcagaaacaaatcgagtgggttctaatcatggaattaatcaaaatgtaagccagtctttgtgtcaagaagatgactatgaagatgataagcctaccaattatagtgaacgttactctgaagaagaacagcatgaagaagaagagagaccaacaaattatagcataaaatataatgaagagaaacgtcatgtggatcagcctattgattatagtttaaaatatgccacagatattccttcatcacagaaacagtcattttcattctcaaagagttcatctggacaaagcagtaaaaccgaacatatgtcttcaagcagtgagaatacgtccacaccttcatctaatgccaagaggcagaatcagctccatccaagttctgcacagagtagaagtggtcagcctcaaaaggctgccacttgcaaagtttcttctattaaccaagaaacaatacagacttattgtgtagaagatactccaatatgtttttcaagatgtagttcattatcatctttgtcatcagctgaagatgaaataggatgtaatcagacgacacaggaagcagattctgctaataccctgcaaatagcagaaataaaagaaaagattggaactaggtcagctgaagatcctgtgagcgaagttccagcagtgtcacagcaccctagaaccaaatccagcagactgcagggttctagtttatcttcagaatcagccaggcacaaagctgttgaattttcttcaggagcgaaatctccctccaaaagtggtgctcagacacccaaaagtccacctgaacactatgttcaggagaccccactcatgtttagcagatgtacttctgtcagttcacttgatagttttgagagtcgttcgattgccagctccgttcagagtgaaccatgcagtggaatggtaagtggcattataagccccagtgatcttccagatagccctggacaaaccatgccaccaagcagaagtaaaacacctccaccacctcctcaaacagctcaaaccaagcgagaagtacctaaaaataaagcacctactgctgaaaagagagagagtggacctaagcaagctgcagtaaatgctgcagttcagagggtccaggttcttccagatgctgatactttattacattttgccacggaaagtactccagatggattttcttgttcatccagcctgagtgctctgagcctcgatgagccatttatacagaaagatgtggaattaagaataatgcctccagttcaggaaaatgacaatgggaatgaaacagaatcagagcagcctaaagaatcaaatgaaaaccaagagaaagaggcagaaaaaactattgattctgaaaaggacctattagatgattcagatgatgatgatattgaaatactagaagaatgtattatttctgccatgccaacaaagtcatcacgtaaagcaaaaaagccagcccagactgcttcaaaattacctccacctgtggcaaggaaaccaagtcagctgcctgtgtacaaacttctaccatcacaaaacaggttgcaaccccaaaagcatgttagttttacaccgggggatgatatgccacgggtgtattgtgttgaagggacacctataaacttttccacagctacatctctaagtgatctaacaatcgaatcccctccaaatgagttagctgctggagaaggagttagaggaggagcacagtcaggtgaatttgaaaaacgagataccattcctacagaaggcagaagtacagatgaggctcaaggaggaaaaacctcatctgtaaccatacctgaattggatgacaataaagcagaggaaggtgatattcttgcagaatgcattaattctgctatgcccaaagggaaaagtcacaagcctttccgtgtgaaaaagataatggaccaggtccagcaagcatctgcgtcgtcttctgcacccaacaaaaatcagttagatggtaagaaaaagaaaccaacttcaccagtaaaacctataccacaaaatactgaatataggacacgtgtaagaaaaaatgcagactcaaaaaataatttaaatgctgagagagttttctcagacaacaaagattcaaagaaacagaatttgaaaaataattccaaggacttcaatgataagctcccaaataatgaagatagagtcagaggaagttttgcttttgattcacctcatcattacacgcctattgaaggaactccttactgtttttcacgaaatgattctttgagttctctagattttgatgatgatgatgttgacctttccagggaaaaggctgaattaagaaaggcaaaagaaaataaggaatcagaggctaaagttaccagccacacagaactaacctccaaccaacaatcagctaataagacacaagctattgcaaagcagccaataaatcgaggtcagcctaaacccatacttcagaaacaatccacttttccccagtcatccaaagacataccagacagaggggcagcaactgatgaaaagttacagaattttgctattgaaaatactccagtttgcttttctcataattcctctctgagttctctcagtgacattgaccaagaaaacaacaataaagaaaatgaacctatcaaagagactgagccccctgactcacagggagaaccaagtaaacctcaagcatcaggctatgctcctaaatcatttcatgttgaagataccccagtttgtttctcaagaaacagttctctcagttctcttagtattgactctgaagatgacctgttgcaggaatgtataagctccgcaatgccaaaaaagaaaaagccttcaagactcaagggtgataatgaaaaacatagtcccagaaatatgggtggcatattaggtgaagatctgacacttgatttgaaagatatacagagaccagattcagaacatggtctatcccctgattcagaaaattttgattggaaagctattcaggaaggtgcaaattccatagtaagtagtttacatcaagctgctgctgctgcatgtttatctagacaagcttcgtctgattcagattccatcctttccctgaaatcaggaatctctctgggatcaccatttcatcttacacctgatcaagaagaaaaaccctttacaagtaataaaggcccacgaattctaaaaccaggggagaaaagtacattggaaactaaaaagatagaatctgaaagtaaaggaatcaaaggaggaaaaaaagtttataaaagtttgattactggaaaagttcgatctaattcagaaatttcaggccaaatgaaacagccccttcaagcaaacatgccttcaatctctcgaggcaggacaatgattcatattccaggagttcgaaatagctcctcaagtacaagtcctgtttctaaaaaaggcccaccccttaagactccagcctccaaaagccctagtgaaggtcaaacagccaccacttctcctagaggagccaagccatctgtgaaatcagaattaagccctgttgccaggcagacatcccaaataggtgggtcaagtaaagcaccttctagatcaggatctagagattcgaccccttcaagacctgcccagcaaccattaagtagacctatacagtctcctggccgaaactcaatttcccctggtagaaatggaataagtcctcctaacaaattatctcaacttccaaggacatcatcccctagtactgcttcaactaagtcctcaggttctggaaaaatgtcatatacatctccaggtagacagatgagccaacagaaccttaccaaacaaacaggtttatccaagaatgccagtagtattccaagaagtgagtctgcctccaaaggactaaatcagatgaataatggtaatggagccaataaaaaggtagaactttctagaatgtcttcaactaaatcaagtggaagtgaatctgatagatcagaaagacctgtattagtacgccagtcaactttcatcaaagaagctccaagcccaaccttaagaagaaaattggaggaatctgcttcatttgaatctctttctccatcatctagaccagcttctcccactaggtcccaggcacaaactccagttttaagtccttcccttcctgatatgtctctatccacacattcgtctgttcaggctggtggatggcgaaaactcccacctaatctcagtcccactatagagtataatgatggaagaccagcaaagcgccatgatattgcacggtctcattctgaaagtccttctagacttccaatcaataggtcaggaacctggaaacgtgagcacagcaaacattcatcatcccttcctcgagtaagcacttggagaagaactggaagttcatcttcaattctttctgcttcatcagaatccagtgaaaaagcaaaaagtgaggatgaaaaacatgtgaactctatttcaggaaccaaacaaagtaaagaaaaccaagtatccgcaaaaggaacatggagaaaaataaaagaaaatgaattttctcccacaaatagtacttctcagaccgtttcctcaggtgctacaaatggtgctgaatcaaagactctaatttatcaaatggcacctgctgtttctaaaacagaggatgtttgggtgagaattgaggactgtcccattaacaatcctagatctggaagatctcccacaggtaatactcccccggtgattgacagtgtttcagaaaaggcaaatccaaacattaaagattcaaaagataatcaggcaaaacaaaatgtgggtaatggcagtgttcccatgcgtaccgtgggtttggaaaatcgcctgaactcctttattcaggtggatgcccctgaccaaaaaggaactgagataaaaccaggacaaaataatcctgtccctgtatcagagactaatgaaagttctatagtggaacgtaccccattcagttctagcagctcaagcaaacacagttcacctagtgggactgttgctgccagagtgactccttttaattacaacccaagccctaggaaaagcagcgcagatagcacttcagctcggccatctcagatcccaactccagtgaataacaacacaaagaagcgagattccaaaactgacagcacagaatccagtggaacccaaagtcctaagcgccattctgggtcttaccttgtgacatctgtttaaaagagaggaagaatgaaactaagaaaattctatgttaattacaactgctatatagacattttgtttcaaatgaaactttaaaagactgaaaaattttgtaaataggtttgattcttgttagagggtttttgttctggaagccatatttgatagtatactttgtcttcactggtcttattttgggaggcactcttgatggttaggaaaaaaatagtaaagccaagtatgtttgtacagtatgttttacatgtatttaaagtagcatcccatcccaacttcctttaattattgcttgtcttaaaataatgaacactacagatagaaaatatgatatattgctgttatcaatcatttctagattataaactgactaaacttacatcagggaaaaattggtatttatgcaaaaaaaaatgtttttgtccttgtgagtccatctaacatcataattaatcatgtggctgtgaaattcacagtaatatggttcccgatgaacaagtttacccagcctgctttgctttactgcatgaatgaaactgatggttcaatttcagaagtaatgattaacagttatgtggtcacatgatgtgcatagagatagctacagtgtaataatttacactattttgtgctccaaacaaaacaaaaatctgtgtaactgtaaaacattgaatgaaactattttacctgaactagattttatctgaaagtaggtagaatttttgctatgctgtaatttgttgtatattctggtatttgaggtgagatggctgctcttttattaatgagacatgaattgtgtctcaacagaaactaaatgaacatttcagaataaattattgctgtatgtaaactgttactgaaattggtatttgtttgaagggtcttgtttcacatttgtattaataattgtttaaaatgcctcttttaaaagcttatataaatttttttcttcagcttctatgcattaagagtaaaattcctcttactgtaataaaaacaattgaagaagactgttgccacttaaccattccatgcgttggcacttatctattcctgaaatttcttttatgtgattagctcatcttgatttttaacatttttccacttaaacttttttttcttactccactggagctcagtaaaagtaaattcatgtaatagcaatgcaagcagcctagcacagactaagcattgagcataataggcccacataatttcctctttcttaatattatagaattctgtacttgaaattgattcttagacattgcagtctcttcgaggctttacagtgtaaactgtcttgccccttcatcttcttgttgcaactgggtctgacatgaacactttttatcaccctgtatgttagggcaagatctcagcagtgaagtataatcagcactttgccatgctcagaaaattcaaatcacatggaactttagaggtagatttaatacgattaagatattcagaagtatattttagaatccctgcctgttaaggaaactttatttgtggtaggtacagttctggggtacatgttaagtgtccccttatacagtggagggaagtcttccttcctgaaggaaaataaactgacacttattaactaagataatttacttaatatatcttccctgatttgttttaaaagatcagagggtgactgatgatacatgcatacatatttgttgaataaatgaaaatttatttttagtgataagattcatacactctgtatttggggagagaaaacctttttaagcatggtggggcactcagataggagtgaatacacctacctggtgccttgaaaatcacatcaagtagttaattatctaccccttacctgtgtttataacttccaggtaatgagaatgattttttttaaagctaaaatgccagtaaataaaagtgctatgacttgagctaagatatttgactccaatgcctgtactgtgtctactgcaccactttgtaaacacttcaatttactatctttgaaatgattgacctttaaatttttgccaaatgttatctgaaattgtctatgaataccatctacttctgttgttttcccaggcttccataaacaatggagatacatgcatatagg

SEQ ID NO: 406361 - DNA, 770 bp, Homo sapiens
ttaatttcatttatcttgaactaagactccactgtttcatcctcttagatgctgctacttgaacaatattgttttgagaccaaaaactagcatattaacacaattcttcttaaacgtcttaagagttttgtttcctttacccctttctttaaaaacaagcagccactaaattttttagtagtgaatttcaaaatcctttttaaccttataggtccaagggtagccaaggatggctgcagcttcatatgatcagttgttaaagcaagttgaggcactgaagatggagaactcaaatcttcgacaagagctagaagataattccaatcatcttacaaaactggaaactgaggcatctaatatgaaggtatcaagactgtgacttttaattgtagtttatccatttttattcagtattccctcttgtaaacttgaggtaagacactttacttaaaagtgtattttaaattaagcaataatatgtaaactctttcttgcaaaagttagcatttatatttttaaataagatatattgaattcattcagtgaatcatataaagaaaataagtgtaaaactccaatggctagttagttcttagttctttttaagattaaagagaagagaccaaatataggcatcactgtactgagggcaaggttttctgtgtagttcataggaaactaggcctcatggattttaggaatatgccttggaatatttaagtgtaggccttcctccccaactccctcagatcttgccaccccttaagtgc

SEQ ID NO: 406362 - DNA, 9616 bp, Homo sapiens
  misc_feature (1529)..(1529): n is a, c, g, or t
cgccagggtgtcacgggagacagaatggaggtgctgccggactcggaaatggggtccaagggtagccaaggatggctgcagcttcatatgatcagttgttaaagcaagttgaggcactgaagatggagaactcaaatcttcgacaagagctagaagataattccaatcatcttacaaaactggaaactgaggcatctaatatgaaggaagtacttaaacaactacaaggaagtattgaagatgaagctatggcttcttctggacagattgatttattagagcgtcttaaagagcttaacttagatagcagtaatttccctggagtaaaactgcggtcaaaaatgtccctccgttcttatggaagccgggaaggatctgtatcaagccgttctggagagtgcagtcctgttcctatgggttcatttccaagaagagggtttgtaaatggaagcagagaaagtactggatatttagaagaacttgagaaagagaggtcattgcttcttgctgatcttgacaaagaagaaaaggaaaaagactggtattacgctcaacttcagaatctcactaaaagaatagatagtcttcctttaactgaaaatttttccttacaaacagatatgaccagaaggcaattggaatatgaagcaaggcaaatcagagttgcgatggaagaacaactaggtacctgccaggatatggaaaaacgagcacagcgaagaatagccagaattcagcaaatcgaaaaggacatacttcgtatacgacagcttttacagtcccaagcaacagaagcagagaggtcatctcagaacaagcatgaaaccggctcacatgatgctgagcggcagaatgaaggtcaaggagtgggagaaatcaacatggcaacttctggtaatggtcagggttcaactacacgaatggaccatgaaacagccagtgttttgagttctagtagcacacactctgcacctcgaaggctgacaagtcatctgggaaccaaggtggaaatggtgtattcattgttgtcaatgcttggtactcatgataaggatgatatgtcgcgaactttgctagctatgtctagctcccaagacagctgtatatccatgcgacagtctggatgtcttcctctcctcatccagcttttacatggcaatgacaaagactctgtattgttgggaaattcccggggcagtaaagaggctcgggccagggccagtgcagcactccacaacatcattcactcacagcctgatgacaagagaggcaggcgtgaaatccgagtccttcatcttttggaacagatacgcgcttactgtgaaacctgttgggagtggcaggaagctcatgaaccaggcatggaccaggacaaaaatccaatgccagctcctgttgaacatcagatctgtcctgctgtgtgtgttctaatgaaactttcatttgatgaagagcatagacatgcaatgaatgaactagggggactacaggccattgcagaattattgcaagtggactgtgaaatgtangggcttactaatgaccactacagtattacactaagacgatatgctggaatggctttgacaaacttgacttttggagatgtagccaacaaggctacgctatgctctatgaaaggctgcatgagagcacttgtggcccaactaaaatctgaaagtgaagacttacagcaggttattgcaagtgttttgaggaatttgtcttggcgagcagatgtaaatagtaaaaagacgttgcgagaagttggaagtgtgaaagcattgatggaatgtgctttagaagttaaaaaggaatcaaccctcaaaagcgtattgagtgccttatggaatttgtcagcacattgcactgagaataaagctgatatatgtgctgtagatggtgcacttgcatttttggttggcactcttacttaccggagccagacaaacactttagccattattgaaagtggaggtgggatattacggaatgtgtccagcttgatagctacaaatgaggaccacaggcaaatcctaagagagaacaactgtctacaaactttattacaacacttaaaatctcatagtttgacaatagtcagtaatgcatgtggaactttgtggaatctctcagcaagaaatcctaaagaccaggaagcattatgggacatgggggcagttagcatgctcaagaacctcattcattcaaagcacaaaatgattgctatgggaagtgctgcagctttaaggaatctcatggcaaataggcctgcgaagtacaaggatgccaatattatgtctcctggctcaagcttgccatctcttcatgttaggaaacaaaaagccctagaagcagaattagatgctcagcacttatcagaaacttttgacaatatagacaatttaagtcccaaggcatctcatcgtagtaagcagagacacaagcaaagtctctatggtgattatgtttttgacaccaatcgacatgatgataataggtcagacaattttaatactggcaacatgactgtcctttcaccatatttgaatactacagtgttacccagctcctcttcatcaagaggaagcttagatagttctcgttctgaaaaagatagaagtttggagagagaacgcggaattggtctaggcaactaccatccagcaacagaaaatccaggaacttcttcaaagcgaggtttgcagatctccaccactgcagcccagattgccaaagtcatggaagaagtgtcagccattcatacctctcaggaagacagaagttctgggtctaccactgaattacattgtgtgacagatgagagaaatgcacttagaagaagctctgctgcccatacacattcaaacacttacaatttcactaagtcggaaaattcaaataggacatgttctatgccttatgccaaattagaatacaagagatcttcaaatgatagtttaaatagtgtcagtagtagtgatggttatggtaaaagaggtcaaatgaaaccctcgattgaatcctattctgaagatgatgaaagtaagttttgcagttatggtcaatacccagccgacctagcccataaaatacatagtgcaaatcatatggatgataatgatggagaactagatacaccaataaattatagtcttaaatattcagatgagcagttgaactctggaaggcaaagtccttcacagaatgaaagatgggcaagacccaaacacataatagaagatgaaataaaacaaagtgagcaaagacaatcaaggaatcaaagtacaacttatcctgtttatactgagagcactgatgataaacacctcaagttccaaccacattttggacagcaggaatgtgtttctccatacaggtcacggggagccaatggttcagaaacaaatcgagtgggttctaatcatggaattaatcaaaatgtaagccagtctttgtgtcaagaagatgactatgaagatgataagcctaccaattatagtgaacgttactctgaagaagaacagcatgaagaagaagagagaccaacaaattatagcataaaatataatgaagagaaacgtcatgtggatcagcctattgattatagtttaaaatatgccacagatattccttcatcacagaaacagtcattttcattctcaaagagttcatctggacaaagcagtaaaaccgaacatatgtcttcaagcagtgagaatacgtccacaccttcatctaatgccaagaggcagaatcagctccatccaagttctgcacagagtagaagtggtcagcctcaaaaggctgccacttgcaaagtttcttctattaaccaagaaacaatacagacttattgtgtagaagatactccaatatgtttttcaagatgtagttcattatcatctttgtcatcagctgaagatgaaataggatgtaatcagacgacacaggaagcagattctgctaataccctgcaaatagcagaaataaaagaaaagattggaactaggtcagctgaagatcctgtgagcgaagttccagcagtgtcacagcaccctagaaccaaatccagcagactgcagggttctagtttatcttcagaatcagccaggcacaaagctgttgaattttcttcaggagcgaaatctccctccaaaagtggtgctcagacacccaaaagtccacctgaacactatgttcaggagaccccactcatgtttagcagatgtacttctgtcagttcacttgatagttttgagagtcgttcgattgccagctccgttcagagtgaaccatgcagtggaatggtaagtggcattataagccccagtgatcttccagatagccctggacaaaccatgccaccaagcagaagtaaaacacctccaccacctcctcaaacagctcaaaccaagcgagaagtacctaaaaataaagcacctactgctgaaaagagagagagtggacctaagcaagctgcagtaaatgctgcagttcagagggtccaggttcttccagatgctgatactttattacattttgccacggaaagtactccagatggattttcttgttcatccagcctgagtgctctgagcctcgatgagccatttatacagaaagatgtggaattaagaataatgcctccagttcaggaaaatgacaatgggaatgaaacagaatcagagcagcctaaagaatcaaatgaaaaccaagagaaagaggcagaaaaaactattgattctgaaaaggacctattagatgattcagatgatgatgatattgaaatactagaagaatgtattatttctgccatgccaacaaagtcatcacgtaaagcaaaaaagccagcccagactgcttcaaaattacctccacctgtggcaaggaaaccaagtcagctgcctgtgtacaaacttctaccatcacaaaacaggttgcaaccccaaaagcatgttagttttacaccgggggatgatatgccacgggtgtattgtgttgaagggacacctataaacttttccacagctacatctctaagtgatctaacaatcgaatcccctccaaatgagttagctgctggagaaggagttagaggaggagcacagtcaggtgaatttgaaaaacgagataccattcctacagaaggcagaagtacagatgaggctcaaggaggaaaaacctcatctgtaaccatacctgaattggatgacaataaagcagaggaaggtgatattcttgcagaatgcattaattctgctatgcccaaagggaaaagtcacaagcctttccgtgtgaaaaagataatggaccaggtccagcaagcatctgcgtcgtcttctgcacccaacaaaaatcagttagatggtaagaaaaagaaaccaacttcaccagtaaaacctataccacaaaatactgaatataggacacgtgtaagaaaaaatgcagactcaaaaaataatttaaatgctgagagagttttctcagacaacaaagattcaaagaaacagaatttgaaaaataattccaaggacttcaatgataagctcccaaataatgaagatagagtcagaggaagttttgcttttgattcacctcatcattacacgcctattgaaggaactccttactgtttttcacgaaatgattctttgagttctctagattttgatgatgatgatgttgacctttccagggaaaaggctgaattaagaaaggcaaaagaaaataaggaatcagaggctaaagttaccagccacacagaactaacctccaaccaacaatcagctaataagacacaagctattgcaaagcagccaataaatcgaggtcagcctaaacccatacttcagaaacaatccacttttccccagtcatccaaagacataccagacagaggggcagcaactgatgaaaagttacagaattttgctattgaaaatactccagtttgcttttctcataattcctctctgagttctctcagtgacattgaccaagaaaacaacaataaagaaaatgaacctatcaaagagactgagccccctgactcacagggagaaccaagtaaacctcaagcatcaggctatgctcctaaatcatttcatgttgaagataccccagtttgtttctcaagaaacagttctctcagttctcttagtattgactctgaagatgacctgttgcaggaatgtataagctccgcaatgccaaaaaagaaaaagccttcaagactcaagggtgataatgaaaaacatagtcccagaaatatgggtggcatattaggtgaagatctgacacttgatttgaaagatatacagagaccagattcagaacatggtctatcccctgattcagaaaattttgattggaaagctattcaggaaggtgcaaattccatagtaagtagtttacatcaagctgctgctgctgcatgtttatctagacaagcttcgtctgattcagattccatcctttccctgaaatcaggaatctctctgggatcaccatttcatcttacacctgatcaagaagaaaaaccctttacaagtaataaaggcccacgaattctaaaaccaggggagaaaagtacattggaaactaaaaagatagaatctgaaagtaaaggaatcaaaggaggaaaaaaagtttataaaagtttgattactggaaaagttcgatctaattcagaaatttcaggccaaatgaaacagccccttcaagcaaacatgccttcaatctctcgaggcaggacaatgattcatattccaggagttcgaaatagctcctcaagtacaagtcctgtttctaaaaaaggcccaccccttaagactccagcctccaaaagccctagtgaaggtcaaacagccaccacttctcctagaggagccaagccatctgtgaaatcagaattaagccctgttgccaggcagacatcccaaataggtgggtcaagtaaagcaccttctagatcaggatctagagattcgaccccttcaagacctgcccagcaaccattaagtagacctatacagtctcctggccgaaactcaatttcccctggtagaaatggaataagtcctcctaacaaattatctcaacttccaaggacatcatcccctagtactgcttcaactaagtcctcaggttctggaaaaatgtcatatacatctccaggtagacagatgagccaacagaaccttaccaaacaaacaggtttatccaagaatgccagtagtattccaagaagtgagtctgcctccaaaggactaaatcagatgaataatggtaatggagccaataaaaaggtagaactttctagaatgtcttcaactaaatcaagtggaagtgaatctgatagatcagaaagacctgtattagtacgccagtcaactttcatcaaagaagctccaagcccaaccttaagaagaaaattggaggaatctgcttcatttgaatctctttctccatcatctagaccagcttctcccactaggtcccaggcacaaactccagttttaagtccttcccttcctgatatgtctctatccacacattcgtctgttcaggctggtggatggcgaaaactcccacctaatctcagtcccactatagagtataatgatggaagaccagcaaagcgccatgatattgcacggtctcattctgaaagtccttctagacttccaatcaataggtcaggaacctggaaacgtgagcacagcaaacattcatcatcccttcctcgagtaagcacttggagaagaactggaagttcatcttcaattctttctgcttcatcagaatccagtgaaaaagcaaaaagtgaggatgaaaaacatgtgaactctatttcaggaaccaaacaaagtaaagaaaaccaagtatccgcaaaaggaacatggagaaaaataaaagaaaatgaattttctcccacaaatagtacttctcagaccgtttcctcaggtgctacaaatggtgctgaatcaaagactctaatttatcaaatggcacctgctgtttctaaaacagaggatgtttgggtgagaattgaggactgtcccattaacaatcctagatctggaagatctcccacaggtaatactcccccggtgattgacagtgtttcagaaaaggcaaatccaaacattaaagattcaaaagataatcaggcaaaacaaaatgtgggtaatggcagtgttcccatgcgtaccgtgggtttggaaaatcgcctgaactcctttattcaggtggatgcccctgaccaaaaaggaactgagataaaaccaggacaaaataatcctgtccctgtatcagagactaatgaaagttctatagtggaacgtaccccattcagttctagcagctcaagcaaacacagttcacctagtgggactgttgctgccagagtgactccttttaattacaacccaagccctaggaaaagcagcgcagatagcacttcagctcggccatctcagatcccaactccagtgaataacaacacaaagaagcgagattccaaaactgacagcacagaatccagtggaacccaaagtcctaagcgccattctgggtcttaccttgtgacatctgtttaaaagagaggaagaatgaaactaagaaaattctatgttaattacaactgctatatagacattttgtttcaaatgaaactttaaaagactgaaaaattttgtaaataggtttgattcttgttagagggtttttgttctggaagccatatttgatagtatactttgtcttcactggtcttattttgggaggcactcttgatggttaggaaaaaaatagtaaagccaagtatgtttgtacagtatgttttacatgtatttaaagtagcatcccatcccaacttcctttaattattgcttgtcttaaaataatgaacactacagatagaaaatatgatatattgctgttatcaatcatttctagattataaactgactaaacttacatcagggaaaaattggtatttatgcaaaaaaaaatgtttttgtccttgtgagtccatctaacatcataattaatcatgtggctgtgaaattcacagtaatatggttcccgatgaacaagtttacccagcctgctttgctttactgcatgaatgaaactgatggttcaatttcagaagtaatgattaacagttatgtggtcacatgatgtgcatagagatagctacagtgtaataatttacactattttgtgctccaaacaaaacaaaaatctgtgtaactgtaaaacattgaatgaaactattttacctgaactagattttatctgaaagtaggtagaatttttgctatgctgtaatttgttgtatattctggtatttgaggtgagatggctgctcttttattaatgagacatgaattgtgtctcaacagaaactaaatgaacatttcagaataaattattgctgtatgtaaactgttactgaaattggtatttgtttgaagggtcttgtttcacatttgtattaataattgtttaaaatgcctcttttaaaagcttatataaatttttttcttcagcttctatgcattaagagtaaaattcctcttactgtaataaaaacaattgaagaaga

SEQ ID NO: 406363 - DNA, 10801 bp, Homo sapiens
  misc_feature (1608)..(1608): n is a, c, g, or t
gcgggctcaggccgggagctgcggaccgaggttggctcgatgctgttcccaggtactgttgttggctgttggtgaggaaggtgaagcactcagttgccttctcgggcctcggcgccccctatgtacgcctccctgggctcgggtccggtcgcccctttgcccgcttctgtaccaccctcagttctcgggtcctggagcaccggcggcagcaggagctgcgtccggcaggagacgaagagcccgggcggcgctcgtacttctggccactgggcgagcgtctggcaggaagtacttaaacaactacaaggaagtattgaagatgaagctatggcttcttctggacagattgatttattagagcgtcttaaagagcttaacttagatagcagtaatttccctggagtaaaactgcggtcaaaaatgtccctccgttcttatggaagccgggaaggatctgtatcaagccgttctggagagtgcagtcctgttcctatgggttcatttccaagaagagggtttgtaaatggaagcagagaaagtactggatatttagaagaacttgagaaagagaggtcattgcttcttgctgatcttgacaaagaagaaaaggaaaaagactggtattacgctcaacttcagaatctcactaaaagaatagatagtcttcctttaactgaaaatttttccttacaaacagatatgaccagaaggcaattggaatatgaagcaaggcaaatcagagttgcgatggaagaacaactaggtacctgccaggatatggaaaaacgagcacagcgaagaatagccagaattcagcaaatcgaaaaggacatacttcgtatacgacagcttttacagtcccaagcaacagaagcagagaggtcatctcagaacaagcatgaaaccggctcacatgatgctgagcggcagaatgaaggtcaaggagtgggagaaatcaacatggcaacttctggtaatggtcagggttcaactacacgaatggaccatgaaacagccagtgttttgagttctagtagcacacactctgcacctcgaaggctgacaagtcatctgggaaccaaggtggaaatggtgtattcattgttgtcaatgcttggtactcatgataaggatgatatgtcgcgaactttgctagctatgtctagctcccaagacagctgtatatccatgcgacagtctggatgtcttcctctcctcatccagcttttacatggcaatgacaaagactctgtattgttgggaaattcccggggcagtaaagaggctcgggccagggccagtgcagcactccacaacatcattcactcacagcctgatgacaagagaggcaggcgtgaaatccgagtccttcatcttttggaacagatacgcgcttactgtgaaacctgttgggagtggcaggaagctcatgaaccaggcatggaccaggacaaaaatccaatgccagctcctgttgaacatcagatctgtcctgctgtgtgtgttctaatgaaactttcatttgatgaagagcatagacatgcaatgaatgaactagggggactacaggccattgcagaattattgcaagtggactgtgaaatgtangggcttactaatgaccactacagtattacactaagacgatatgctggaatggctttgacaaacttgacttttggagatgtagccaacaaggctacgctatgctctatgaaaggctgcatgagagcacttgtggcccaactaaaatctgaaagtgaagacttacagcaggttattgcaagtgttttgaggaatttgtcttggcgagcagatgtaaatagtaaaaagacgttgcgagaagttggaagtgtgaaagcattgatggaatgtgctttagaagttaaaaaggaatcaaccctcaaaagcgtattgagtgccttatggaatttgtcagcacattgcactgagaataaagctgatatatgtgctgtagatggtgcacttgcatttttggttggcactcttacttaccggagccagacaaacactttagccattattgaaagtggaggtgggatattacggaatgtgtccagcttgatagctacaaatgaggaccacaggcaaatcctaagagagaacaactgtctacaaactttattacaacacttaaaatctcatagtttgacaatagtcagtaatgcatgtggaactttgtggaatctctcagcaagaaatcctaaagaccaggaagcattatgggacatgggggcagttagcatgctcaagaacctcattcattcaaagcacaaaatgattgctatgggaagtgctgcagctttaaggaatctcatggcaaataggcctgcgaagtacaaggatgccaatattatgtctcctggctcaagcttgccatctcttcatgttaggaaacaaaaagccctagaagcagaattagatgctcagcacttatcagaaacttttgacaatatagacaatttaagtcccaaggcatctcatcgtagtaagcagagacacaagcaaagtctctatggtgattatgtttttgacaccaatcgacatgatgataataggtcagacaattttaatactggcaacatgactgtcctttcaccatatttgaatactacagtgttacccagctcctcttcatcaagaggaagcttagatagttctcgttctgaaaaagatagaagtttggagagagaacgcggaattggtctaggcaactaccatccagcaacagaaaatccaggaacttcttcaaagcgaggtttgcagatctccaccactgcagcccagattgccaaagtcatggaagaagtgtcagccattcatacctctcaggaagacagaagttctgggtctaccactgaattacattgtgtgacagatgagagaaatgcacttagaagaagctctgctgcccatacacattcaaacacttacaatttcactaagtcggaaaattcaaataggacatgttctatgccttatgccaaattagaatacaagagatcttcaaatgatagtttaaatagtgtcagtagtagtgatggttatggtaaaagaggtcaaatgaaaccctcgattgaatcctattctgaagatgatgaaagtaagttttgcagttatggtcaatacccagccgacctagcccataaaatacatagtgcaaatcatatggatgataatgatggagaactagatacaccaataaattatagtcttaaatattcagatgagcagttgaactctggaaggcaaagtccttcacagaatgaaagatgggcaagacccaaacacataatagaagatgaaataaaacaaagtgagcaaagacaatcaaggaatcaaagtacaacttatcctgtttatactgagagcactgatgataaacacctcaagttccaaccacattttggacagcaggaatgtgtttctccatacaggtcacggggagccaatggttcagaaacaaatcgagtgggttctaatcatggaattaatcaaaatgtaagccagtctttgtgtcaagaagatgactatgaagatgataagcctaccaattatagtgaacgttactctgaagaagaacagcatgaagaagaagagagaccaacaaattatagcataaaatataatgaagagaaacgtcatgtggatcagcctattgattatagtttaaaatatgccacagatattccttcatcacagaaacagtcattttcattctcaaagagttcatctggacaaagcagtaaaaccgaacatatgtcttcaagcagtgagaatacgtccacaccttcatctaatgccaagaggcagaatcagctccatccaagttctgcacagagtagaagtggtcagcctcaaaaggctgccacttgcaaagtttcttctattaaccaagaaacaatacagacttattgtgtagaagatactccaatatgtttttcaagatgtagttcattatcatctttgtcatcagctgaagatgaaataggatgtaatcagacgacacaggaagcagattctgctaataccctgcaaatagcagaaataaaagaaaagattggaactaggtcagctgaagatcctgtgagcgaagttccagcagtgtcacagcaccctagaaccaaatccagcagactgcagggttctagtttatcttcagaatcagccaggcacaaagctgttgaattttcttcaggagcgaaatctccctccaaaagtggtgctcagacacccaaaagtccacctgaacactatgttcaggagaccccactcatgtttagcagatgtacttctgtcagttcacttgatagttttgagagtcgttcgattgccagctccgttcagagtgaaccatgcagtggaatggtaagtggcattataagccccagtgatcttccagatagccctggacaaaccatgccaccaagcagaagtaaaacacctccaccacctcctcaaacagctcaaaccaagcgagaagtacctaaaaataaagcacctactgctgaaaagagagagagtggacctaagcaagctgcagtaaatgctgcagttcagagggtccaggttcttccagatgctgatactttattacattttgccacggaaagtactccagatggattttcttgttcatccagcctgagtgctctgagcctcgatgagccatttatacagaaagatgtggaattaagaataatgcctccagttcaggaaaatgacaatgggaatgaaacagaatcagagcagcctaaagaatcaaatgaaaaccaagagaaagaggcagaaaaaactattgattctgaaaaggacctattagatgattcagatgatgatgatattgaaatactagaagaatgtattatttctgccatgccaacaaagtcatcacgtaaagcaaaaaagccagcccagactgcttcaaaattacctccacctgtggcaaggaaaccaagtcagctgcctgtgtacaaacttctaccatcacaaaacaggttgcaaccccaaaagcatgttagttttacaccgggggatgatatgccacgggtgtattgtgttgaagggacacctataaacttttccacagctacatctctaagtgatctaacaatcgaatcccctccaaatgagttagctgctggagaaggagttagaggaggagcacagtcaggtgaatttgaaaaacgagataccattcctacagaaggcagaagtacagatgaggctcaaggaggaaaaacctcatctgtaaccatacctgaattggatgacaataaagcagaggaaggtgatattcttgcagaatgcattaattctgctatgcccaaagggaaaagtcacaagcctttccgtgtgaaaaagataatggaccaggtccagcaagcatctgcgtcgtcttctgcacccaacaaaaatcagttagatggtaagaaaaagaaaccaacttcaccagtaaaacctataccacaaaatactgaatataggacacgtgtaagaaaaaatgcagactcaaaaaataatttaaatgctgagagagttttctcagacaacaaagattcaaagaaacagaatttgaaaaataattccaaggacttcaatgataagctcccaaataatgaagatagagtcagaggaagttttgcttttgattcacctcatcattacacgcctattgaaggaactccttactgtttttcacgaaatgattctttgagttctctagattttgatgatgatgatgttgacctttccagggaaaaggctgaattaagaaaggcaaaagaaaataaggaatcagaggctaaagttaccagccacacagaactaacctccaaccaacaatcagctaataagacacaagctattgcaaagcagccaataaatcgaggtcagcctaaacccatacttcagaaacaatccacttttccccagtcatccaaagacataccagacagaggggcagcaactgatgaaaagttacagaattttgctattgaaaatactccagtttgcttttctcataattcctctctgagttctctcagtgacattgaccaagaaaacaacaataaagaaaatgaacctatcaaagagactgagccccctgactcacagggagaaccaagtaaacctcaagcatcaggctatgctcctaaatcatttcatgttgaagataccccagtttgtttctcaagaaacagttctctcagttctcttagtattgactctgaagatgacctgttgcaggaatgtataagctccgcaatgccaaaaaagaaaaagccttcaagactcaagggtgataatgaaaaacatagtcccagaaatatgggtggcatattaggtgaagatctgacacttgatttgaaagatatacagagaccagattcagaacatggtctatcccctgattcagaaaattttgattggaaagctattcaggaaggtgcaaattccatagtaagtagtttacatcaagctgctgctgctgcatgtttatctagacaagcttcgtctgattcagattccatcctttccctgaaatcaggaatctctctgggatcaccatttcatcttacacctgatcaagaagaaaaaccctttacaagtaataaaggcccacgaattctaaaaccaggggagaaaagtacattggaaactaaaaagatagaatctgaaagtaaaggaatcaaaggaggaaaaaaagtttataaaagtttgattactggaaaagttcgatctaattcagaaatttcaggccaaatgaaacagccccttcaagcaaacatgccttcaatctctcgaggcaggacaatgattcatattccaggagttcgaaatagctcctcaagtacaagtcctgtttctaaaaaaggcccaccccttaagactccagcctccaaaagccctagtgaaggtcaaacagccaccacttctcctagaggagccaagccatctgtgaaatcagaattaagccctgttgccaggcagacatcccaaataggtgggtcaagtaaagcaccttctagatcaggatctagagattcgaccccttcaagacctgcccagcaaccattaagtagacctatacagtctcctggccgaaactcaatttcccctggtagaaatggaataagtcctcctaacaaattatctcaacttccaaggacatcatcccctagtactgcttcaactaagtcctcaggttctggaaaaatgtcatatacatctccaggtagacagatgagccaacagaaccttaccaaacaaacaggtttatccaagaatgccagtagtattccaagaagtgagtctgcctccaaaggactaaatcagatgaataatggtaatggagccaataaaaaggtagaactttctagaatgtcttcaactaaatcaagtggaagtgaatctgatagatcagaaagacctgtattagtacgccagtcaactttcatcaaagaagctccaagcccaaccttaagaagaaaattggaggaatctgcttcatttgaatctctttctccatcatctagaccagcttctcccactaggtcccaggcacaaactccagttttaagtccttcccttcctgatatgtctctatccacacattcgtctgttcaggctggtggatggcgaaaactcccacctaatctcagtcccactatagagtataatgatggaagaccagcaaagcgccatgatattgcacggtctcattctgaaagtccttctagacttccaatcaataggtcaggaacctggaaacgtgagcacagcaaacattcatcatcccttcctcgagtaagcacttggagaagaactggaagttcatcttcaattctttctgcttcatcagaatccagtgaaaaagcaaaaagtgaggatgaaaaacatgtgaactctatttcaggaaccaaacaaagtaaagaaaaccaagtatccgcaaaaggaacatggagaaaaataaaagaaaatgaattttctcccacaaatagtacttctcagaccgtttcctcaggtgctacaaatggtgctgaatcaaagactctaatttatcaaatggcacctgctgtttctaaaacagaggatgtttgggtgagaattgaggactgtcccattaacaatcctagatctggaagatctcccacaggtaatactcccccggtgattgacagtgtttcagaaaaggcaaatccaaacattaaagattcaaaagataatcaggcaaaacaaaatgtgggtaatggcagtgttcccatgcgtaccgtgggtttggaaaatcgcctgaactcctttattcaggtggatgcccctgaccaaaaaggaactgagataaaaccaggacaaaataatcctgtccctgtatcagagactaatgaaagttctatagtggaacgtaccccattcagttctagcagctcaagcaaacacagttcacctagtgggactgttgctgccagagtgactccttttaattacaacccaagccctaggaaaagcagcgcagatagcacttcagctcggccatctcagatcccaactccagtgaataacaacacaaagaagcgagattccaaaactgacagcacagaatccagtggaacccaaagtcctaagcgccattctgggtcttaccttgtgacatctgtttaaaagagaggaagaatgaaactaagaaaattctatgttaattacaactgctatatagacattttgtttcaaatgaaactttaaaagactgaaaaattttgtaaataggtttgattcttgttagagggtttttgttctggaagccatatttgatagtatactttgtcttcactggtcttattttgggaggcactcttgatggttaggaaaaaaatagtaaagccaagtatgtttgtacagtatgttttacatgtatttaaagtagcatcccatcccaacttcctttaattattgcttgtcttaaaataatgaacactacagatagaaaatatgatatattgctgttatcaatcatttctagattataaactgactaaacttacatcagggaaaaattggtatttatgcaaaaaaaaatgtttttgtccttgtgagtccatctaacatcataattaatcatgtggctgtgaaattcacagtaatatggttcccgatgaacaagtttacccagcctgctttgctttactgcatgaatgaaactgatggttcaatttcagaagtaatgattaacagttatgtggtcacatgatgtgcatagagatagctacagtgtaataatttacactattttgtgctccaaacaaaacaaaaatctgtgtaactgtaaaacattgaatgaaactattttacctgaactagattttatctgaaagtaggtagaatttttgctatgctgtaatttgttgtatattctggtatttgaggtgagatggctgctcttttattaatgagacatgaattgtgtctcaacagaaactaaatgaacatttcagaataaattattgctgtatgtaaactgttactgaaattggtatttgtttgaagggtcttgtttcacatttgtattaataattgtttaaaatgcctcttttaaaagcttatataaatttttttcttcagcttctatgcattaagagtaaaattcctcttactgtaataaaaacaattgaagaagactgttgccacttaaccattccatgcgttggcacttatctattcctgaaatttcttttatgtgattagctcatcttgatttttaacatttttccacttaaacttttttttcttactccactggagctcagtaaaagtaaattcatgtaatagcaatgcaagcagcctagcacagactaagcattgagcataataggcccacataatttcctctttcttaatattatagaattctgtacttgaaattgattcttagacattgcagtctcttcgaggctttacagtgtaaactgtcttgccccttcatcttcttgttgcaactgggtctgacatgaacactttttatcaccctgtatgttagggcaagatctcagcagtgaagtataatcagcactttgccatgctcagaaaattcaaatcacatggaactttagaggtagatttaatacgattaagatattcagaagtatattttagaatccctgcctgttaaggaaactttatttgtggtaggtacagttctggggtacatgttaagtgtccccttatacagtggagggaagtcttccttcctgaaggaaaataaactgacacttattaactaagataatttacttaatatatcttccctgatttgttttaaaagatcagagggtgactgatgatacatgcatacatatttgttgaataaatgaaaatttatttttagtgataagattcatacactctgtatttggggagagaaaacctttttaagcatggtggggcactcagataggagtgaatacacctacctggtgccttgaaaatcacatcaagtagttaattatctaccccttacctgtgtttataacttccaggtaatgagaatgattttttttaaagctaaaatgccagtaaataaaagtgctatgacttgagctaagatatttgactccaatgcctgtactgtgtctactgcaccactttgtaaacacttcaatttactatctttgaaatgattgacctttaaatttttgccaaatgttatctgaaattgtctatgaataccatctacttctgttgttttcccaggcttccataaacaatggagatacatgcatatagg

SEQ ID NO: 406364 - DNA, 10656 bp, Homo sapiens
  misc_feature (1529)..(1529): n is a, c, g, or t
cgccagggtgtcacgggagacagaatggaggtgctgccggactcggaaatggggtccaagggtagccaaggatggctgcagcttcatatgatcagttgttaaagcaagttgaggcactgaagatggagaactcaaatcttcgacaagagctagaagataattccaatcatcttacaaaactggaaactgaggcatctaatatgaaggaagtacttaaacaactacaaggaagtattgaagatgaagctatggcttcttctggacagattgatttattagagcgtcttaaagagcttaacttagatagcagtaatttccctggagtaaaactgcggtcaaaaatgtccctccgttcttatggaagccgggaaggatctgtatcaagccgttctggagagtgcagtcctgttcctatgggttcatttccaagaagagggtttgtaaatggaagcagagaaagtactggatatttagaagaacttgagaaagagaggtcattgcttcttgctgatcttgacaaagaagaaaaggaaaaagactggtattacgctcaacttcagaatctcactaaaagaatagatagtcttcctttaactgaaaatttttccttacaaacagatatgaccagaaggcaattggaatatgaagcaaggcaaatcagagttgcgatggaagaacaactaggtacctgccaggatatggaaaaacgagcacagcgaagaatagccagaattcagcaaatcgaaaaggacatacttcgtatacgacagcttttacagtcccaagcaacagaagcagagaggtcatctcagaacaagcatgaaaccggctcacatgatgctgagcggcagaatgaaggtcaaggagtgggagaaatcaacatggcaacttctggtaatggtcagggttcaactacacgaatggaccatgaaacagccagtgttttgagttctagtagcacacactctgcacctcgaaggctgacaagtcatctgggaaccaaggtggaaatggtgtattcattgttgtcaatgcttggtactcatgataaggatgatatgtcgcgaactttgctagctatgtctagctcccaagacagctgtatatccatgcgacagtctggatgtcttcctctcctcatccagcttttacatggcaatgacaaagactctgtattgttgggaaattcccggggcagtaaagaggctcgggccagggccagtgcagcactccacaacatcattcactcacagcctgatgacaagagaggcaggcgtgaaatccgagtccttcatcttttggaacagatacgcgcttactgtgaaacctgttgggagtggcaggaagctcatgaaccaggcatggaccaggacaaaaatccaatgccagctcctgttgaacatcagatctgtcctgctgtgtgtgttctaatgaaactttcatttgatgaagagcatagacatgcaatgaatgaactagggggactacaggccattgcagaattattgcaagtggactgtgaaatgtangggcttactaatgaccactacagtattacactaagacgatatgctggaatggctttgacaaacttgacttttggagatgtagccaacaaggctacgctatgctctatgaaaggctgcatgagagcacttgtggcccaactaaaatctgaaagtgaagacttacagcaggttattgcaagtgttttgaggaatttgtcttggcgagcagatgtaaatagtaaaaagacgttgcgagaagttggaagtgtgaaagcattgatggaatgtgctttagaagttaaaaaggaatcaaccctcaaaagcgtattgagtgccttatggaatttgtcagcacattgcactgagaataaagctgatatatgtgctgtagatggtgcacttgcatttttggttggcactcttacttaccggagccagacaaacactttagccattattgaaagtggaggtgggatattacggaatgtgtccagcttgatagctacaaatgaggaccacaggcaaatcctaagagagaacaactgtctacaaactttattacaacacttaaaatctcatagtttgacaatagtcagtaatgcatgtggaactttgtggaatctctcagcaagaaatcctaaagaccaggaagcattatgggacatgggggcagttagcatgctcaagaacctcattcattcaaagcacaaaatgattgctatgggaagtgctgcagctttaaggaatctcatggcaaataggcctgcgaagtacaaggatgccaatattatgtctcctggctcaagcttgccatctcttcatgttaggaaacaaaaagccctagaagcagaattagatgctcagcacttatcagaaacttttgacaatatagacaatttaagtcccaaggcatctcatcgtagtaagcagagacacaagcaaagtctctatggtgattatgtttttgacaccaatcgacatgatgataataggtcagacaattttaatactggcaacatgactgtcctttcaccatatttgaatactacagtgttacccagctcctcttcatcaagaggaagcttagatagttctcgttctgaaaaagatagaagtttggagagagaacgcggaattggtctaggcaactaccatccagcaacagaaaatccaggaacttcttcaaagcgaggtttgcagatctccaccactgcagcccagattgccaaagtcatggaagaagtgtcagccattcatacctctcaggaagacagaagttctgggtctaccactgaattacattgtgtgacagatgagagaaatgcacttagaagaagctctgctgcccatacacattcaaacacttacaatttcactaagtcggaaaattcaaataggacatgttctatgccttatgccaaattagaatacaagagatcttcaaatgatagtttaaatagtgtcagtagtagtgatggttatggtaaaagaggtcaaatgaaaccctcgattgaatcctattctgaagatgatgaaagtaagttttgcagttatggtcaatacccagccgacctagcccataaaatacatagtgcaaatcatatggatgataatgatggagaactagatacaccaataaattatagtcttaaatattcagatgagcagttgaactctggaaggcaaagtccttcacagaatgaaagatgggcaagacccaaacacataatagaagatgaaataaaacaaagtgagcaaagacaatcaaggaatcaaagtacaacttatcctgtttatactgagagcactgatgataaacacctcaagttccaaccacattttggacagcaggaatgtgtttctccatacaggtcacggggagccaatggttcagaaacaaatcgagtgggttctaatcatggaattaatcaaaatgtaagccagtctttgtgtcaagaagatgactatgaagatgataagcctaccaattatagtgaacgttactctgaagaagaacagcatgaagaagaagagagaccaacaaattatagcataaaatataatgaagagaaacgtcatgtggatcagcctattgattatagtttaaaatatgccacagatattccttcatcacagaaacagtcattttcattctcaaagagttcatctggacaaagcagtaaaaccgaacatatgtcttcaagcagtgagaatacgtccacaccttcatctaatgccaagaggcagaatcagctccatccaagttctgcacagagtagaagtggtcagcctcaaaaggctgccacttgcaaagtttcttctattaaccaagaaacaatacagacttattgtgtagaagatactccaatatgtttttcaagatgtagttcattatcatctttgtcatcagctgaagatgaaataggatgtaatcagacgacacaggaagcagattctgctaataccctgcaaatagcagaaataaaagaaaagattggaactaggtcagctgaagatcctgtgagcgaagttccagcagtgtcacagcaccctagaaccaaatccagcagactgcagggttctagtttatcttcagaatcagccaggcacaaagctgttgaattttcttcaggagcgaaatctccctccaaaagtggtgctcagacacccaaaagtccacctgaacactatgttcaggagaccccactcatgtttagcagatgtacttctgtcagttcacttgatagttttgagagtcgttcgattgccagctccgttcagagtgaaccatgcagtggaatggtaagtggcattataagccccagtgatcttccagatagccctggacaaaccatgccaccaagcagaagtaaaacacctccaccacctcctcaaacagctcaaaccaagcgagaagtacctaaaaataaagcacctactgctgaaaagagagagagtggacctaagcaagctgcagtaaatgctgcagttcagagggtccaggttcttccagatgctgatactttattacattttgccacggaaagtactccagatggattttcttgttcatccagcctgagtgctctgagcctcgatgagccatttatacagaaagatgtggaattaagaataatgcctccagttcaggaaaatgacaatgggaatgaaacagaatcagagcagcctaaagaatcaaatgaaaaccaagagaaagaggcagaaaaaactattgattctgaaaaggacctattagatgattcagatgatgatgatattgaaatactagaagaatgtattatttctgccatgccaacaaagtcatcacgtaaagcaaaaaagccagcccagactgcttcaaaattacctccacctgtggcaaggaaaccaagtcagctgcctgtgtacaaacttctaccatcacaaaacaggttgcaaccccaaaagcatgttagttttacaccgggggatgatatgccacgggtgtattgtgttgaagggacacctataaacttttccacagctacatctctaagtgatctaacaatcgaatcccctccaaatgagttagctgctggagaaggagttagaggaggagcacagtcaggtgaatttgaaaaacgagataccattcctacagaaggcagaagtacagatgaggctcaaggaggaaaaacctcatctgtaaccatacctgaattggatgacaataaagcagaggaaggtgatattcttgcagaatgcattaattctgctatgcccaaagggaaaagtcacaagcctttccgtgtgaaaaagataatggaccaggtccagcaagcatctgcgtcgtcttctgcacccaacaaaaatcagttagatggtaagaaaaagaaaccaacttcaccagtaaaacctataccacaaaatactgaatataggacacgtgtaagaaaaaatgcagactcaaaaaataatttaaatgctgagagagttttctcagacaacaaagattcaaagaaacagaatttgaaaaataattccaaggacttcaatgataagctcccaaataatgaagatagagtcagaggaagttttgcttttgattcacctcatcattacacgcctattgaaggaactccttactgtttttcacgaaatgattctttgagttctctagattttgatgatgatgatgttgacctttccagggaaaaggctgaattaagaaaggcaaaagaaaataaggaatcagaggctaaagttaccagccacacagaactaacctccaaccaacaatcagctaataagacacaagctattgcaaagcagccaataaatcgaggtcagcctaaacccatacttcagaaacaatccacttttccccagtcatccaaagacataccagacagaggggcagcaactgatgaaaagttacagaattttgctattgaaaatactccagtttgcttttctcataattcctctctgagttctctcagtgacattgaccaagaaaacaacaataaagaaaatgaacctatcaaagagactgagccccctgactcacagggagaaccaagtaaacctcaagcatcaggctatgctcctaaatcatttcatgttgaagataccccagtttgtttctcaagaaacagttctctcagttctcttagtattgactctgaagatgacctgttgcaggaatgtataagctccgcaatgccaaaaaagaaaaagccttcaagactcaagggtgataatgaaaaacatagtcccagaaatatgggtggcatattaggtgaagatctgacacttgatttgaaagatatacagagaccagattcagaacatggtctatcccctgattcagaaaattttgattggaaagctattcaggaaggtgcaaattccatagtaagtagtttacatcaagctgctgctgctgcatgtttatctagacaagcttcgtctgattcagattccatcctttccctgaaatcaggaatctctctgggatcaccatttcatcttacacctgatcaagaagaaaaaccctttacaagtaataaaggcccacgaattctaaaaccaggggagaaaagtacattggaaactaaaaagatagaatctgaaagtaaaggaatcaaaggaggaaaaaaagtttataaaagtttgattactggaaaagttcgatctaattcagaaatttcaggccaaatgaaacagccccttcaagcaaacatgccttcaatctctcgaggcaggacaatgattcatattccaggagttcgaaatagctcctcaagtacaagtcctgtttctaaaaaaggcccaccccttaagactccagcctccaaaagccctagtgaaggtcaaacagccaccacttctcctagaggagccaagccatctgtgaaatcagaattaagccctgttgccaggcagacatcccaaataggtgggtcaagtaaagcaccttctagatcaggatctagagattcgaccccttcaagacctgcccagcaaccattaagtagacctatacagtctcctggccgaaactcaatttcccctggtagaaatggaataagtcctcctaacaaattatctcaacttccaaggacatcatcccctagtactgcttcaactaagtcctcaggttctggaaaaatgtcatatacatctccaggtagacagatgagccaacagaaccttaccaaacaaacaggtttatccaagaatgccagtagtattccaagaagtgagtctgcctccaaaggactaaatcagatgaataatggtaatggagccaataaaaaggtagaactttctagaatgtcttcaactaaatcaagtggaagtgaatctgatagatcagaaagacctgtattagtacgccagtcaactttcatcaaagaagctccaagcccaaccttaagaagaaaattggaggaatctgcttcatttgaatctctttctccatcatctagaccagcttctcccactaggtcccaggcacaaactccagttttaagtccttcccttcctgatatgtctctatccacacattcgtctgttcaggctggtggatggcgaaaactcccacctaatctcagtcccactatagagtataatgatggaagaccagcaaagcgccatgatattgcacggtctcattctgaaagtccttctagacttccaatcaataggtcaggaacctggaaacgtgagcacagcaaacattcatcatcccttcctcgagtaagcacttggagaagaactggaagttcatcttcaattctttctgcttcatcagaatccagtgaaaaagcaaaaagtgaggatgaaaaacatgtgaactctatttcaggaaccaaacaaagtaaagaaaaccaagtatccgcaaaaggaacatggagaaaaataaaagaaaatgaattttctcccacaaatagtacttctcagaccgtttcctcaggtgctacaaatggtgctgaatcaaagactctaatttatcaaatggcacctgctgtttctaaaacagaggatgtttgggtgagaattgaggactgtcccattaacaatcctagatctggaagatctcccacaggtaatactcccccggtgattgacagtgtttcagaaaaggcaaatccaaacattaaagattcaaaagataatcaggcaaaacaaaatgtgggtaatggcagtgttcccatgcgtaccgtgggtttggaaaatcgcctgaactcctttattcaggtggatgcccctgaccaaaaaggaactgagataaaaccaggacaaaataatcctgtccctgtatcagagactaatgaaagttctatagtggaacgtaccccattcagttctagcagctcaagcaaacacagttcacctagtgggactgttgctgccagagtgactccttttaattacaacccaagccctaggaaaagcagcgcagatagcacttcagctcggccatctcagatcccaactccagtgaataacaacacaaagaagcgagattccaaaactgacagcacagaatccagtggaacccaaagtcctaagcgccattctgggtcttaccttgtgacatctgtttaaaagagaggaagaatgaaactaagaaaattttgtaaataggtttgattcttgttagagggtttttgttctggaagccatatttgatagtatactttgtcttcactggtcttattttgggaggcactcttgatggttaggaaaaaaatagtaaagccaagtatgtttgtacagtatgttttacatgtatttaaagtagcatcccatcccaacttcctttaattattgcttgtcttaaaataatgaacactacagatagaaaatatgatatattgctgttatcaatcatttctagattataaactgactaaacttacatcagggaaaaattggtatttatgcaaaaaaaaatgtttttgtccttgtgagtccatctaacatcataattaatcatgtggctgtgaaattcacagtaatatggttcccgatgaacaagtttacccagcctgctttgctttactgcatgaatgaaactgatggttcaatttcagaagtaatgattaacagttatgtggtcacatgatgtgcatagagatagctacagtgtaataatttacactattttgtgctccaaacaaaacaaaaatctgtgtaactgtaaaacattgaatgaaactattttacctgaactagattttatctgaaagtaggtagaatttttgctatgctgtaatttgttgtatattctggtatttgaggtgagatggctgctcttttattaatgagacatgaattgtgtctcaacagaaactaaatgaacatttcagaataaattattgctgtatgtaaactgttactgaaattggtatttgtttgaagggtcttgtttcacatttgtattaataattgtttaaaatgcctcttttaaaagcttatataaatttttttcttcagcttctatgcattaagagtaaaattcctcttactgtaataaaaacaattgaagaagactgttgccacttaaccattccatgcgttggcacttatctattcctgaaatttcttttatgtgattagctcatcttgatttttaacatttttccacttaaacttttttttcttactccactggagctcagtaaaagtaaattcatgtaatagcaatgcaagcagcctagcacagactaagcattgagcataataggcccacataatttcctctttcttaatattatagaattctgtacttgaaattgattcttagacattgcagtctcttcgaggctttacagtgtaaactgtcttgccccttcatcttcttgttgcaactgggtctgacatgaacactttttatcaccctgtatgttagggcaagatctcagcagtgaagtataatcagcactttgccatgctcagaaaattcaaatcacatggaactttagaggtagatttaatacgattaagatattcagaagtatattttagaatccctgcctgttaaggaaactttatttgtggtaggtacagttctggggtacatgttaagtgtccccttatacagtggagggaagtcttccttcctgaaggaaaataaactgacacttattaactaagataatttacttaatatatcttccctgatttgttttaaaagatcagagggtgactgatgatacatgcatacatatttgttgaataaatgaaaatttatttttagtgataagattcatacactctgtatttggggagagaaaacctttttaagcatggtggggcactcagataggagtgaatacacctacctggtgccttgaaaatcacatcaagtagttaattatctaccccttacctgtgtttataacttccaggtaatgagaatgattttttttaaagctaaaatgccagtaaataaaagtgctatgacttgagctaagatatttgactccaatgcctgtactgtgtctactgcaccactttgtaaacacttcaatttactatctttgaaatgattgacctttaaatttttgccaaatgttatctgaaattgtctatgaataccatctacttctgttgttttcccaggcttccataaacaatggagatacatgcatatagg

SEQ ID NO: 406365 - DNA, 2789 bp, Homo sapiens
  misc_feature (1529)..(1529): n is a, c, g, or t
  misc_feature (2007)..(2007): n is a, c, g, or t
cgccagggtgtcacgggagacagaatggaggtgctgccggactcggaaatggggtccaagggtagccaaggatggctgcagcttcatatgatcagttgttaaagcaagttgaggcactgaagatggagaactcaaatcttcgacaagagctagaagataattccaatcatcttacaaaactggaaactgaggcatctaatatgaaggaagtacttaaacaactacaaggaagtattgaagatgaagctatggcttcttctggacagattgatttattagagcgtcttaaagagcttaacttagatagcagtaatttccctggagtaaaactgcggtcaaaaatgtccctccgttcttatggaagccgggaaggatctgtatcaagccgttctggagagtgcagtcctgttcctatgggttcatttccaagaagagggtttgtaaatggaagcagagaaagtactggatatttagaagaacttgagaaagagaggtcattgcttcttgctgatcttgacaaagaagaaaaggaaaaagactggtattacgctcaacttcagaatctcactaaaagaatagatagtcttcctttaactgaaaatttttccttacaaacagatatgaccagaaggcaattggaatatgaagcaaggcaaatcagagttgcgatggaagaacaactaggtacctgccaggatatggaaaaacgagcacagcgaagaatagccagaattcagcaaatcgaaaaggacatacttcgtatacgacagcttttacagtcccaagcaacagaagcagagaggtcatctcagaacaagcatgaaaccggctcacatgatgctgagcggcagaatgaaggtcaaggagtgggagaaatcaacatggcaacttctggtaatggtcagggttcaactacacgaatggaccatgaaacagccagtgttttgagttctagtagcacacactctgcacctcgaaggctgacaagtcatctgggaaccaaggtggaaatggtgtattcattgttgtcaatgcttggtactcatgataaggatgatatgtcgcgaactttgctagctatgtctagctcccaagacagctgtatatccatgcgacagtctggatgtcttcctctcctcatccagcttttacatggcaatgacaaagactctgtattgttgggaaattcccggggcagtaaagaggctcgggccagggccagtgcagcactccacaacatcattcactcacagcctgatgacaagagaggcaggcgtgaaatccgagtccttcatcttttggaacagatacgcgcttactgtgaaacctgttgggagtggcaggaagctcatgaaccaggcatggaccaggacaaaaatccaatgccagctcctgttgaacatcagatctgtcctgctgtgtgtgttctaatgaaactttcatttgatgaagagcatagacatgcaatgaatgaactagggggactacaggccattgcagaattattgcaagtggactgtgaaatgtangggcttactaatgaccactacagtattacactaagacgatatgctggaatggctttgacaaacttgacttttggagatgtagccaacaaggctacgctatgctctatgaaaggctgcatgagagcacttgtggcccaactaaaatctgaaagtgaagacttacagcaggttattgcaagtgttttgaggaatttgtcttggcgagcagatgtaaatagtaaaaagacgttgcgagaagttggaagtgtgaaagcattgatggaatgtgctttagaagttaaaaaggtacctttgaaaacatttagtactataatatgaatttcatgtttggcttttttttgctgccttcttttagccatgagatttcctaatttcttacctgtgtattattcagtactataatatgaatttcatgtttagctttttttgctgccttcttttagccatgagattccctaatttcttttttgagatgggntctctttctctcgcccaggctggagtgcagtggtctgatcttggctcactgcaacctccgtctcccatgttcaagtgattctcctgcctcagcctcctgagtagctgggattacagtgcacgccaccactcccggctatttgtatttttagtagagatggggtttcaccatgttggtaaggctggtctcgaactactcctgactttgtgatctgcccaactcggcctcccaaagtgctgggattataggcgcaagccatcacgcccagcctagattccctaatttcttacctgtttatctcaccagtccatagttttagagtaccgcaaactcctaaagtactaaggtagaaaagattatataaggggatttaatgtatatcagggtttctctgcctcagcactatagacatttttgaccagataattcttcgttttgctggggctgacctgtgcactgtagattgtttagcagcatccctggcctttgccaactggctgccagtataccctccccctagttatgccgatcaaaattgtctccagatactgtcagatgtctgtgggagggaggaaggacaacgtcaccaccaattaagaatcactggtataagtgtacctttgtgctctccaaacctcaatcccctcaaattttgatggtcaacttatcaagaggtgatcagagccaagggtgaggaatcatcaaataataatttgtttacagaaggaaatatctccaggcagtccatctgcttcagaaactaggctaaatttaaaaagaaa

SEQ ID NO: 406366 - DNA, 488 bp, Homo sapiens
aacctaatatttcactttaaaataatataacattaagaatattttagactgcttaaagcaattgttgtataaaaacttgtttctattttatttagagcttaacttagatagcagtaatttccctggagtaaaactgcggtcaaaaatgtccctccgttcttatggaagccgggaaggatctgtatcaagccgttctggagagtgcagtcctgttcctatgggttcatttccaagaagagggtttgtaaatggaagcagagaaagtactggatatttagaagaacttgagaaagagaggtaacttttcttcatatagtaaacattgccttgtgtactccagtttattgttattttgtaatataatatttaaattgtgaatttatagtaggtgatagctaacacttagagcattttgcatttttaaactcaaagatagcatgttattgattgcacttacattaaatctaaaaatataaacaaggccgttt

SEQ ID NO: 406367 - DNA, 10880 bp, Homo sapiens
  misc_feature (1687)..(1687): n is a, c, g, or t
ttaatttcatttatcttgaactaagactccactgtttcatcctcttagatgctgctacttgaacaatattgttttgagaccaaaaactagcatattaacacaattcttcttaaacgtcttaagagttttgtttcctttacccctttctttaaaaacaagcagccactaaattttttagtagtgaatttcaaaatcctttttaaccttataggtccaagggtagccaaggatggctgcagcttcatatgatcagttgttaaagcaagttgaggcactgaagatggagaactcaaatcttcgacaagagctagaagataattccaatcatcttacaaaactggaaactgaggcatctaatatgaaggaagtacttaaacaactacaaggaagtattgaagatgaagctatggcttcttctggacagattgatttattagagcgtcttaaagagcttaacttagatagcagtaatttccctggagtaaaactgcggtcaaaaatgtccctccgttcttatggaagccgggaaggatctgtatcaagccgttctggagagtgcagtcctgttcctatgggttcatttccaagaagagggtttgtaaatggaagcagagaaagtactggatatttagaagaacttgagaaagagaggtcattgcttcttgctgatcttgacaaagaagaaaaggaaaaagactggtattacgctcaacttcagaatctcactaaaagaatagatagtcttcctttaactgaaaatttttccttacaaacagatatgaccagaaggcaattggaatatgaagcaaggcaaatcagagttgcgatggaagaacaactaggtacctgccaggatatggaaaaacgagcacagcgaagaatagccagaattcagcaaatcgaaaaggacatacttcgtatacgacagcttttacagtcccaagcaacagaagcagagaggtcatctcagaacaagcatgaaaccggctcacatgatgctgagcggcagaatgaaggtcaaggagtgggagaaatcaacatggcaacttctggtaatggtcagggttcaactacacgaatggaccatgaaacagccagtgttttgagttctagtagcacacactctgcacctcgaaggctgacaagtcatctgggaaccaaggtggaaatggtgtattcattgttgtcaatgcttggtactcatgataaggatgatatgtcgcgaactttgctagctatgtctagctcccaagacagctgtatatccatgcgacagtctggatgtcttcctctcctcatccagcttttacatggcaatgacaaagactctgtattgttgggaaattcccggggcagtaaagaggctcgggccagggccagtgcagcactccacaacatcattcactcacagcctgatgacaagagaggcaggcgtgaaatccgagtccttcatcttttggaacagatacgcgcttactgtgaaacctgttgggagtggcaggaagctcatgaaccaggcatggaccaggacaaaaatccaatgccagctcctgttgaacatcagatctgtcctgctgtgtgtgttctaatgaaactttcatttgatgaagagcatagacatgcaatgaatgaactagggggactacaggccattgcagaattattgcaagtggactgtgaaatgtangggcttactaatgaccactacagtattacactaagacgatatgctggaatggctttgacaaacttgacttttggagatgtagccaacaaggctacgctatgctctatgaaaggctgcatgagagcacttgtggcccaactaaaatctgaaagtgaagacttacagcaggttattgcaagtgttttgaggaatttgtcttggcgagcagatgtaaatagtaaaaagacgttgcgagaagttggaagtgtgaaagcattgatggaatgtgctttagaagttaaaaaggaatcaaccctcaaaagcgtattgagtgccttatggaatttgtcagcacattgcactgagaataaagctgatatatgtgctgtagatggtgcacttgcatttttggttggcactcttacttaccggagccagacaaacactttagccattattgaaagtggaggtgggatattacggaatgtgtccagcttgatagctacaaatgaggaccacaggcaaatcctaagagagaacaactgtctacaaactttattacaacacttaaaatctcatagtttgacaatagtcagtaatgcatgtggaactttgtggaatctctcagcaagaaatcctaaagaccaggaagcattatgggacatgggggcagttagcatgctcaagaacctcattcattcaaagcacaaaatgattgctatgggaagtgctgcagctttaaggaatctcatggcaaataggcctgcgaagtacaaggatgccaatattatgtctcctggctcaagcttgccatctcttcatgttaggaaacaaaaagccctagaagcagaattagatgctcagcacttatcagaaacttttgacaatatagacaatttaagtcccaaggcatctcatcgtagtaagcagagacacaagcaaagtctctatggtgattatgtttttgacaccaatcgacatgatgataataggtcagacaattttaatactggcaacatgactgtcctttcaccatatttgaatactacagtgttacccagctcctcttcatcaagaggaagcttagatagttctcgttctgaaaaagatagaagtttggagagagaacgcggaattggtctaggcaactaccatccagcaacagaaaatccaggaacttcttcaaagcgaggtttgcagatctccaccactgcagcccagattgccaaagtcatggaagaagtgtcagccattcatacctctcaggaagacagaagttctgggtctaccactgaattacattgtgtgacagatgagagaaatgcacttagaagaagctctgctgcccatacacattcaaacacttacaatttcactaagtcggaaaattcaaataggacatgttctatgccttatgccaaattagaatacaagagatcttcaaatgatagtttaaatagtgtcagtagtagtgatggttatggtaaaagaggtcaaatgaaaccctcgattgaatcctattctgaagatgatgaaagtaagttttgcagttatggtcaatacccagccgacctagcccataaaatacatagtgcaaatcatatggatgataatgatggagaactagatacaccaataaattatagtcttaaatattcagatgagcagttgaactctggaaggcaaagtccttcacagaatgaaagatgggcaagacccaaacacataatagaagatgaaataaaacaaagtgagcaaagacaatcaaggaatcaaagtacaacttatcctgtttatactgagagcactgatgataaacacctcaagttccaaccacattttggacagcaggaatgtgtttctccatacaggtcacggggagccaatggttcagaaacaaatcgagtgggttctaatcatggaattaatcaaaatgtaagccagtctttgtgtcaagaagatgactatgaagatgataagcctaccaattatagtgaacgttactctgaagaagaacagcatgaagaagaagagagaccaacaaattatagcataaaatataatgaagagaaacgtcatgtggatcagcctattgattatagtttaaaatatgccacagatattccttcatcacagaaacagtcattttcattctcaaagagttcatctggacaaagcagtaaaaccgaacatatgtcttcaagcagtgagaatacgtccacaccttcatctaatgccaagaggcagaatcagctccatccaagttctgcacagagtagaagtggtcagcctcaaaaggctgccacttgcaaagtttcttctattaaccaagaaacaatacagacttattgtgtagaagatactccaatatgtttttcaagatgtagttcattatcatctttgtcatcagctgaagatgaaataggatgtaatcagacgacacaggaagcagattctgctaataccctgcaaatagcagaaataaaagaaaagattggaactaggtcagctgaagatcctgtgagcgaagttccagcagtgtcacagcaccctagaaccaaatccagcagactgcagggttctagtttatcttcagaatcagccaggcacaaagctgttgaattttcttcaggagcgaaatctccctccaaaagtggtgctcagacacccaaaagtccacctgaacactatgttcaggagaccccactcatgtttagcagatgtacttctgtcagttcacttgatagttttgagagtcgttcgattgccagctccgttcagagtgaaccatgcagtggaatggtaagtggcattataagccccagtgatcttccagatagccctggacaaaccatgccaccaagcagaagtaaaacacctccaccacctcctcaaacagctcaaaccaagcgagaagtacctaaaaataaagcacctactgctgaaaagagagagagtggacctaagcaagctgcagtaaatgctgcagttcagagggtccaggttcttccagatgctgatactttattacattttgccacggaaagtactccagatggattttcttgttcatccagcctgagtgctctgagcctcgatgagccatttatacagaaagatgtggaattaagaataatgcctccagttcaggaaaatgacaatgggaatgaaacagaatcagagcagcctaaagaatcaaatgaaaaccaagagaaagaggcagaaaaaactattgattctgaaaaggacctattagatgattcagatgatgatgatattgaaatactagaagaatgtattatttctgccatgccaacaaagtcatcacgtaaagcaaaaaagccagcccagactgcttcaaaattacctccacctgtggcaaggaaaccaagtcagctgcctgtgtacaaacttctaccatcacaaaacaggttgcaaccccaaaagcatgttagttttacaccgggggatgatatgccacgggtgtattgtgttgaagggacacctataaacttttccacagctacatctctaagtgatctaacaatcgaatcccctccaaatgagttagctgctggagaaggagttagaggaggagcacagtcaggtgaatttgaaaaacgagataccattcctacagaaggcagaagtacagatgaggctcaaggaggaaaaacctcatctgtaaccatacctgaattggatgacaataaagcagaggaaggtgatattcttgcagaatgcattaattctgctatgcccaaagggaaaagtcacaagcctttccgtgtgaaaaagataatggaccaggtccagcaagcatctgcgtcgtcttctgcacccaacaaaaatcagttagatggtaagaaaaagaaaccaacttcaccagtaaaacctataccacaaaatactgaatataggacacgtgtaagaaaaaatgcagactcaaaaaataatttaaatgctgagagagttttctcagacaacaaagattcaaagaaacagaatttgaaaaataattccaaggacttcaatgataagctcccaaataatgaagatagagtcagaggaagttttgcttttgattcacctcatcattacacgcctattgaaggaactccttactgtttttcacgaaatgattctttgagttctctagattttgatgatgatgatgttgacctttccagggaaaaggctgaattaagaaaggcaaaagaaaataaggaatcagaggctaaagttaccagccacacagaactaacctccaaccaacaatcagctaataagacacaagctattgcaaagcagccaataaatcgaggtcagcctaaacccatacttcagaaacaatccacttttccccagtcatccaaagacataccagacagaggggcagcaactgatgaaaagttacagaattttgctattgaaaatactccagtttgcttttctcataattcctctctgagttctctcagtgacattgaccaagaaaacaacaataaagaaaatgaacctatcaaagagactgagccccctgactcacagggagaaccaagtaaacctcaagcatcaggctatgctcctaaatcatttcatgttgaagataccccagtttgtttctcaagaaacagttctctcagttctcttagtattgactctgaagatgacctgttgcaggaatgtataagctccgcaatgccaaaaaagaaaaagccttcaagactcaagggtgataatgaaaaacatagtcccagaaatatgggtggcatattaggtgaagatctgacacttgatttgaaagatatacagagaccagattcagaacatggtctatcccctgattcagaaaattttgattggaaagctattcaggaaggtgcaaattccatagtaagtagtttacatcaagctgctgctgctgcatgtttatctagacaagcttcgtctgattcagattccatcctttccctgaaatcaggaatctctctgggatcaccatttcatcttacacctgatcaagaagaaaaaccctttacaagtaataaaggcccacgaattctaaaaccaggggagaaaagtacattggaaactaaaaagatagaatctgaaagtaaaggaatcaaaggaggaaaaaaagtttataaaagtttgattactggaaaagttcgatctaattcagaaatttcaggccaaatgaaacagccccttcaagcaaacatgccttcaatctctcgaggcaggacaatgattcatattccaggagttcgaaatagctcctcaagtacaagtcctgtttctaaaaaaggcccaccccttaagactccagcctccaaaagccctagtgaaggtcaaacagccaccacttctcctagaggagccaagccatctgtgaaatcagaattaagccctgttgccaggcagacatcccaaataggtgggtcaagtaaagcaccttctagatcaggatctagagattcgaccccttcaagacctgcccagcaaccattaagtagacctatacagtctcctggccgaaactcaatttcccctggtagaaatggaataagtcctcctaacaaattatctcaacttccaaggacatcatcccctagtactgcttcaactaagtcctcaggttctggaaaaatgtcatatacatctccaggtagacagatgagccaacagaaccttaccaaacaaacaggtttatccaagaatgccagtagtattccaagaagtgagtctgcctccaaaggactaaatcagatgaataatggtaatggagccaataaaaaggtagaactttctagaatgtcttcaactaaatcaagtggaagtgaatctgatagatcagaaagacctgtattagtacgccagtcaactttcatcaaagaagctccaagcccaaccttaagaagaaaattggaggaatctgcttcatttgaatctctttctccatcatctagaccagcttctcccactaggtcccaggcacaaactccagttttaagtccttcccttcctgatatgtctctatccacacattcgtctgttcaggctggtggatggcgaaaactcccacctaatctcagtcccactatagagtataatgatggaagaccagcaaagcgccatgatattgcacggtctcattctgaaagtccttctagacttccaatcaataggtcaggaacctggaaacgtgagcacagcaaacattcatcatcccttcctcgagtaagcacttggagaagaactggaagttcatcttcaattctttctgcttcatcagaatccagtgaaaaagcaaaaagtgaggatgaaaaacatgtgaactctatttcaggaaccaaacaaagtaaagaaaaccaagtatccgcaaaaggaacatggagaaaaataaaagaaaatgaattttctcccacaaatagtacttctcagaccgtttcctcaggtgctacaaatggtgctgaatcaaagactctaatttatcaaatggcacctgctgtttctaaaacagaggatgtttgggtgagaattgaggactgtcccattaacaatcctagatctggaagatctcccacaggtaatactcccccggtgattgacagtgtttcagaaaaggcaaatccaaacattaaagattcaaaagataatcaggcaaaacaaaatgtgggtaatggcagtgttcccatgcgtaccgtgggtttggaaaatcgcctgaactcctttattcaggtggatgcccctgaccaaaaaggaactgagataaaaccaggacaaaataatcctgtccctgtatcagagactaatgaaagttctatagtggaacgtaccccattcagttctagcagctcaagcaaacacagttcacctagtgggactgttgctgccagagtgactccttttaattacaacccaagccctaggaaaagcagcgcagatagcacttcagctcggccatctcagatcccaactccagtgaataacaacacaaagaagcgagattccaaaactgacagcacagaatccagtggaacccaaagtcctaagcgccattctgggtcttaccttgtgacatctgtttaaaagagaggaagaatgaaactaagaaaattctatgttaattacaactgctatatagacattttgtttcaaatgaaactttaaaagactgaaaaattttgtaaataggtttgattcttgttagagggtttttgttctggaagccatatttgatagtatactttgtcttcactggtcttattttgggaggcactcttgatggttaggaaaaaaatagtaaagccaagtatgtttgtacagtatgttttacatgtatttaaagtagcatcccatcccaacttcctttaattattgcttgtcttaaaataatgaacactacagatagaaaatatgatatattgctgttatcaatcatttctagattataaactgactaaacttacatcagggaaaaattggtatttatgcaaaaaaaaatgtttttgtccttgtgagtccatctaacatcataattaatcatgtggctgtgaaattcacagtaatatggttcccgatgaacaagtttacccagcctgctttgctttactgcatgaatgaaactgatggttcaatttcagaagtaatgattaacagttatgtggtcacatgatgtgcatagagatagctacagtgtaataatttacactattttgtgctccaaacaaaacaaaaatctgtgtaactgtaaaacattgaatgaaactattttacctgaactagattttatctgaaagtaggtagaatttttgctatgctgtaatttgttgtatattctggtatttgaggtgagatggctgctcttttattaatgagacatgaattgtgtctcaacagaaactaaatgaacatttcagaataaattattgctgtatgtaaactgttactgaaattggtatttgtttgaagggtcttgtttcacatttgtattaataattgtttaaaatgcctcttttaaaagcttatataaatttttttcttcagcttctatgcattaagagtaaaattcctcttactgtaataaaaacaattgaagaagactgttgccacttaaccattccatgcgttggcacttatctattcctgaaatttcttttatgtgattagctcatcttgatttttaacatttttccacttaaacttttttttcttactccactggagctcagtaaaagtaaattcatgtaatagcaatgcaagcagcctagcacagactaagcattgagcataataggcccacataatttcctctttcttaatattatagaattctgtacttgaaattgattcttagacattgcagtctcttcgaggctttacagtgtaaactgtcttgccccttcatcttcttgttgcaactgggtctgacatgaacactttttatcaccctgtatgttagggcaagatctcagcagtgaagtataatcagcactttgccatgctcagaaaattcaaatcacatggaactttagaggtagatttaatacgattaagatattcagaagtatattttagaatccctgcctgttaaggaaactttatttgtggtaggtacagttctggggtacatgttaagtgtccccttatacagtggagggaagtcttccttcctgaaggaaaataaactgacacttattaactaagataatttacttaatatatcttccctgatttgttttaaaagatcagagggtgactgatgatacatgcatacatatttgttgaataaatgaaaatttatttttagtgataagattcatacactctgtatttggggagagaaaacctttttaagcatggtggggcactcagataggagtgaatacacctacctggtgccttgaaaatcacatcaagtagttaattatctaccccttacctgtgtttataacttccaggtaatgagaatgattttttttaaagctaaaatgccagtaaataaaagtgctatgacttgagctaagatatttgactccaatgcctgtactgtgtctactgcaccactttgtaaacacttcaatttactatctttgaaatgattgacctttaaatttttgccaaatgttatctgaaattgtctatgaataccatctacttctgttgttttcccaggcttccataaacaatggagatacatgcatatagg

SEQ ID NO: 406368 - DNA, 10505 bp, Homo sapiens
  misc_feature (1529)..(1529): n is a, c, g, or t
cgccagggtgtcacgggagacagaatggaggtgctgccggactcggaaatggggtccaagggtagccaaggatggctgcagcttcatatgatcagttgttaaagcaagttgaggcactgaagatggagaactcaaatcttcgacaagagctagaagataattccaatcatcttacaaaactggaaactgaggcatctaatatgaaggaagtacttaaacaactacaaggaagtattgaagatgaagctatggcttcttctggacagattgatttattagagcgtcttaaagagcttaacttagatagcagtaatttccctggagtaaaactgcggtcaaaaatgtccctccgttcttatggaagccgggaaggatctgtatcaagccgttctggagagtgcagtcctgttcctatgggttcatttccaagaagagggtttgtaaatggaagcagagaaagtactggatatttagaagaacttgagaaagagaggtcattgcttcttgctgatcttgacaaagaagaaaaggaaaaagactggtattacgctcaacttcagaatctcactaaaagaatagatagtcttcctttaactgaaaatttttccttacaaacagatatgaccagaaggcaattggaatatgaagcaaggcaaatcagagttgcgatggaagaacaactaggtacctgccaggatatggaaaaacgagcacagcgaagaatagccagaattcagcaaatcgaaaaggacatacttcgtatacgacagcttttacagtcccaagcaacagaagcagagaggtcatctcagaacaagcatgaaaccggctcacatgatgctgagcggcagaatgaaggtcaaggagtgggagaaatcaacatggcaacttctggtaatggtcagggttcaactacacgaatggaccatgaaacagccagtgttttgagttctagtagcacacactctgcacctcgaaggctgacaagtcatctgggaaccaaggtggaaatggtgtattcattgttgtcaatgcttggtactcatgataaggatgatatgtcgcgaactttgctagctatgtctagctcccaagacagctgtatatccatgcgacagtctggatgtcttcctctcctcatccagcttttacatggcaatgacaaagactctgtattgttgggaaattcccggggcagtaaagaggctcgggccagggccagtgcagcactccacaacatcattcactcacagcctgatgacaagagaggcaggcgtgaaatccgagtccttcatcttttggaacagatacgcgcttactgtgaaacctgttgggagtggcaggaagctcatgaaccaggcatggaccaggacaaaaatccaatgccagctcctgttgaacatcagatctgtcctgctgtgtgtgttctaatgaaactttcatttgatgaagagcatagacatgcaatgaatgaactagggggactacaggccattgcagaattattgcaagtggactgtgaaatgtangggcttactaatgaccactacagtattacactaagacgatatgctggaatggctttgacaaacttgacttttggagatgtagccaacaaggctacgctatgctctatgaaaggctgcatgagagcacttgtggcccaactaaaatctgaaagtgaagacttacagcaggttattgcaagtgttttgaggaatttgtcttggcgagcagatgtaaatagtaaaaagacgttgcgagaagttggaagtgtgaaagcattgatggaatgtgctttagaagttaaaaaggaatcaaccctcaaaagcgtattgagtgccttatggaatttgtcagcacattgcactgagaataaagctgatatatgtgctgtagatggtgcacttgcatttttggttggcactcttacttaccggagccagacaaacactttagccattattgaaagtggaggtgggatattacggaatgtgtccagcttgatagctacaaatgaggaccacaggcaaatcctaagagagaacaactgtctacaaactttattacaacacttaaaatctcatagtttgacaatagtcagtaatgcatgtggaactttgtggaatctctcagcaagaaatcctaaagaccaggaagcattatgggacatgggggcagttagcatgctcaagaacctcattcattcaaagcacaaaatgattgctatgggaagtgctgcagctttaaggaatctcatggcaaataggcctgcgaagtacaaggatgccaatattatgtctcctggctcaagcttgccatctcttcatgttaggaaacaaaaagccctagaagcagaattagatgctcagcacttatcagaaacttttgacaatatagacaatttaagtcccaaggcatctcatcgtagtaagcagagacacaagcaaagtctctatggtgattatgtttttgacaccaatcgacatgatgataataggtcagacaattttaatactggcaacatgactgtcctttcaccatatttgaatactacagtgttacccagctcctcttcatcaagaggaagcttagatagttctcgttctgaaaaagatagaaaagaagctctgctgcccatacacattcaaacacttacaatttcactaagtcggaaaattcaaataggacatgttctatgccttatgccaaattagaatacaagagatcttcaaatgatagtttaaatagtgtcagtagtagtgatggttatggtaaaagaggtcaaatgaaaccctcgattgaatcctattctgaagatgatgaaagtaagttttgcagttatggtcaatacccagccgacctagcccataaaatacatagtgcaaatcatatggatgataatgatggagaactagatacaccaataaattatagtcttaaatattcagatgagcagttgaactctggaaggcaaagtccttcacagaatgaaagatgggcaagacccaaacacataatagaagatgaaataaaacaaagtgagcaaagacaatcaaggaatcaaagtacaacttatcctgtttatactgagagcactgatgataaacacctcaagttccaaccacattttggacagcaggaatgtgtttctccatacaggtcacggggagccaatggttcagaaacaaatcgagtgggttctaatcatggaattaatcaaaatgtaagccagtctttgtgtcaagaagatgactatgaagatgataagcctaccaattatagtgaacgttactctgaagaagaacagcatgaagaagaagagagaccaacaaattatagcataaaatataatgaagagaaacgtcatgtggatcagcctattgattatagtttaaaatatgccacagatattccttcatcacagaaacagtcattttcattctcaaagagttcatctggacaaagcagtaaaaccgaacatatgtcttcaagcagtgagaatacgtccacaccttcatctaatgccaagaggcagaatcagctccatccaagttctgcacagagtagaagtggtcagcctcaaaaggctgccacttgcaaagtttcttctattaaccaagaaacaatacagacttattgtgtagaagatactccaatatgtttttcaagatgtagttcattatcatctttgtcatcagctgaagatgaaataggatgtaatcagacgacacaggaagcagattctgctaataccctgcaaatagcagaaataaaagaaaagattggaactaggtcagctgaagatcctgtgagcgaagttccagcagtgtcacagcaccctagaaccaaatccagcagactgcagggttctagtttatcttcagaatcagccaggcacaaagctgttgaattttcttcaggagcgaaatctccctccaaaagtggtgctcagacacccaaaagtccacctgaacactatgttcaggagaccccactcatgtttagcagatgtacttctgtcagttcacttgatagttttgagagtcgttcgattgccagctccgttcagagtgaaccatgcagtggaatggtaagtggcattataagccccagtgatcttccagatagccctggacaaaccatgccaccaagcagaagtaaaacacctccaccacctcctcaaacagctcaaaccaagcgagaagtacctaaaaataaagcacctactgctgaaaagagagagagtggacctaagcaagctgcagtaaatgctgcagttcagagggtccaggttcttccagatgctgatactttattacattttgccacggaaagtactccagatggattttcttgttcatccagcctgagtgctctgagcctcgatgagccatttatacagaaagatgtggaattaagaataatgcctccagttcaggaaaatgacaatgggaatgaaacagaatcagagcagcctaaagaatcaaatgaaaaccaagagaaagaggcagaaaaaactattgattctgaaaaggacctattagatgattcagatgatgatgatattgaaatactagaagaatgtattatttctgccatgccaacaaagtcatcacgtaaagcaaaaaagccagcccagactgcttcaaaattacctccacctgtggcaaggaaaccaagtcagctgcctgtgtacaaacttctaccatcacaaaacaggttgcaaccccaaaagcatgttagttttacaccgggggatgatatgccacgggtgtattgtgttgaagggacacctataaacttttccacagctacatctctaagtgatctaacaatcgaatcccctccaaatgagttagctgctggagaaggagttagaggaggagcacagtcaggtgaatttgaaaaacgagataccattcctacagaaggcagaagtacagatgaggctcaaggaggaaaaacctcatctgtaaccatacctgaattggatgacaataaagcagaggaaggtgatattcttgcagaatgcattaattctgctatgcccaaagggaaaagtcacaagcctttccgtgtgaaaaagataatggaccaggtccagcaagcatctgcgtcgtcttctgcacccaacaaaaatcagttagatggtaagaaaaagaaaccaacttcaccagtaaaacctataccacaaaatactgaatataggacacgtgtaagaaaaaatgcagactcaaaaaataatttaaatgctgagagagttttctcagacaacaaagattcaaagaaacagaatttgaaaaataattccaaggacttcaatgataagctcccaaataatgaagatagagtcagaggaagttttgcttttgattcacctcatcattacacgcctattgaaggaactccttactgtttttcacgaaatgattctttgagttctctagattttgatgatgatgatgttgacctttccagggaaaaggctgaattaagaaaggcaaaagaaaataaggaatcagaggctaaagttaccagccacacagaactaacctccaaccaacaatcagctaataagacacaagctattgcaaagcagccaataaatcgaggtcagcctaaacccatacttcagaaacaatccacttttccccagtcatccaaagacataccagacagaggggcagcaactgatgaaaagttacagaattttgctattgaaaatactccagtttgcttttctcataattcctctctgagttctctcagtgacattgaccaagaaaacaacaataaagaaaatgaacctatcaaagagactgagccccctgactcacagggagaaccaagtaaacctcaagcatcaggctatgctcctaaatcatttcatgttgaagataccccagtttgtttctcaagaaacagttctctcagttctcttagtattgactctgaagatgacctgttgcaggaatgtataagctccgcaatgccaaaaaagaaaaagccttcaagactcaagggtgataatgaaaaacatagtcccagaaatatgggtggcatattaggtgaagatctgacacttgatttgaaagatatacagagaccagattcagaacatggtctatcccctgattcagaaaattttgattggaaagctattcaggaaggtgcaaattccatagtaagtagtttacatcaagctgctgctgctgcatgtttatctagacaagcttcgtctgattcagattccatcctttccctgaaatcaggaatctctctgggatcaccatttcatcttacacctgatcaagaagaaaaaccctttacaagtaataaaggcccacgaattctaaaaccaggggagaaaagtacattggaaactaaaaagatagaatctgaaagtaaaggaatcaaaggaggaaaaaaagtttataaaagtttgattactggaaaagttcgatctaattcagaaatttcaggccaaatgaaacagccccttcaagcaaacatgccttcaatctctcgaggcaggacaatgattcatattccaggagttcgaaatagctcctcaagtacaagtcctgtttctaaaaaaggcccaccccttaagactccagcctccaaaagccctagtgaaggtcaaacagccaccacttctcctagaggagccaagccatctgtgaaatcagaattaagccctgttgccaggcagacatcccaaataggtgggtcaagtaaagcaccttctagatcaggatctagagattcgaccccttcaagacctgcccagcaaccattaagtagacctatacagtctcctggccgaaactcaatttcccctggtagaaatggaataagtcctcctaacaaattatctcaacttccaaggacatcatcccctagtactgcttcaactaagtcctcaggttctggaaaaatgtcatatacatctccaggtagacagatgagccaacagaaccttaccaaacaaacaggtttatccaagaatgccagtagtattccaagaagtgagtctgcctccaaaggactaaatcagatgaataatggtaatggagccaataaaaaggtagaactttctagaatgtcttcaactaaatcaagtggaagtgaatctgatagatcagaaagacctgtattagtacgccagtcaactttcatcaaagaagctccaagcccaaccttaagaagaaaattggaggaatctgcttcatttgaatctctttctccatcatctagaccagcttctcccactaggtcccaggcacaaactccagttttaagtccttcccttcctgatatgtctctatccacacattcgtctgttcaggctggtggatggcgaaaactcccacctaatctcagtcccactatagagtataatgatggaagaccagcaaagcgccatgatattgcacggtctcattctgaaagtccttctagacttccaatcaataggtcaggaacctggaaacgtgagcacagcaaacattcatcatcccttcctcgagtaagcacttggagaagaactggaagttcatcttcaattctttctgcttcatcagaatccagtgaaaaagcaaaaagtgaggatgaaaaacatgtgaactctatttcaggaaccaaacaaagtaaagaaaaccaagtatccgcaaaaggaacatggagaaaaataaaagaaaatgaattttctcccacaaatagtacttctcagaccgtttcctcaggtgctacaaatggtgctgaatcaaagactctaatttatcaaatggcacctgctgtttctaaaacagaggatgtttgggtgagaattgaggactgtcccattaacaatcctagatctggaagatctcccacaggtaatactcccccggtgattgacagtgtttcagaaaaggcaaatccaaacattaaagattcaaaagataatcaggcaaaacaaaatgtgggtaatggcagtgttcccatgcgtaccgtgggtttggaaaatcgcctgaactcctttattcaggtggatgcccctgaccaaaaaggaactgagataaaaccaggacaaaataatcctgtccctgtatcagagactaatgaaagttctatagtggaacgtaccccattcagttctagcagctcaagcaaacacagttcacctagtgggactgttgctgccagagtgactccttttaattacaacccaagccctaggaaaagcagcgcagatagcacttcagctcggccatctcagatcccaactccagtgaataacaacacaaagaagcgagattccaaaactgacagcacagaatccagtggaacccaaagtcctaagcgccattctgggtcttaccttgtgacatctgtttaaaagagaggaagaatgaaactaagaaaattctatgttaattacaactgctatatagacattttgtttcaaatgaaactttaaaagactgaaaaattttgtaaataggtttgattcttgttagagggtttttgttctggaagccatatttgatagtatactttgtcttcactggtcttattttgggaggcactcttgatggttaggaaaaaaatagtaaagccaagtatgtttgtacagtatgttttacatgtatttaaagtagcatcccatcccaacttcctttaattattgcttgtcttaaaataatgaacactacagatagaaaatatgatatattgctgttatcaatcatttctagattataaactgactaaacttacatcagggaaaaattggtatttatgcaaaaaaaaatgtttttgtccttgtgagtccatctaacatcataattaatcatgtggctgtgaaattcacagtaatatggttcccgatgaacaagtttacccagcctgctttgctttactgcatgaatgaaactgatggttcaatttcagaagtaatgattaacagttatgtggtcacatgatgtgcatagagatagctacagtgtaataatttacactattttgtgctccaaacaaaacaaaaatctgtgtaactgtaaaacattgaatgaaactattttacctgaactagattttatctgaaagtaggtagaatttttgctatgctgtaatttgttgtatattctggtatttgaggtgagatggctgctcttttattaatgagacatgaattgtgtctcaacagaaactaaatgaacatttcagaataaattattgctgtatgtaaactgttactgaaattggtatttgtttgaagggtcttgtttcacatttgtattaataattgtttaaaatgcctcttttaaaagcttatataaatttttttcttcagcttctatgcattaagagtaaaattcctcttactgtaataaaaacaattgaagaagactgttgccacttaaccattccatgcgttggcacttatctattcctgaaatttcttttatgtgattagctcatcttgatttttaacatttttccacttaaacttttttttcttactccactggagctcagtaaaagtaaattcatgtaatagcaatgcaagcagcctagcacagactaagcattgagcataataggcccacataatttcctctttcttaatattatagaattctgtacttgaaattgattcttagacattgcagtctcttcgaggctttacagtgtaaactgtcttgccccttcatcttcttgttgcaactgggtctgacatgaacactttttatcaccctgtatgttagggcaagatctcagcagtgaagtataatcagcactttgccatgctcagaaaattcaaatcacatggaactttagaggtagatttaatacgattaagatattcagaagtatattttagaatccctgcctgttaaggaaactttatttgtggtaggtacagttctggggtacatgttaagtgtccccttatacagtggagggaagtcttccttcctgaaggaaaataaactgacacttattaactaagataatttacttaatatatcttccctgatttgttttaaaagatcagagggtgactgatgatacatgcatacatatttgttgaataaatgaaaatttatttttagtgataagattcatacactctgtatttggggagagaaaacctttttaagcatggtggggcactcagataggagtgaatacacctacctggtgccttgaaaatcacatcaagtagttaattatctaccccttacctgtgtttataacttccaggtaatgagaatgattttttttaaagctaaaatgccagtaaataaaagtgctatgacttgagctaagatatttgactccaatgcctgtactgtgtctactgcaccactttgtaaacacttcaatttactatctttgaaatgattgacctttaaatttttgccaaatgttatctgaaattgtctatgaataccatctacttctgttgttttcccaggcttccataaacaatggagatacatgcatatagg

SEQ ID NO: 406369 - DNA, 4557 bp, Homo sapiens
cgccagggtgtcacgggagacagaatggaggtgctgccggactcggaaatggggtccaagggtagccaaggatggctgcagcttcatatgatcagttgttaaagcaagttgaggcactgaagatggagaactcaaatcttcgacaagagctagaagataattccaatcatcttacaaaactggaaactgaggcatctaatatgaaggaagtacttaaacaactacaaggaagtattgaagatgaagctatggcttcttctggacagattgatttattagagcgtcttaaagcgtctgattcagattccatcctttccctgaaatcaggaatctctctgggatcaccatttcatcttacacctgatcaagaagaaaaaccctttacaagtaataaaggcccacgaattctaaaaccaggggagaaaagtacattggaaactaaaaagatagaatctgaaagtaaaggaatcaaaggaggaaaaaaagtttataaaagtttgattactggaaaagttcgatctaattcagaaatttcaggccaaatgaaacagccccttcaagcaaacatgccttcaatctctcgaggcaggacaatgattcatattccaggagttcgaaatagctcctcaagtacaagtcctgtttctaaaaaaggcccaccccttaagactccagcctccaaaagccctagtgaaggtcaaacagccaccacttctcctagaggagccaagccatctgtgaaatcagaattaagccctgttgccaggcagacatcccaaataggtgggtcaagtaaagcaccttctagatcaggatctagagattcgaccccttcaagacctgcccagcaaccattaagtagacctatacagtctcctggccgaaactcaatttcccctggtagaaatggaataagtcctcctaacaaattatctcaacttccaaggacatcatcccctagtactgcttcaactaagtcctcaggttctggaaaaatgtcatatacatctccaggtagacagatgagccaacagaaccttaccaaacaaacaggtttatccaagaatgccagtagtattccaagaagtgagtctgcctccaaaggactaaatcagatgaataatggtaatggagccaataaaaaggtagaactttctagaatgtcttcaactaaatcaagtggaagtgaatctgatagatcagaaagacctgtattagtacgccagtcaactttcatcaaagaagctccaagcccaaccttaagaagaaaattggaggaatctgcttcatttgaatctctttctccatcatctagaccagcttctcccactaggtcccaggcacaaactccagttttaagtccttcccttcctgatatgtctctatccacacattcgtctgttcaggctggtggatggcgaaaactcccacctaatctcagtcccactatagagtataatgatggaagaccagcaaagcgccatgatattgcacggtctcattctgaaagtccttctagacttccaatcaataggtcaggaacctggaaacgtgagcacagcaaacattcatcatcccttcctcgagtaagcacttggagaagaactggaagttcatcttcaattctttctgcttcatcagaatccagtgaaaaagcaaaaagtgaggatgaaaaacatgtgaactctatttcaggaaccaaacaaagtaaagaaaaccaagtatccgcaaaaggaacatggagaaaaataaaagaaaatgaattttctcccacaaatagtacttctcagaccgtttcctcaggtgctacaaatggtgctgaatcaaagactctaatttatcaaatggcacctgctgtttctaaaacagaggatgtttgggtgagaattgaggactgtcccattaacaatcctagatctggaagatctcccacaggtaatactcccccggtgattgacagtgtttcagaaaaggcaaatccaaacattaaagattcaaaagataatcaggcaaaacaaaatgtgggtaatggcagtgttcccatgcgtaccgtgggtttggaaaatcgcctgaactcctttattcaggtggatgcccctgaccaaaaaggaactgagataaaaccaggacaaaataatcctgtccctgtatcagagactaatgaaagttctatagtggaacgtaccccattcagttctagcagctcaagcaaacacagttcacctagtgggactgttgctgccagagtgactccttttaattacaacccaagccctaggaaaagcagcgcagatagcacttcagctcggccatctcagatcccaactccagtgaataacaacacaaagaagcgagattccaaaactgacagcacagaatccagtggaacccaaagtcctaagcgccattctgggtcttaccttgtgacatctgtttaaaagagaggaagaatgaaactaagaaaattctatgttaattacaactgctatatagacattttgtttcaaatgaaactttaaaagactgaaaaattttgtaaataggtttgattcttgttagagggtttttgttctggaagccatatttgatagtatactttgtcttcactggtcttattttgggaggcactcttgatggttaggaaaaaaatagtaaagccaagtatgtttgtacagtatgttttacatgtatttaaagtagcatcccatcccaacttcctttaattattgcttgtcttaaaataatgaacactacagatagaaaatatgatatattgctgttatcaatcatttctagattataaactgactaaacttacatcagggaaaaattggtatttatgcaaaaaaaaatgtttttgtccttgtgagtccatctaacatcataattaatcatgtggctgtgaaattcacagtaatatggttcccgatgaacaagtttacccagcctgctttgctttactgcatgaatgaaactgatggttcaatttcagaagtaatgattaacagttatgtggtcacatgatgtgcatagagatagctacagtgtaataatttacactattttgtgctccaaacaaaacaaaaatctgtgtaactgtaaaacattgaatgaaactattttacctgaactagattttatctgaaagtaggtagaatttttgctatgctgtaatttgttgtatattctggtatttgaggtgagatggctgctcttttattaatgagacatgaattgtgtctcaacagaaactaaatgaacatttcagaataaattattgctgtatgtaaactgttactgaaattggtatttgtttgaagggtcttgtttcacatttgtattaataattgtttaaaatgcctcttttaaaagcttatataaatttttttcttcagcttctatgcattaagagtaaaattcctcttactgtaataaaaacaattgaagaagactgttgccacttaaccattccatgcgttggcacttatctattcctgaaatttcttttatgtgattagctcatcttgatttttaacatttttccacttaaacttttttttcttactccactggagctcagtaaaagtaaattcatgtaatagcaatgcaagcagcctagcacagactaagcattgagcataataggcccacataatttcctctttcttaatattatagaattctgtacttgaaattgattcttagacattgcagtctcttcgaggctttacagtgtaaactgtcttgccccttcatcttcttgttgcaactgggtctgacatgaacactttttatcaccctgtatgttagggcaagatctcagcagtgaagtataatcagcactttgccatgctcagaaaattcaaatcacatggaactttagaggtagatttaatacgattaagatattcagaagtatattttagaatccctgcctgttaaggaaactttatttgtggtaggtacagttctggggtacatgttaagtgtccccttatacagtggagggaagtcttccttcctgaaggaaaataaactgacacttattaactaagataatttacttaatatatcttccctgatttgttttaaaagatcagagggtgactgatgatacatgcatacatatttgttgaataaatgaaaatttatttttagtgataagattcatacactctgtatttggggagagaaaacctttttaagcatggtggggcactcagataggagtgaatacacctacctggtgccttgaaaatcacatcaagtagttaattatctaccccttacctgtgtttataacttccaggtaatgagaatgattttttttaaagctaaaatgccagtaaataaaagtgctatgacttgagctaagatatttgactccaatgcctgtactgtgtctactgcaccactttgtaaacacttcaatttactatctttgaaatgattgacctttaaatttttgccaaatgttatctgaaattgtctatgaataccatctacttctgttgttttcccaggcttccataaacaatggagatacatgcatatagg

SEQ ID NO: 406370 - DNA, 2094 bp, Homo sapiens
  misc_feature (1529)..(1529): n is a, c, g, or t
cgccagggtgtcacgggagacagaatggaggtgctgccggactcggaaatggggtccaagggtagccaaggatggctgcagcttcatatgatcagttgttaaagcaagttgaggcactgaagatggagaactcaaatcttcgacaagagctagaagataattccaatcatcttacaaaactggaaactgaggcatctaatatgaaggaagtacttaaacaactacaaggaagtattgaagatgaagctatggcttcttctggacagattgatttattagagcgtcttaaagagcttaacttagatagcagtaatttccctggagtaaaactgcggtcaaaaatgtccctccgttcttatggaagccgggaaggatctgtatcaagccgttctggagagtgcagtcctgttcctatgggttcatttccaagaagagggtttgtaaatggaagcagagaaagtactggatatttagaagaacttgagaaagagaggtcattgcttcttgctgatcttgacaaagaagaaaaggaaaaagactggtattacgctcaacttcagaatctcactaaaagaatagatagtcttcctttaactgaaaatttttccttacaaacagatatgaccagaaggcaattggaatatgaagcaaggcaaatcagagttgcgatggaagaacaactaggtacctgccaggatatggaaaaacgagcacagcgaagaatagccagaattcagcaaatcgaaaaggacatacttcgtatacgacagcttttacagtcccaagcaacagaagcagagaggtcatctcagaacaagcatgaaaccggctcacatgatgctgagcggcagaatgaaggtcaaggagtgggagaaatcaacatggcaacttctggtaatggtcagggttcaactacacgaatggaccatgaaacagccagtgttttgagttctagtagcacacactctgcacctcgaaggctgacaagtcatctgggaaccaaggtggaaatggtgtattcattgttgtcaatgcttggtactcatgataaggatgatatgtcgcgaactttgctagctatgtctagctcccaagacagctgtatatccatgcgacagtctggatgtcttcctctcctcatccagcttttacatggcaatgacaaagactctgtattgttgggaaattcccggggcagtaaagaggctcgggccagggccagtgcagcactccacaacatcattcactcacagcctgatgacaagagaggcaggcgtgaaatccgagtccttcatcttttggaacagatacgcgcttactgtgaaacctgttgggagtggcaggaagctcatgaaccaggcatggaccaggacaaaaatccaatgccagctcctgttgaacatcagatctgtcctgctgtgtgtgttctaatgaaactttcatttgatgaagagcatagacatgcaatgaatgaactagggggactacaggccattgcagaattattgcaagtggactgtgaaatgtangggcttactaatgaccactacagtattacactaagacgatatgctggaatggctttgacaaacttgacttttggagatgtagccaacaaggctacgctatgctctatgaaaggctgcatgagagcacttgtggcccaactaaaatctgaaagtgaagacttacagcaggttattgcaagtgttttgaggaatttgtcttggcgagcagatgtaaatagtaaaaagacgttgcgagaagttggaagtgtgaaagcattgatggaatgtgctttagaagttaaaaagagatggagtcttgctctgctgccaggctggagtgcagtggcaggatctcggctaactgcaacctccaactccctggttcaagcgattatcctgcctcagcctcccaagtagctgggattataggcatgcgccaccatgcccagctagtttttgtatttttagtagagacggggtttcaccatgttggccaggatggtcttcatctcctgacctcatgacccgcctgccttggccttccaaagtgctgggattacaggcatgatataatgcatggtcaatc

SEQ ID NO: 406371 - DNA, 535 bp, Homo sapiens
gagaaggccaaggtgagaggaggcgggaagcatccctgtcccaggagagcctcagattcaaaccctgggcacactttctgctggcggctctgtctgtataaaaacttcccttgtagcctttgagtgttaaggggacaccatgtgcatgaaggtgtctgaaatccagctgctggtttccctttggtgcagcattttcttatctgaatcctagtgtgccattaagaacaggttcatcctttcatctttgaaatatgccagagtccttcctgctgtctatttataggttccctaaactttacaaaatacaggatggcttggagacaatttgaaagtattgcaaggttccaggaatgctgccatttacatacttgagggaccttgaggaattccagcgaaccaggcacacttggtctgcccaagcttttctctgagaggggccctgctcattctgcgttctccttgtgtttatcttctgcacaggcttctgtggtccagtccatatggaagctcttggaacacttctgtgttccactgt

SEQ ID NO: 406372 - DNA, 1084 bp, Homo sapiens
cagcatccttggcagtagggttttaggtggagtctatctggctttcagagaagagtcaggaaaacatttttattcccagcctgtgtcccatgggcaaaagcaaatcccaaattctcctcctgaaccctcccaatttgtctctacaaactctcttctccttgtttttctgttttctcatggctgaccttgtgtctcgcctgagaaaggtagggaggggtcattatcagccctgagccctatgtggtagaagaggcttcacagagggacaagaaggagtgtcctcaagatcaagttgcttctggatgtcactaacacatccccttctgccacgtcttttttttcttgtacctattccatgagctacaaggaacatctgaggctttgaaacaagctcacacttttcccccaaatgagaggaggaagccccttgggtgagggaggagcagctcagactctgcttcctgctctgctctgggctcctctggtgactggccctgtttgactccacctggggtgggaccagcatgtgtggagaaagaccccttgtggactgtcctgaatttcgctaaatggagctgccagttgaagccaagcctcccccgggccaggctgcagggaaatgagaagagaaggagcctcagggcagactcctgagcctggtcctggctctgaagtcagcggttgtatgaagctgtgggcacagtacgtgggacacagcatggaggactgtgactgatgcagagctagagaaatagggagattcacccctggagctctgcatggcaggaaaagggcagtgccaaaaagtgtgtaattatagagagggtaagactaccagacactttatatatatctaatataaggcttaccattagctatttctaagtgtgcaatttagtgttgtgtaaccatcacactatccatttccagaactttttcctcttaccatattaaacctctgtacccaataaacagtaactctcactccttctccctcgaacccttagcacccaccattctaatttctgtctctatgtaactggctattctaactatcttttataaatggaattatataataatt

SEQ ID NO: 406373 - DNA, 695 bp, Homo sapiens
actcagatggcaccactgcactccagtctgggtgacagagtgagactccatctgaaaaaaaaatttttttaatgagtattctaaaaattatatgaaatttctgaaaatcaaatatgttatcatagtgtcatatgccacagaagtaactagatttctatgtgagctgtgtctttaccataataaattctcattagatttttaaccatagtcagtttaaatctctgtcattcccagacagttgctttgattcttcctcaaactacttacaatcacctacagtccaaaattgctttttcttcaaggagatttatggaaaggtctcttacaaggactcttgaatacaagctcctgataacttcaagatcataccactggactaagaactttcaaaattttaatgaacaggctgataccttcatgaaattcaagacaaagaagaaaaatactcaatgttattggactaaataatcaaaaggataatgatttcataattttctatttgaaaatgtgctgattcttggaatgtttcattctccagatttatgaacattttttcttgagcaattggtaaagtatacttttgtaaacaaaaattgaaacatttccttttgctctctatctgagtgccccagaattgggaatctattcatgagtattcatatgtttatggtaataaagctatttgcacaagttca

SEQ ID NO: 406374 - DNA, 1644 bp, Homo sapiens
actcagatggcaccactgcactccagtctgggtgacagagtgagactccatctgaaaaaaaaatttttttaatgagtattctaaaaattatatgaaatttctgaaaatcaaatatgttatcatagtgtcatatgccacagaagtaactagatttctatgtgagctgtgtctttaccataataaattctcattagatttttaaccatagtcagtttaaatctctgtcattcccagacagttgctttgattcttcctcaaactacttacaatcacctacagtccaaaattgctttttcttcaaggagatttatggaaaggtctcttacaaggactcttgaatacaagctcctgataacttcaagatcataccactggactaagaactttcaaaattttaatgaacaggctgataccttcatgaaattcaagacaaagaagaaaaatactcaatgttattggactaaataatcaaaaggataatgatttcataattttctatttgaaaatgtgctgattcttggaatgtttcattctccagatttatgaacattttttcttgagcaattggtaaagtatacttttgtaaacaaaaattgaaacatttccttttgctctctatctgagtgccccagaattgggaatctattcatgagtattcatatgtttatggtaataaagctatttgcacaagttcaaaaaaaaaaaaaaaaaaaaaaaaaaaaaaaaaaaaaaaaaaaaaaaaaaaaaaaaaaaaaaaaaaaaaaaaaaaaaaaaaaaaaaaaaaaaaaaaaaaaaaaaaaaaaagcaaaaaaaaaaaaaaaaaaaaaaaaaaagaaaaaagaacacaagcggggggggcgggggggcgcgcgaagcaagtcgacgcggcgggtgcgggggggggggggggcacgggaggaggagaagcaggagcgaccggagagcaacgccaggaggcaagaggaagggggcaggaggcaacacaaacaaaaacaggaagaagagggagagcggagacgaggagcgaagaacacaacacaagggggagggaggacgagagcgaggcgcgggggacacaataacggagggagcacggagcagcagggaagaggaagcaaagacagccgcgccgcgcggggcgaagcgggcgagagcaagagagagaggagagaagggacgagtcaaggagtagaagaagcgcgcgcgcagcagaagacagggagcagaagagagcaagcccaggagagcagggccaggcccgagaggacgagacgagggaagcgaagagagggcgagacgaaaagcagggaagcgagcagcgggagaggaaagaaagcacaaagcagcaacaacagaagagggcgaacgaagaagatagaacgaagagaaggaaagagaaggagaacagaaggagagaagacgagggagagagaagaggaagaaggaaggaggaggagaggaaggaggaaaggagcgggcagagaggaagaggaagggggaagagaacgaagacgggagaggagaggacgaccgggagcgagggacgagagacgcgcgagagagacgacgaaaagcagcaggcaaagcacgacaacacacacgaccgaggaagcaccaagccacaaaaagacaccacacagccaa

SEQ ID NO: 406375 - DNA, 1581 bp, Homo sapiens
atgagcctgggaattgctgctgccccgggaagaggctcagggcagaaggaggaaggacagcacagctgacagccgtgctcaggaagtttctggatcctaggctcatctccacagaggagaacacacaggcagcagagaccatggggcccctctcagcccctccctgcacagagcacatcaaatggaaggggctcctggtcacagcatcacttttaaacttctggaacctgcccaccactgcccaagtcacgattgaagcccagccaccaaaagtttccgaggggaaggatgttcttctacttgtccacaatttgccccagaatcttactggctacatctggtacaaagggcaaatcagggacctctaccattacattacatcatatgtagtagacggtcaaataattatatatgggcctgcatatagtggacgagaaacagcatattccaatgcatccctgctgatccagaatgtcacccgggaggacgcaggatcctacaccttacacatcataaagcgaggtgatgggactagaggagtaactggatatttcaccttcaccttatacctggagactcccaagccctccatctccagcagcaacttaaaccccagggaggccatggaaactgtgatcttaacctgtgatcctgagactccggacacaagctaccagtggtggatgaatggtcagagcctccctatgactcataggtttcagctgtccgaaaccaacaggaccctctttctatttggtgtcacaaagtatactgcaggaccctatgaatgtgaaatacggaactcagggagtgccagccgcagtgacccagtcaccctgaatctcctccatggtccagacctccccagaattcacccttcatacaccaattaccgttcaggagataacctctacttgtcttgcttcgcgaactctaacccaccggcacagtattcttggacaattaatgggaagtttcagcaatcaggacaaaatctgtttatcccccaaattactacaaagcatagcgggctctatgtttgctctgttcgtaactcagccactggcgaggaaagctccacatcgttgacagtcaaagtctctgcttctacaagaataggacttcttcctctccttaatccaacatagcagctgtgatgtcatttctgtatttcaggaagactggcaggagatttatggaaaggtctcttacaaggactcttgaatacaagctcctgataacttcaagatcataccactggactaagaactttcaaaattttaatgaacaggctgataccttcatgaaattcaagacaaagaagaaaaatactcaatgttattggactaaataatcaaaaggataatgatttcataattttctatttgaaaatgtgctgattcttggaatgtttcattctccagatttatgaacattttttcttgagcaattggtaaagtatacttttgtaaacaaaaattgaaacatttccttttgctctctatctgagtgccccagaattgggaatctattcatgagtattcatatgtttatggtaataaagctatttgcacaagttca

SEQ ID NO: 406376 - DNA, 1715 bp, Homo sapiens
atgagcctgggaattgctgctgccccgggaagaggctcagggcagaaggaggaaggacagcacagctgacagccgtgctcaggaagtttctggatcctaggctcatctccacagaggagaacacacaggcagcagagaccatggggcccctctcagcccctccctgcacagagcacatcaaatggaaggggctcctggtcacagcatcacttttaaacttctggaacctgcccaccactgcccaagtcacgattgaagcccagccaccaaaagtttccgaggggaaggatgttcttctacttgtccacaatttgccccagaatcttactggctacatctggtacaaagggcaaatcagggacctctaccattacattacatcatatgtagtagacggtcaaataattatatatgggcctgcatatagtggacgagaaacagcatattccaatgcatccctgctgatccagaatgtcacccgggaggacgcaggatcctacaccttacacatcataaagcgaggtgatgggactagaggagtaactggatatttcaccttcaccttatacctggagactcccaagccctccatctccagcagcaacttaaaccccagggaggccatggaaactgtgatcttaacctgtgatcctgagactccggacacaagctaccagtggtggatgaatggtcagagcctccctatgactcataggtttcagctgtccgaaaccaacaggaccctctttctatttggtgtcacaaagtatactgcaggaccctatgaatgtgaaatacggaactcagggagtgccagccgcagtgacccagtcaccctgaatctcctccatggtccagacctccccagaattcacccttcatacaccaattaccgttcaggagataacctctacttgtcttgcttcgcgaactctaacccaccggcacagtattcttggacaattaatgggaagtttcagcaatcaggacaaaatctgtttatcccccaaattactacaaagcatagcgggctctatgtttgctctgttcgtaactcagccactggcgaggaaagctccacatcgttgacagtcaaagtctctgcttctacaagaataggacttcttcctctccttaatccaacatagcagctgtgatgtcatttctgtatttcaggaagactggcaggagatttatggaaaggtctcttacaaggactcttgaatacaagctcctgataacttcaagatcataccactggactaagaactttcaaaattttaatgaacaggctgataccttcatgaaattcaagacaaagaagaaaaatactcaatgttattggactaaataatcaaaaggataatgatttcataattttctatttgaaaatgtgctgattcttggaatgtttcattctccagatttatgaacattttttcttgagcaattggtaaagtatacttttgtaaacaaaaattgaaacatttccttttgctctctatctgagtgccccagaattgggaatctattcatgagtattcatatgtttatggtaataaagctatttgcacaagttcaaaaaaaaaaaaaccaaccacacacacaaaacattgttgcgcgcggccgcccgcgaaaatctcttctaaacaactcttgttgggcagcgcccccaacagatttagacacacgtggcaacatacgttcacaagaaa

SEQ ID NO: 406377 - DNA, 1764 bp, Homo sapiens
atgagcctgggaattgctgctgccccgggaagaggctcagggcagaaggaggaaggacagcacagctgacagccgtgctcaggaagtttctggatcctaggctcatctccacagaggagaacacacaggcagcagagaccatggggcccctctcagcccctccctgcacagagcacatcaaatggaaggggctcctggtcacagcatcacttttaaacttctggaacctgcccaccactgcccaagtcacgattgaagcccagccaccaaaagtttccgaggggaaggatgttcttctacttgtccacaatttgccccagaatcttactggctacatctggtacaaagggcaaatcagggacctctaccattacattacatcatatgtagtagacggtcaaataattatatatgggcctgcatatagtggacgagaaacagcatattccaatgcatccctgctgatccagaatgtcacccgggaggacgcaggatcctacaccttacacatcataaagcgaggtgatgggactagaggagtaactggatatttcaccttcaccttatacctggagactcccaagccctccatctccagcagcaacttaaaccccagggaggccatggaaactgtgatcttaacctgtgatcctgagactccggacacaagctaccagtggtggatgaatggtcagagcctccctatgactcataggtttcagctgtccgaaaccaacaggaccctctttctatttggtgtcacaaagtatactgcaggaccctatgaatgtgaaatacggaactcagggagtgccagccgcagtgacccagtcaccctgaatctcctccatggtccagacctccccagaattcacccttcatacaccaattaccgttcaggagataacctctacttgtcttgcttcgcgaactctaacccaccggcacagtattcttggacaattaatgggaagtttcagcaatcaggacaaaatctgtttatcccccaaattactacaaagcatagcgggctctatgtttgctctgttcgtaactcagccactggcgaggaaagctccacatcgttgacagtcaaagtctctgcttctacaagaataggacttcttcctctccttaatccaacatagcagctgtgatgtcatttctgtatttcaggaagactggcaggagatttatggaaaggtctcttacaaggactcttgaatacaagctcctgataacttcaagatcataccactggactaagaaatttcatgaaggtatcaacctgttctttttctcagtgtctctattgtggcagccattaatgagactctgtctggtttccatggcagggacctgattgacagaaggcccaggtcagcgcatttcaaattcactacctcctttacagagaaagcttctttcccacaggctcccagcaagggtgtgaaagcaagtctagttctccgaggctctctttaactccaatgggtgactggttggaggattcctcatcagccttgcaaaaactcttagaactgcattggtacctaaaacttctttctctttctttttcacaggaatcagctctgcatagcggtctgtgggttctcccatactaccttcatgcctgccccacattccctcacaggtgtcttccctgataaattatcttgtatgtctaatcccatcttggatgcatctcagttggtaaaaactaacataccagacttgattctttgcacttagctttttttcttt

SEQ ID NO: 406378 - DNA, 2200 bp, Homo sapiens
atgagcctgggaattgctgctgccccgggaagaggctcagggcagaaggaggaaggacagcacagctgacagccgtgctcaggaagtttctggatcctaggctcatctccacagaggagaacacacaggcagcagagaccatggggcccctctcagcccctccctgcacagagcacatcaaatggaaggggctcctggtcacagcatcacttttaaacttctggaacctgcccaccactgcccaagtcacgattgaagcccagccaccaaaagtttccgaggggaaggatgttcttctacttgtccacaatttgccccagaatcttactggctacatctggtacaaagggcaaatcagggacctctaccattacattacatcatatgtagtagacggtcaaataattatatatgggcctgcatatagtggacgagaaacagcatattccaatgcatccctgctgatccagaatgtcacccgggaggacgcaggatcctacaccttacacatcataaagcgaggtgatgggactagaggagtaactggatatttcaccttcaccttatacctggagactcccaagccctccatctccagcagcaacttaaaccccagggaggccatggaaactgtgatcttaacctgtgatcctgagactccggacacaagctaccagtggtggatgaatggtcagagcctccctatgactcataggtttcagctgtccgaaaccaacaggaccctctttctatttggtgtcacaaagtatactgcaggaccctatgaatgtgaaatacggaactcagggagtgccagccgcagtgacccagtcaccctgaatctcctccatggtccagacctccccagaattcacccttcatacaccaattaccgttcaggagataacctctacttgtcttgcttcgcgaactctaacccaccggcacagtattcttggacaattaatgggaagtttcagcaatcaggacaaaatctgtttatcccccaaattactacaaagcatagcgggctctatgtttgctctgttcgtaactcagccactggcgaggaaagctccacatcgttgacagtcaaagtctctgcttctacaagaataggacttcttcctctccttaatccaacatagcagctgtgatgtcatttctgtatttcaggaagactggcagagacgtggtctccctttcttgctcaggctggtcttaaactcctggtttcaagtgatcctcctgccttagagtctcaaagtgctgggattacaggcctctgccagcacacctggccccccaattcttcaaaagctttcagagaaagcattgtagaagacatgactttgtgactgtaagtttcatctgatcctacatcactaggaaggctcattcttaagaagtcatgcatggaaaaggggatgaagacaaatcagaaaagggcaaagggaagtcacagcaaaaaagggacagtataatccctggaaccttattaaagtcacacaactgctgcttcaattagagcaattcgtttggcaaacatcgttctaaccctatagactaggttttccagagtttctgaagtatcttccaattgcaatggcaatctgacacatttttctgaattgcagtctgaatccagtgttcatgtgtaccttttgtatagtccacacatcagcagccacaaaggttgtttatatataagttgctatgatttctccagaagtttacataagtcattgagtttcagcttgcaaggtttaatctatccatctgacaaaaggctaatatccaaaatctacaagaaacttaaacaaatttacaagaaaaaaaaaaagcccatcaaaaagtgggtgaagcacatgaacagacacttctcaaaataggacatttttgtgaccaacaatcacatcatggttcatgatgtgatggtccatgatgtgattgtacatgatgtgatggtccatgatgtgattgtccatgatgtgatggtacatgatgtgatggtccatgatgtgattgttccttaaagacatctacatctgccccactttctgtctcacaaacaaccttgccaaagtcatcttctacccctgtcctgcccagggcaagggagactcctgtgattcatttcagacatcacaatgactcattcatgacaatgctccatagtagtcaactgcgacttagagca

SEQ ID NO: 406379 - DNA, 1146 bp, Homo sapiens
gggactacaggcaaacatcaccatgtacagctgtccccagctttctaatctggtctttctcttgccccagaaactaaagaaggcatgaagccagcccctgcagtgccccattcaccctgaatctcctcccgaagctggagactcccaagccctccatctccagcagcaacttaaaccccagggaggccatggaaactgtgatcttaacctgtgatcctgagactccggacacaagctaccagtggtggatgaatggtcagagcctccctatgactcataggtttcagctgtccgaaaccaacaggaccctctttctatttggtgtcacaaagtatactgcaggaccctatgaatgtgaaatacggaactcagggagtgccagccgcagtgacccagtcaccctgaatctcctccatggtccagacctccccagaattcacccttcatacaccaattaccgttcaggagataacctctacttgtcttgcttcgcgaactctaacccaccggcacagtattcttggacaattaatgggaagtttcagcaatcaggacaaaatctgtttatcccccaaattactacaaagcatagcgggctctatgtttgctctgttcgtaactcagccactggcgaggaaagctccacatcgttgacagtcaaagtctctgcttctacaagaataggacttcttcctctccttaatccaacatagcagctgtgatgtcatttctgtatttcaggaagactggcaggagatttatggaaaggtctcttacaaggactcttgaatacaagctcctgataacttcaagatcataccactggactaagaactttcaaaattttaatgaacaggctgataccttcatgaaattcaagacaaagaagaaaaatactcaatgttattggactaaataatcaaaaggataatgatttcataattttctatttgaaaatgtgctgattcttggaatgtttcattctccagatttatgaacattttttcttgagcaattggtaaagtatacttttgtaaacaaaaattgaaacatttccttttgctctctatctgagtgccccagaattgggaatctattcatgagtattcatatgtttatggtaataaagctatttgcacaagttca

SEQ ID NO: 406380 - DNA, 1072 bp, Homo sapiens
gtgacacgcggtcgatctgactacgcggtcgactgactacgcggctcgatctgactacgcgtggagactcccaagccctccatctccagcagcaacttaaaccccagggaggccatggaaactgtgatcttaacctgtgatcctgagactccggacacaagctaccagtggtggatgaatggtcagagcctccctatgactcataggtttcagctgtccgaaaccaacaggaccctctttctatttggtgtcacaaagtatactgcaggaccctatgaatgtgaaatacggaactcagggagtgccagccgcagtgacccagtcaccctgaatctcctccatggtccagacctccccagaattcacccttcatacaccaattaccgttcaggagataacctctacttgtcttgcttcgcgaactctaacccaccggcacagtattcttggacaattaatgggaagtttcagcaatcaggacaaaatctgtttatcccccaaattactacaaagcatagcgggctctatgtttgctctgttcgtaactcagccactggcgaggaaagctccacatcgttgacagtcaaagtctctgcttctacaagaataggacttcttcctctccttaatccaacatagcagctgtgatgtcatttctgtatttcaggaagactggcaggagatttatggaaaggtctcttacaaggactcttgaatacaagctcctgataacttcaagatcataccactggactaagaactttcaaaattttaatgaacaggctgataccttcatgaaattcaagacaaagaagaaaaatactcaatgttattggactaaataatcaaaaggataatgatttcataattttctatttgaaaatgtgctgattcttggaatgtttcattctccagatttatgaacattttttcttgagcaattggtaaagtatacttttgtaaacaaaaattgaaacatttccttttgctctctatctgagtgccccagaattgggaatctattcatgagtattcatatgtttatggtaataaagctatttgcacaagttca

SEQ ID NO: 406381 - DNA, 1577 bp, Homo sapiens
atgagcctgggaattgctgctgccccgggaagaggctcagggcagaaggaggaaggacagcacagctgacagccgtgctcaggaagtttctggatcctaggctcatctccacagaggagaacacacaggcagcagagaccatggggcccctctcagcccctccctgcacagagcacatcaaatggaaggggctcctggtcacagcatcacttttaaacttctggaacctgcccaccactgcccaagtcacgattgaagcccagccaccaaaagtttccgaggggaaggatgttcttctacttgtccacaatttgccccagaatcttactggctacatctggtacaaagggcaaatcagggacctctaccattacattacatcatatgtagtagacggtcaaataattatatatgggcctgcatatagtggacgagaaacagcatattccaatgcatccctgctgatccagaatgtcacccgggaggacgcaggatcctacaccttacacatcataaagcgaggtgatgggactagaggagtaactggatatttcaccttcaccttatacctggagactcccaagccctccatctccagcagcaacttaaaccccagggaggccatggaaactgtgatcttaacctgtgatcctgagactccggacacaagctaccagtggtggatgaatggtcagagcctccctatgactcataggtttcagctgtccgaaaccaacaggaccctctttctatttggtgtcacaaagtatactgcaggaccctatgaatgtgaaatacggaactcagggagtgccagccgcagtgacccagtcaccctgaatctcctccatggtccagacctccccagaattcacccttcatacaccaattaccgttcaggagataacctctacttgtcttgcttcgcgaactctaacccaccggcacagtattcttggacaattaatgggaagtttcagcaatcaggacaaaatctgtttatcccccaaattactacaaagcatagcgggctctatgtttgctctgttcgtaactcagccactggcgaggaaagctccacatcgttgacagtcaaagtctctgctcctccaggattaggaacttttgctttcaataatccaacgtagcagccgtgatgtcatttttgtatttcaggaagactggcaggagatttatggaaaagactatgaaaaggactcttgaatacaagttcctgataacttcaagatcataccactggactaagaactttcaaaattttgatgaacaggctgataccttcagtgaaattcaagacaaagaagaaaagaactccatttcattggactaaataacaaaaggataatgttttcataattttttattggaaaatgtgctgattttttgaatgttttatcctccagatttatgaatttttttcttcagcaattggtaaagtatacttttgtaaacaaaaattgaaacatttgcttttgctctctgagtgccccagaattgggaatctattcatgaatattcatatgtttatggtaataaagttatttgcacaagtttag

SEQ ID NO: 406382 - DNA, 1422 bp, Homo sapiens
atgagcctgggaattgctgctgccccgggaagaggctcagggcagaaggaggaaggacagcacagctgacagccgtgctcaggaagtttctggatcctaggctcatctccacagaggagaacacacaggcagcagagaccatggggcccctctcagcccctccctgcacagagcacatcaaatggaaggggctcctggtcacagcatcacttttaaacttctggaacctgcccaccactgcccaagtcacgattgaagcccagccaccaaaagtttccgaggggaaggatgttcttctacttgtccacaatttgccccagaatcttactggctacatctggtacaaagggcaaatcagggacctctaccattacattacatcatatgtagtagacggtcaaataattatatatgggcctgcatatagtggacgagaaacagcatattccaatgcatccctgctgatccagaatgtcacccgggaggacgcaggatcctacaccttacacatcataaagcgaggtgatgggactagaggagtaactggatatttcaccttcaccttatacctggagactcccaagccctccatctccagcagcaacttaaaccccagggaggccatggaaactgtgatcttaacctgtgatcctgagactccggacacaagctaccagtggtggatgaatgatggtccagacctccccagaattcacccttcatacaccaattaccgttcaggagataacctctacttgtcttgcttcgcgaactctaacccaccggcacagtattcttggacaattaatgggaagtttcagcaatcaggacaaaatctgtttatcccccaaattactacaaagcatagcgggctctatgtttgctctgttcgtaactcagccactggcgaggaaagctccacatcgttgacagtcaaagtctctgcttctacaagaataggacttcttcctctccttaatccaacatagcagctgtgatgtcatttctgtatttcaggaagactggcaggagatttatggaaaggtctcttacaaggactcttgaatacaagctcctgataacttcaagatcataccactggactaagaactttcaaaattttaatgaacaggctgataccttcatgaaattcaagacaaagaagaaaaatactcaatgttattggactaaataatcaaaaggataatgatttcataattttctatttgaaaatgtgctgattcttggaatgtttcattctccagatttatgaacattttttcttgagcaattggtaaagtatacttttgtaaacaaaaattgaaacatttccttttgctctctatctgagtgccccagaattgggaatctattcatgagtattcatatgtttatggtaataaagctatttgcacaagttca

SEQ ID NO: 406383 - DNA, 871 bp, Homo sapiens
atgagcctgggaattgctgctgccccgggaagaggctcagggcagaaggaggaaggacagcacagctgacagccgtgctcaggaagtttctggatcctaggctcatctccacagaggagaacacacaggcagcagagaccatggggcccctctcagcccctccctgcacagagcacatcaaatggaaggggctcctggtcacagcatcacttttaaacttctggaacctgcccaccactgcccaagtcacgattgaagcccagccaccaaaagtttccgaggggaaggatgttcttctacttgtccacaatttgccccagaatcttactggctacatctggtacaaagggcaaatcagggacctctaccattacattacatcatatgtagtagacggtcaaataattatatatgggcctgcatatagtggacgagaaacagcatattccaatgcatccctgctgatccagaatgtcacccgggaggacgcaggatcctacaccttacacatcataaagcgaggtgatgggactagaggagtaactggatatttcaccttcaccttatacctggagactcccaagccctccatctccagcagcaacttaaaccccagggaggccatggaaactgtgatcttaacctgtgatcctgagactccggacacaagctaccagtggtggatgaatggtcagagcctccctatgactcataggtttcagctgtccgaaaccaacaggaccctctttctatttggtgtcacaaagtatactgcaggaccctatgaatgtgaaatacggaactcagggagtgccagccgcagtgacccagtcaccctgaatctcctccgtgagtatcttctgttcctctg

SEQ ID NO: 406384 - DNA, 595 bp, Homo sapiens
atgagcctgggaattgctgctgccccgggaagaggctcagggcagaaggaggaaggacagcacagctgacagccgtgctcaggaagtttctggatcctaggctcatctccacagaggagaacacacaggcagcagagaccatggggcccctctcagcccctccctgcacagagcacatcaaatggaaggggctcctggtcacagtggagactcccaagccctccatctccagcagcaacttaaaccccagggaggccatggaaactgtgatcttaacctgtgatcctgagactccggacacaagctaccagtggtggatgaatggtcagagcctccctatgactcataggtttcagctgtccgaaaccaacaggaccctctttctatttggtgtcacaaagtatactgcaggaccctatgaatgtgaaatacggaactcagggagtgccagccgcagtgacccagtcaccctgaatctcctccatggtccagacctccccaagaattcaccttcattacaccaattaccaagtgagatccctacatgtgagagaccctaccatgtgagagacctacatggggagacctacatgtg

SEQ ID NO: 406385 - DNA, 1170 bp, Homo sapiens
gcagaaggaggaaggacagcacagctgacagccgtgctctggaagcttctggatcctaggctcatctccacagaggagaacatgcacgcagcagagatcatggggcccctctcagcccctccctgcacagagcacatcaaatggaaggggctcctgctcacagtggagactcccaagccctccatctccagcagcaacttaaaccccagggaggccatggagactgtgatcttaacctgtaatcctgagactccggacgcaagctacctgtggtggatgaatggtcagagcctccctatgactcataggatgcagctgtctgaaaccaacaggaccctctttctatttggtgtcacaaagtatactgcaggaccctatgaatgtgaaatatggaactcagggagtgccagccgcagtgacccagtcaccctgaatctcctccatggtccagacctccccagaattttcccttcagtcacctcttactattcaggagagaacctcgacttgtcctgcttcgcagactctaacccaccagcacagtattcttggacaattaatgggaagtttcagctatcaggacaaaagctctttatccctcagattactccaaagcataatgggctctatgcttgctctgctcgtaactcagccactggcgaggaaagctccacatccttgacaatcagagtcattgctcctccaggattaggaacttttgctttcaataatccaacgtagcagccgtgatgtcatttttgtatttcaggaagactggcaggagatttatggaaaagactatgaaaaggactcttgaatacaagttcctgataacttcaagatcataccactggactaagaactttcaaaattttgatgaacaggctgataccttcagtgaaattcaagacaaagaagaaaagaactccatttcattggactaaataacaaaaggataatgttttcataattttttattggaaaatgtgctgattttttgaatgttttatcctccagatttatgaatttttttcttcagcaattggtaaagtatacttttgtaaacaaaaattgaaacatttgcttttgctctctgagtgccccagaattgggaatctattcatgaatattcatatgtttatggtaataaagttatttgcacaagtttag

SEQ ID NO: 406386 - DNA, 462 bp, Homo sapiens
gtctcagagggtcactgtgtccctttaagagaccaggagcatccccttccctcagatggcatcacctgtggctttattctctttgctccagatggtccagacctccccagaattcacccttcatacaccaattaccgttcaggagataacctctacttgtcttgcttcgcgaactctaacccaccggcacagtattcttggacaattaatgggaagtttcagcaatcaggacaaaatctgtttatcccccaaattactacaaagcatagcgggctctatgtttgctctgttcgtaactcagccactggcgaggaaagctccacatcgttgacagtcaaagtctctggtaagtggatcccagcatccttggcagtagggttttaggtggagtctatctggctttcagagaagagtcaggaaaacatttttattcccagcctgtgtcccatgggcaaaagcaaa

SEQ ID NO: 406387 - DNA, 405 bp, Homo sapiens
  misc_feature (34)..(34): n is a, c, g, or t
  misc_feature (52)..(52): n is a, c, g, or t
aggctcggtacccgattgactacgcggcttgganatttcaccttcaccttanacctggagactcccaagccctccatctccagcagcaacttaaaccccagggaggccatggaaactgtgatcttaacctgtgatcctgagactccggacacaagctaccagtggtggatgaatggtcagagcctccctatgactcataggtttcagctgtccgaaaccaacaggaccctctttctatttggtgtcacaaagtatactgcaggaccctatgaatgtgaaatacggaactcagggagtgccagccgcagtgacccagtcaccctgaatctcctccatggttcagacctccccagaattcacccttcatacctcaatcaccatcagtatctttccgggacctcaaga

SEQ ID NO: 406388 - DNA, 2530 bp, Homo sapiens
atgagcctgggaattgctgctgccccgggaagaggctcagggcagaaggaggaaggacagcacagctgacagccgtgctcaggaagtttctggatcctaggctcatctccacagaggagaacacacaggcagcagagaccatggggcccctctcagcccctccctgcacagagcacatcaaatggaaggggctcctggtcacagcatcacttttaaacttctggaacctgcccaccactgcccaagtcacgattgaagcccagccaccaaaagtttccgaggggaaggatgttcttctacttgtccacaatttgccccagaatcttactggctacatctggtacaaagggcaaatcagggacctctaccattacattacatcatatgtagtagacggtcaaataattatatatgggcctgcatatagtggacgagaaacagcatattccaatgcatccctgctgatccagaatgtcacccgggaggacgcaggatcctacaccttacacatcataaagcgaggtgatgggactagaggagtaactggatatttcaccttcaccttatacctggagactcccaagccctccatctccagcagcaacttaaaccccagggaggccatggaaactgtgatcttaacctgtgatcctgagactccggacacaagctaccagtggtggatgaatggtcagagcctccctatgactcataggtttcagctgtccgaaaccaacaggaccctctttctatttggtgtcacaaagtatactgcaggaccctatgaatgtgaaatacggaactcagggagtgccagccgcagtgacccagtcaccctgaatctcctccatggtccagacctccccagaattcacccttcatacaccaattaccgttcaggagataacctctacttgtcttgcttcgcgaactctaacccaccggcacagtattcttggacaattaatgggaagtttcagcaatcaggacaaaatctgtttatcccccaaattactacaaagcatagcgggctctatgtttgctctgttcgtaactcagccactggcgaggaaagctccacatcgttgacagtcaaagtctctgcttctacaagaataggacttcttcctctccttaatccaacatagcagctgtgatgtcatttctgtatttcaggaagactggcaggagatttatggaaaggtctcttacaaggactcttgaatacaagctcctgataacttcaagatcataccactggactaagaactttcaaaattttaatgaacaggctgataccttcatgaaattcaagacaaagaagaaaaatactcaatgttattggactaaataatcaaaaggataatgatttcataattttctatttgaaaatgtgctgattcttggaatgtttcattctccagatttatgaacattttttcttgagcaattggtaaagtatacttttgtaaacaaaaattgaaacatttccttttgctctctatctgagtgccccagaattgggaatctattcatgagtattcatatgtttatggtaataaagctatttgcacaagttcaaaaaaaaaaaaaaaaaaaaaaaaaaaaaaaaaaaaaaaaaaaaaaaaaaaaaaaaaaaaaaaaaaaaaaaaaaaaaaaaaaaaaaaaaaaaaaaaaaaaaaaaaaaaaagcaaaaaaaaaaaaaaaaaaaaaaaaaaagaaaaaagaacacaagcggggggggcgggggggcgcgcgaagcaagtcgacgcggcgggtgcgggggggggggggggcacgggaggaggagaagcaggagcgaccggagagcaacgccaggaggcaagaggaagggggcaggaggcaacacaaacaaaaacaggaagaagagggagagcggagacgaggagcgaagaacacaacacaagggggagggaggacgagagcgaggcgcgggggacacaataacggagggagcacggagcagcagggaagaggaagcaaagacagccgcgccgcgcggggcgaagcgggcgagagcaagagagagaggagagaagggacgagtcaaggagtagaagaagcgcgcgcgcagcagaagacagggagcagaagagagcaagcccaggagagcagggccaggcccgagaggacgagacgagggaagcgaagagagggcgagacgaaaagcagggaagcgagcagcgggagaggaaagaaagcacaaagcagcaacaacagaagagggcgaacgaagaagatagaacgaagagaaggaaagagaaggagaacagaaggagagaagacgagggagagagaagaggaagaaggaaggaggaggagaggaaggaggaaaggagcgggcagagaggaagaggaagggggaagagaacgaagacgggagaggagaggacgaccgggagcgagggacgagagacgcgcgagagagacgacgaaaagcagcaggcaaagcacgacaacacacacgaccgaggaagcaccaagccacaaaaagacaccacacagccaa

SEQ ID NO: 406389 - DNA, 2432 bp, Homo sapiens
atgagcctgggaattgctgctgccccgggaagaggctcagggcagaaggaggaaggacagcacagctgacagccgtgctcaggaagtttctggatcctaggctcatctccacagaggagaacacacaggcagcagagaccatggggcccctctcagcccctccctgcacagagcacatcaaatggaaggggctcctggtcacagcatcacttttaaacttctggaacctgcccaccactgcccaagtcacgattgaagcccagccaccaaaagtttccgaggggaaggatgttcttctacttgtccacaatttgccccagaatcttactggctacatctggtacaaagggcaaatcagggacctctaccattacattacatcatatgtagtagacggtcaaataattatatatgggcctgcatatagtggacgagaaacagcatattccaatgcatccctgctgatccagaatgtcacccgggaggacgcaggatcctacaccttacacatcataaagcgaggtgatgggactagaggagtaactggatatttcaccttcaccttatacctggagactcccaagccctccatctccagcagcaacttaaaccccagggaggccatggaaactgtgatcttaacctgtgatcctgagactccggacacaagctaccagtggtggatgaatggtcagagcctccctatgactcataggtttcagctgtccgaaaccaacaggaccctctttctatttggtgtcacaaagtatactgcaggaccctatgaatgtgaaatacggaactcagggagtgccagccgcagtgacccagtcaccctgaatctcctccatggtccagacctccccagaattcacccttcatacaccaattaccgttcaggagataacctctacttgtcttgcttcgcgaactctaacccaccggcacagtattcttggacaattaatgggaagtttcagcaatcaggacaaaatctgtttatcccccaaattactacaaagcatagcgggctctatgtttgctctgttcgtaactcagccactggcgaggaaagctccacatcgttgacagtcaaagtctctgcttctacaagaataggacttcttcctctccttaatccaacatagcagctgtgatgtcatttctgtatttcaggaagactggcagagacgtggtctccctttcttgctcaggctggtcttaaactcctggtttcaagtgatcctcctgccttagagtctcaaagtgctgggattacaggcctctgccagcacacctggccccccaattcttcaaaagctttcagagaaagcattgtagaagacatgactttgtgactgtaagtttcatctgatcctacatcactaggaaggctcattcttaagaagtcatgcatggaaaaggggatgaagacaaatcagaaaagggcaaagggaagtcacagcaaaaaagggacagtataatccctggaaccttattaaagtcacacaactgctgcttcaattagagcaattcgtttggcaaacatcgttctaaccctatagactaggttttccagagtttctgaagtatcttccaattgcaatggcaatctgacacatttttctgaattgcagtctgaatccagtgttcatgtgtaccttttgtatagtccacacatcagcagccacaaaggttgtttatatataagttgctatgatttctccagaagtttacataagtcattgagtttcagcttgcaaggtttaatctatccatctgacaaaaggctaatatccaaaatctacaagaaacttaaacaaatttacaagaaaaaaaaaaaaaaaaaaaatttggggggggttgggcccggaaaaggtttttaaaacttcggtggggcgcgcgggggcgccaaaagaagggctacggtgaaccactgtgggccattagcgtgtgttccctaaggagaagactccgggcgcaagagagccaaaggggcgtggggtctctctccccaatataaaaaaccaggccgggggggtacccgagcgcggtttctgagaacaactaccaaaaggggggcttcctaggggcgcacactaagggggtctctatctcacaagagggggctctcaagaggggagccgtggaatatcttcaataaatttaagcccccggctcgtgtggggcttactcccactatcactagccagtccgataaaacaacagcaccgcgagcaaacatcacactaagtactaggcacgcgatccacgaccacgcgaatcaataccaccgaggatctgtcaaccaagcgaggagcagtacagagcacgaccaaactgctagcaccacaaccgcatccagaagcaaacgtacagcggcaaagagcagagcaccaccaacaggaggtgcaaagagagaagcagaccaa

SEQ ID NO: 406390 - DNA, 1788 bp, Homo sapiens
atgagcctgggaattgctgctgccccgggaagaggctcagggcagaaggaggaaggacagcacagctgacagccgtgctcaggaagtttctggatcctaggctcatctccacagaggagaacacacaggcagcagagaccatggggcccctctcagcccctccctgcacagagcacatcaaatggaaggggctcctggtcacagcatcacttttaaacttctggaacctgcccaccactgcccaagtcacgattgaagcccagccaccaaaagtttccgaggggaaggatgttcttctacttgtccacaatttgccccagaatcttactggctacatctggtacaaagggcaaatcagggacctctaccattacattacatcatatgtagtagacggtcaaataattatatatgggcctgcatatagtggacgagaaacagcatattccaatgcatccctgctgatccagaatgtcacccgggaggacgcaggatcctacaccttacacatcataaagcgaggtgatgggactagaggagtaactggatatttcaccttcaccttatacctggagactcccaagccctccatctccagcagcaacttaaaccccagggaggccatggaaactgtgatcttaacctgtgatcctgagactccggacacaagctaccagtggtggatgaatggtcagagcctccctatgactcataggtttcagctgtccgaaaccaacaggaccctctttctatttggtgtcacaaagtatactgcaggaccctatgaatgtgaaatacggaactcagggagtgccagccgcagtgacccagtcaccctgaatctcctccatggtccagacctccccagaattcacccttcatacaccaattaccgttcaggagataacctctacttgtcttgcttcgcgaactctaacccaccggcacagtattcttggacaattaatgggaagtttcagcaatcaggacaaaatctgtttatcccccaaattactacaaagcatagcgggctctatgtttgctctgttcgtaactcagccactggcgaggaaagctccacatcgttgacagtcaaagtctctgcttctacaagaataggacttcttcctctccttaatccaacatagcagctgtgatgtcatttctgtatttcaggaagactggcaggtatgatggccttttctcttatcctggttcctgcagagctgactgccatgcttgggagagggaaaagacttatttgcctgtatctgggactgcatctcctccttcctccactaaactcctgcttctcagcactaattcctgcagttccctttctccctggcctttatgctccctgtaccccactgtcttttagacataattatctccagcctctgctcatttgtttctcagattcaaatgagaaacacaatttcacatggtgaaaccctcttcattatttttaacatctctcaatagtgtaattctctccattcccataaagctcaaccacttctcaaagtattgcttgacttcttgtctccagactttgaaatcttccttgcatatgattgcctcattacctttctaaaatctggttaattgatttaatcaagaatctgcaggggtctactctagcctatttgataagttcacatttcttctatttactaaggcttctcacttcctttacctctacttcctagtataaatcctccatcctaattagaactgtcttcctacacatccctgccccttcacccatatagacataaaattctt

SEQ ID NO: 406391 - DNA, 1066 bp, Homo sapiens
  misc_feature (34)..(34): n is a, c, g, or t
  misc_feature (52)..(52): n is a, c, g, or t
aggctcggtacccgattgactacgcggcttgganatttcaccttcaccttanacctggagactcccaagccctccatctccagcagcaacttaaaccccagggaggccatggaaactgtgatcttaacctgtgatcctgagactccggacacaagctaccagtggtggatgaatggtcagagcctccctatgactcataggtttcagctgtccgaaaccaacaggaccctctttctatttggtgtcacaaagtatactgcaggaccctatgaatgtgaaatacggaactcagggagtgccagccgcagtgacccagtcaccctgaatctcctccatggtccagacctccccagaattcacccttcatacaccaattaccgttcaggagataacctctacttgtcttgcttcgcgaactctaacccaccggcacagtattcttggacaattaatgggaagtttcagcaatcaggacaaaatctgtttatcccccaaattactacaaagcatagcgggctctatgtttgctctgttcgtaactcagccactggcgaggaaagctccacatcgttgacagtcaaagtctctgcttctacaagaataggacttcttcctctccttaatccaacatagcagctgtgatgtcatttctgtatttcaggaagactggcaggagatttatggaaaggtctcttacaaggactcttgaatacaagctcctgataacttcaagatcataccactggactaagaactttcaaaattttaatgaacaggctgataccttcatgaaattcaagacaaagaagaaaaatactcaatgttattggactaaataatcaaaaggataatgatttcataattttctatttgaaaatgtgctgattcttggaatgtttcattctccagatttatgaacattttttcttgagcaattggtaaagtatacttttgtaaacaaaaattgaaacatttccttttgctctctatctgagtgccccagaattgggaatctattcatgagtattcatatgtttatggtaataaagctatttgcacaagttca

SEQ ID NO: 406392 - DNA, 1559 bp, Homo sapiens
atgagcctgggaattgctgctgccccgggaagaggctcagggcagaaggaggaaggacagcacagctgacagccgtgctcaggaagtttctggatcctaggctcatctccacagaggagaacacacaggcagcagagaccatggggcccctctcagcccctccctgcacagagcacatcaaatggaaggggctcctggtcacagcatcacttttaaacttctggaacctgcccaccactgcccaagtcacgattgaagcccagccaccaaaagtttccgaggggaaggatgttcttctacttgtccacaatttgccccagaatcttactggctacatctggtacaaagggcaaatcagggacctctaccattacattacatcatatgtagtagacggtcaaataattatatatgggcctgcatatagtggacgagaaacagcatattccaatgcatccctgctgatccagaatgtcacccgggaggacgcaggatcctacaccttacacatcataaagcgaggtgatgggactagaggagtaactggatatttcaccttcaccttatacctggagactcccaagccctccatctccagcagcaacttaaaccccagggaggccatggaaactgtgatcttaacctgtgatcctgagactccggacacaagctaccagtggtggatgaatggtcagagcctccctatgactcatagaggaccctctttctatttggtgtcacaaagtatactgcaggaccctatgaatgtgaaatacggaactcagggagtgccagccgcagtgacccagtcaccctgaatctcctccatggtccagacctccccagaattcacccttcatacaccaattaccgttcaggagataacctctacttgtcttgcttcgcgaactctaacccaccggcacagtattcttggacaattaatgggaagtttcagcaatcaggacaaaatctgtttatcccccaaattactacaaagcatagcgggctctatgtttgctctgttcgtaactcagccactggcgaggaaagctccacatcgttgacagtcaaagtctctgcttctacaagaataggacttcttcctctccttaatccaacatagcagctgtgatgtcatttctgtatttcaggaagactggcaggagatttatggaaaggtctcttacaaggactcttgaatacaagctcctgataacttcaagatcataccactggactaagaactttcaaaattttaatgaacaggctgataccttcatgaaattcaagacaaagaagaaaaatactcaatgttattggactaaataatcaaaaggataatgatttcataattttctatttgaaaatgtgctgattcttggaatgtttcattctccagatttatgaacattttttcttgagcaattggtaaagtatacttttgtaaacaaaaattgaaacatttccttttgctctctatctgagtgccccagaattgggaatctattcatgagtattcatatgtttatggtaataaagctatttgcacaagttca

SEQ ID NO: 406393 - DNA, 949 bp, Homo sapiens
ttagccttcacctgtgaacctaagagtgagagctacacctacatttggtggctaaatggtcagagcctcccggtcagtcccagggtaaagcgacccattgaaaacaggatcctcattctacccagtgtcacgagaaatgaaacaggaccctatgaatgtgaaatacgggaccgatatggtggcatccacagtgacccagtcaccctgaatgtcctctatggtccagacctccccagaattcacccttcatacaccaattaccgttcaggagataacctctacttgtcttgcttcgcgaactctaacccaccggcacagtattcttggacaattaatgggaagtttcagcaatcaggacaaaatctgtttatcccccaaattactacaaagcatagcgggctctatgtttgctctgttcgtaactcagccactggcgaggaaagctccacatcgttgacagtcaaagtctctgcttctacaagaataggacttcttcctctccttaatccaacatagcagctgtgatgtcatttctgtatttcaggaagactggcaggagatttatggaaaggtctcttacaaggactcttgaatacaagctcctgataacttcaagatcataccactggactaagaactttcaaaattttaatgaacaggctgataccttcatgaaattcaagacaaagaagaaaaatactcaatgttattggactaaataatcaaaaggataatgatttcataattttctatttgaaaatgtgctgattcttggaatgtttcattctccagatttatgaacattttttcttgagcaattggtaaagtatacttttgtaaacaaaaattgaaacatttccttttgctctctatctgagtgccccagaattgggaatctattcatgagtattcatatgtttatggtaataaagctatttgcacaagttca

SEQ ID NO: 406394 - DNA, 990 bp, Homo sapiens
atgagcctgggaattgctgctgccccgggaagaggctcagggcagaaggaggaaggacagcacagctgacagccgtgctcaggaagtttctggatcctaggctcatctccacagaggagaacacacaggcagcagagaccatggggcccctctcagcccctccctgcacagagcacatcaaatggaaggggctcctggtcacagctactcaggaggctgcggcaggagaatcacgtgaacccaggaggcagaagttgcagcgtgccgagatagcgccactgcataccagcctgggcgacagtacgagactccgtctcaaaaaaaaaaaaaaaaaaaaaaaaaaaagagaaaaaagaaataaaaggaaagaaggctctgttggagcctggataggggaaaatataccagagagggacaggggtcaaaacaggaaagtcacattgaactggaattggtaagaggtaggaaaatcttaagtgttctgttttcctgattaatcatcaggggccacattttgaaaaatgataataataactatatcagatgacacttcaaataaaaatataagcaggacgtgaaacactgtcctcagcaaaaaacctcaacaattgggggagaaaaaaaaaacaccaagggtgtggagggccctgagaagtctcacatctacaggagtctgcagcctgttccaggcactggggtgcaaccaagatcacaaaagtccctgtcctcactgagctcatgctgtcatggggaggaagacagaggtcaaaacaggagaggcagagtggagagggcagaaagacaatctttgaagaccatcagccaactgccttaggaggcttaggagagtccataggaagtctaatgtccccagaagcagaaacagaagacagaagatgtacctggtagcagcttgtccacagggatctgatgtaacggtgttttctcatggaagcaaattaataataaatgctgtttgtgtgaaacctc

SEQ ID NO: 406395 - DNA, 563 bp, Homo sapiens
catcacttttaaacttctggaacctgcccaccactgcccaagtcacgattgaagcccagccaccaaaagtttccgaggggaaggatgttcttctacttgtccacaatttgccccagaatcttactggctacatctggtacaaagggcaaatcagggacctctaccattacattacatcatatgtagtagacggtcaaataattatatatgggcctgcatatagtggacgagaaacagcatattccaatgcatccctgctgatccagaatgtcacccgggaggacgcaggatcctacaccttacacatcataaagcgaggtgatgggactagaggagtaactggatatttcaccttcaccttataccgtaagtgattccacatgatccctgggtgttgggggacaggggtcatttctacttcacacacacaggattgtcaggcctagactgtgcctgtgtccctctctgcattatgtcccatgctggggtttgggcatttagtgcaggacacacacagaggagacacatttcaacagatcagaattcctttcccgcatccagac

SEQ ID NO: 406396 - DNA, 391 bp, Homo sapiens
ttttggactcggattgggcctgtgtcccagttgtgttatttttcagggaaaatcttccctttggattgagaaagcttacccagtgcctgtgccatcactgtaacttgaaagaaaagaattgtcttttacattcagggactcataggcagaagagattgcagccttgtcttggatgagacttgaacttactacatttgagttactgctggaatgagttaagacttttggaaacttttgaaaaggcatgtttgtatttttctgtgtgagaaggacatgagatgtcagcccccaaagaaatgggggtgcatgctgggcctggccccctggcccacccccactttccagggcaaaaagggcccagggttataataagtaaataacttgtctgtac

SEQ ID NO: 406397 - DNA, 853 bp, Homo sapiens
aactgactcgtccgcggccgctctaccccaacaggccgccaccagcgagagtgcggccataaccatcacgtgaccgcccaccgacaccagcgagagtgcagtcgtaaccgtcacgtgaccgcccaccgtcggcccggcgctcccctccgcccgaagctagcaagcggcgcggccaatgagaaaggcgcatgcctggcccccgccggcctgcagtctagccgtagtgcgcctgcgcgcggctaggaggggccgtcaggcggggatacagcctggaaggtgcgtgtggggctgggtctcggagtgggagacgtggagtgcaggtactgtgcgatctgggggcgcggcgcctcggctaccctcctcgtgttgtcttccacgctataatgcatggaatataatatatattatatggaatataatatatggaatataatatatataattatagcgttgtcttccacgctataatttatgtcgtcctcggtctctttatgtcaccattcctctccttctgtctcatcccacttaaatcctcacaactccttctgtcgccatcacccatgtcaccctcggccgggtgcggtggctcatgcctgtaatcccagcactttaggaggccaaggtgggcggatcacctgatgtcgggagttcgagaccagcctgatcaacatggagaaaccccgtctctactaaaaatacaaaattagccgggcgtggtggtgcatgcctataatcccagctactcgggaggctgaggcaggagaatggcttgaaccggggaggtggaggttgcagtgagccgagatcgcgccattgcactccagcctgggcaacaagagcgagactccgtctc

SEQ ID NO: 406398 - DNA, 1256 bp, Homo sapiens
aactgactcgtccgcggccgctctaccccaacaggccgccaccagcgagagtgcggccataaccatcacgtgaccgcccaccgacaccagcgagagtgcagtcgtaaccgtcacgtgaccgcccaccgtcggcccggcgctcccctccgcccgaagctagcaagcggcgcggccaatgagaaaggcgcatgcctggcccccgccggcctgcagtctagccgtagtgcgcctgcgcgcggctaggaggggccgtcaggcggggatacagcctggaaggtgcgtgtggggctgggtctcggagtgggagacgtggagtgcaggtaatgcatgtccatggtacacaaattcacaaggtttgtaaatgagaaaagacgtgaggttccttttgttctttacctgtggcctccctgccctacacggggactctagggtggaatgtagcaaagcccatccaccagccatgtactaccccccaacccggccaggctggagcgaccgtgtctggggagccgagccccgcttctcgctgcggtgagcccggactggggcacgcactgcgcagactccccgctgcagtgggcggagctcccacaggccccgccccctcctcccaccctcgttcagcctgtccagacagaagctggggcccagcggaggtagcagcagacgcctgagagcgaggccgaggcccctcagggtttggagaccctgacacacccaccttctcacctgggctctgcgtatcccccagccttgagggaagatgaagcctaaactgatgtaccaggagctgaaggtgcctgcagaggagcccgccaatgagctgcccatgaatgagattgaggcgtggaaggctgcggaaaagaaagcccgctgggtcctgctggtcctcattctggcggttgtgggcttcggagccctgatgactcagctgtttctatgggaatacggcgacttgcatctctttgggcccaaccagcgcccagccccctgctatgacccttgcgaagcagtgctggtggaaagcattcctgagggcctggacttccccaatgctccaggggaaccttcacccaacaaggcgggtgggctgcgcagggcgcaaggctggacatcgctctgtaatgaacacccaaatgaccacacgagagcctgcggcggacgaggcccgcaagacaccgagacagggcgagacgaggccagagactcgcacagaaggggaagcgtagcccacacggcgaaaacgcgccaggcgc

SEQ ID NO: 406399 - DNA, 790 bp, Homo sapiens
ggcgcgctgggagccccatggaggttctagggtcctgagaatacaggcattgagacgggctgaggaggaactccagcatccggctgcccgtgcccaccttcagtttcaccctaccctgctcccacaaggatctgagcagggagggggcctgatttccttctcccgctgagaccacagtcctctggaggctaggatctggtgatggggcaccctagctaggagcctgagcctctttataatttagtttccatagaagttatatgtgcatttaaaaaaattcaatgtaagtaaagacctacaatgaaaagcaaccgtcttgtctctgggggtgggatgggggatgcctttgcgtggggagctgttaggagacttgacagtcacctttgctgagagcctcctgcatgtcaggggctcttctatgcacattatatgtgtgctaattccttttttaaaactttactttttgtggagatgagtcctgctgtgttgtgtaggctggtcttgaactcctggcctcacgcaatccacccccaaccttagcctcccggagtgcagggattacaggtgtgagccacctttcccagcctgttgactcctttaattcagaggagtcagtcagattttagacatctcaaatgttgtatgttcaaaaccaaactcctggtcttttccccaaacttgtgtctccctgtcttgcccaatcagctgttgacacctccaatccttgcagttgctgcggccaaaactcagtcatccctcactcctttactgctctcaaacccacatccag

SEQ ID NO: 406400 - DNA, 2438 bp, Homo sapiens
aactgactcgtccgcggccgctctaccccaacaggccgccaccagcgagagtgcggccataaccatcacgtgaccgcccaccgacaccagcgagagtgcagtcgtaaccgtcacgtgaccgcccaccgtcggcccggcgctcccctccgcccgaagctagcaagcggcgcggccaatgagaaaggcgcatgcctggcccccgccggcctgcagtctagccgtagtgcgcctgcgcgcggctaggaggggccgtcaggcggggatacagcctggaaggtgcgtgtggggctgggtctcggagtgggagacgtggagtgcagggtggaatgtagcaaagcccatccaccagccatgtactaccccccaacccggccaggctggagcgaccgtgtctggggagccgagccccgcttctcgctgcggtgagcccggactggggcacgcactgcgcagactccccgctgcagtgggcggagctcccacaggccccgccccctcctcccaccctcgttcagcctgtccagacagaagctggggcccagcggaggtagcagcagacgcctgagagcgaggccgaggcccctcagggtttggagaccctgacacacccaccttctcacctgggctctgcgtatcccccagccttgagggaagatgaagcctaaactgatgtaccaggagctgaaggtgcctgcagaggagcccgccaatgagctgcccatgaatgagattgaggcgtggaaggctgcggaaaagaaagcccgctgggtcctgctggtcctcattctggcggttgtgggcttcggagccctgatgactcagctgtttctatgggaatacggcgacttgcatctctttgggcccaaccagcgcccagccccctgctatgacccttgcgaagcagtgctggtggaaagcattcctgagggcctggacttccccaatgcctccacggggaacccttccaccagccaggcctggctgggcctgctcgccggtgcgcacagcagcctggacatcgcctccttctactggaccctcaccaacaatgacacccacacgcaggagccctctgcccagcagggtgaggaggtcctccggcagctgcagaccctggcaccaaagggcgtgaacgtccgcatcgctgtgagcaagcccagcgggccccagccacaggcggacctgcaggctctgctgcagagcggtgcccaggtccgcatggtggacatgcagaagctgacccatggcgtcctgcataccaagttctgggtggtggaccagacccacttctacctgggcagtgccaacatggactggcgttcactgacccaggtcaaggagctgggcgtggtcatgtacaactgcagctgcctggctcgagacctgaccaagatctttgaggcctactggttcctgggccaggcaggcagctccatcccatcaacttggccccggttctatgacacccgctacaaccaagagacaccaatggagatctgcctcaatggaacccctgctctggcctacctggcgagtgcgcccccacccctgtgtccaagtggccgcactccagacctgaaggctctactcaacgtggtggacaatgcccggagtttcatctacgtcgctgtcatgaactacctgcccactctggagttctcccaccctcacaggttctggcctgccattgacgatgggctgcggcgggccacctacgagcgtggcgtcaaggtgcgcctgctcatcagctgctggggacactcggagccatccatgcgggccttcctgctctctctggctgccctgcgtgacaaccatacccactctgacatccaggtgaaactctttgtggtccccgcggatgaggcccaggctcgaatcccatatgcccgtgtcaaccacaacaagtacatggtgactgaacgcgccacctacatcggaacctccaactggtctggcaactacttcacggagacggcgggcacctcgctgctggtgacgcagaatgggaggggcggcctgcggagccagctggaggccattttcctgagggactgggactccccttacagccatgaccttgacacctcagctgacagcgtgggcaacgcctgccgcctgctctgaggcccgatccagtgggcaggccaaggcctgctgggcccccgcggacccaggtgctctgggtcacggtccctgtccccgcacccccgcttctgtctgccccattgtggctcctcaggctctctcccctgctctcccacctctacctccacccccaccggcctgacgctgtggccccgggacccagcagagctgggggagggatcagcccccaaagaaatgggggtgcatgctgggcctggccccctggcccacccccactttccagggcaaaaagggcccagggttataataagtaaataacttgtctgtac

SEQ ID NO: 406401 - DNA, 1970 bp, Homo sapiens
  misc_feature (36)..(36): n is a, c, g, or t
cccacgcgtcgcggacgcgtgggtcgacccacgcgntcctcgttcagcctgtccagacagaagctggggcccagcggaggtagcagcagacgcctgagagcgaggccgaggcccctcagggtttggagaccctgacacacccaccttctcacctgggctctgcgtatcccccagccttgagggaagatgaagcctaaactgatgtaccaggagctgaaggtgcctgcagaggagcccgccaatgagctgcccatgaatgagattgaggcgtggaaggctgcggaaaagaaagcccgctgggtcctgctggtcctcattctggcggttgtgggcttcggagccctgatgactcagctgtttctatgggaatacggcgacttgcatctctttgggcccaaccagcgcccagccccctgctatgacccttgcgaagcagtgctggtggaaagcattcctgagggcctggacttccccaatgcctccacggggaacccttccaccagccaggcctggctgggcctgctcgccggtgcgcacagcagcctggacatcgcctccttctactggaccctcaccaacaatgacacccacacgcaggagccctctgcccagcagggtgaggaggtcctccggcagctgcagaccctggcaccaaagggcgtgaacgtccgcatcgctgtgagcaagcccagcgggccccagccacaggcggacctgcaggctctgctgcagagcggtgcccaggtccgcatggtggacatgcagaagctgacccatggcgtcctgcataccaagttctgggtggtggaccagacccacttctacctgggcagtgccaacatggactggcgttcactgacccaggtcaaggagctgggcgtggtcatgtacaactgcagctgcctggctcgagacctgaccaagatctttgaggcctactggttcctgggccaggcaggcagctccatcccatcaacttggccccggttctatgacacccgctacaaccaagagacaccaatggagatctgcctcaatggaacccctgctctggcctacctggcgagtgcgcccccacccctgtgtccaagtggccgcactccagacctgaaggctctactcaacgtggtggacaatgcccggagtttcatctacgtcgctgtcatgaactacctgcccactctggagttctcccaccctcacaggttctggcctgccattgacgatgggctgcggcgggccacctacgagcgtggcgtcaaggtgcgcctgctcatcagctgctggggacactcggagccatccatgcgggccttcctgctctctctggctgccctgcgtgacaaccatacccactctgacatccaggtgaaactctttgtggtccccgcggatgaggcccaggctcgaatcccatatgcccgtgtcaaccacaacaagtacatggtgactgaacgcgccacctacatcggaacctccaactggtctggcaactacttcacggagacggcgggcacctcgctgctggtgacgcagaatgggaggggcggcctgcggagccagctggaggccattttcctgagggactgggactccccttacagccatgaccttgacacctcagctgacagcgtgggcaacgcctgccgcctgctctgaggcccgatccagtgggcaggccaaggcctgctgggcccccgcggacccaggtgctctgggtcacggtccctgtccccgcacccccgcttctgtctgccccattgtggctcctcaggctctctcccctgctctcccacctctacctccacccccaccggcctgacgctgtggccccgggacccagcagagctgggggagggatcagcccccaaagaaatgggggtgcatgctgggcctggccccctggcccacccccactttccagggcaaaaagggcccagggttataataagtaaataacttgtctgtac

SEQ ID NO: 406402 - DNA, 2473 bp, Homo sapiens
aactgactcgtccgcggccgctctaccccaacaggccgccaccagcgagagtgcggccataaccatcacgtgaccgcccaccgacaccagcgagagtgcagtcgtaaccgtcacgtgaccgcccaccgtcggcccggcgctcccctccgcccgaagctagcaagcggcgcggccaatgagaaaggcgcatgcctggcccccgccggcctgcagtctagccgtagtgcgcctgcgcgcggctaggaggggccgtcaggcggggatacagcctggaaggtgcgtgtggggctgggtctcggagtgggagacgtggagtgcagggtggaatgtagcaaagcccatccaccagccatgtactaccccccaacccggccaggctggagcgaccgtgtctggggagccgagccccgcttctcgctgcggtgagcccggactggggcacgcactgcgcagactccccgctgcagtgggcggagctcccacaggccccgccccctcctcccaccctcgttcagcctgtccagacagaagctggggcccagcggaggtagcagcagacgcctgagagcgaggccgaggcccctcagggaacaccccacacagtgcccacttttgttctgccagtttggagaccctgacacacccaccttctcacctgggctctgcgtatcccccagccttgagggaagatgaagcctaaactgatgtaccaggagctgaaggtgcctgcagaggagcccgccaatgagctgcccatgaatgagattgaggcgtggaaggctgcggaaaagaaagcccgctgggtcctgctggtcctcattctggcggttgtgggcttcggagccctgatgactcagctgtttctatgggaatacggcgacttgcatctctttgggcccaaccagcgcccagccccctgctatgacccttgcgaagcagtgctggtggaaagcattcctgagggcctggacttccccaatgcctccacggggaacccttccaccagccaggcctggctgggcctgctcgccggtgcgcacagcagcctggacatcgcctccttctactggaccctcaccaacaatgacacccacacgcaggagccctctgcccagcagggtgaggaggtcctccggcagctgcagaccctggcaccaaagggcgtgaacgtccgcatcgctgtgagcaagcccagcgggccccagccacaggcggacctgcaggctctgctgcagagcggtgcccaggtccgcatggtggacatgcagaagctgacccatggcgtcctgcataccaagttctgggtggtggaccagacccacttctacctgggcagtgccaacatggactggcgttcactgacccaggtcaaggagctgggcgtggtcatgtacaactgcagctgcctggctcgagacctgaccaagatctttgaggcctactggttcctgggccaggcaggcagctccatcccatcaacttggccccggttctatgacacccgctacaaccaagagacaccaatggagatctgcctcaatggaacccctgctctggcctacctggcgagtgcgcccccacccctgtgtccaagtggccgcactccagacctgaaggctctactcaacgtggtggacaatgcccggagtttcatctacgtcgctgtcatgaactacctgcccactctggagttctcccaccctcacaggttctggcctgccattgacgatgggctgcggcgggccacctacgagcgtggcgtcaaggtgcgcctgctcatcagctgctggggacactcggagccatccatgcgggccttcctgctctctctggctgccctgcgtgacaaccatacccactctgacatccaggtgaaactctttgtggtccccgcggatgaggcccaggctcgaatcccatatgcccgtgtcaaccacaacaagtacatggtgactgaacgcgccacctacatcggaacctccaactggtctggcaactacttcacggagacggcgggcacctcgctgctggtgacgcagaatgggaggggcggcctgcggagccagctggaggccattttcctgagggactgggactccccttacagccatgaccttgacacctcagctgacagcgtgggcaacgcctgccgcctgctctgaggcccgatccagtgggcaggccaaggcctgctgggcccccgcggacccaggtgctctgggtcacggtccctgtccccgcacccccgcttctgtctgccccattgtggctcctcaggctctctcccctgctctcccacctctacctccacccccaccggcctgacgctgtggccccgggacccagcagagctgggggagggatcagcccccaaagaaatgggggtgcatgctgggcctggccccctggcccacccccactttccagggcaaaaagggcccagggttataataagtaaataacttgtctgtac

SEQ ID NO: 406403 - DNA, 1948 bp, Homo sapiens
  misc_feature (36)..(36): n is a, c, g, or t
cccacgcgtcgcggacgcgtgggtcgacccacgcgntcggtcaggcggggatacagcctggaagaacaccccacacagtgcccacttttgttctgccagtttggagaccctgacacacccaccttctcacctgggctctgcgtatcccccagccttgagggaagatgaagcctaaactgatgtaccaggagctgaaggtgcctgcagaggagcccgccaatgagctgcccatgaatgagattgaggcgtggaaggctgcggaaaagaaagcccgctgggtcctgctggtcctcattctggcggttgtgggcttcggagccctgatgactcagctgtttctatgggaatacggcgacttgcatctctttgggcccaaccagcgcccagccccctgctatgacccttgcgaagcagtgctggtggaaagcattcctgagggcctggacttccccaatgcctccacggggaacccttccaccagccaggcctggctgggcctgctcgccggtgcgcacagcagcctggacatcgcctccttctactggaccctcaccaacaatgacacccacacgcaggagccctctgcccagcagggtgaggaggtcctccggcagctgcagaccctggcaccaaagggcgtgaacgtccgcatcgctgtgagcaagcccagcgggccccagccacaggcggacctgcaggctctgctgcagagcggtgcccaggtccgcatggtggacatgcagaagctgacccatggcgtcctgcataccaagttctgggtggtggaccagacccacttctacctgggcagtgccaacatggactggcgttcactgacccaggtcaaggagctgggcgtggtcatgtacaactgcagctgcctggctcgagacctgaccaagatctttgaggcctactggttcctgggccaggcaggcagctccatcccatcaacttggccccggttctatgacacccgctacaaccaagagacaccaatggagatctgcctcaatggaacccctgctctggcctacctggcgagtgcgcccccacccctgtgtccaagtggccgcactccagacctgaaggctctactcaacgtggtggacaatgcccggagtttcatctacgtcgctgtcatgaactacctgcccactctggagttctcccaccctcacaggttctggcctgccattgacgatgggctgcggcgggccacctacgagcgtggcgtcaaggtgcgcctgctcatcagctgctggggacactcggagccatccatgcgggccttcctgctctctctggctgccctgcgtgacaaccatacccactctgacatccaggtgaaactctttgtggtccccgcggatgaggcccaggctcgaatcccatatgcccgtgtcaaccacaacaagtacatggtgactgaacgcgccacctacatcggaacctccaactggtctggcaactacttcacggagacggcgggcacctcgctgctggtgacgcagaatgggaggggcggcctgcggagccagctggaggccattttcctgagggactgggactccccttacagccatgaccttgacacctcagctgacagcgtgggcaacgcctgccgcctgctctgaggcccgatccagtgggcaggccaaggcctgctgggcccccgcggacccaggtgctctgggtcacggtccctgtccccgcacccccgcttctgtctgccccattgtggctcctcaggctctctcccctgctctcccacctctacctccacccccaccggcctgacgctgtggccccgggacccagcagagctgggggagggatcagcccccaaagaaatgggggtgcatgctgggcctggccccctggcccacccccactttccagggcaaaaagggcccagggttataataagtaaataacttgtctgtac

SEQ ID NO: 406404 - DNA, 1631 bp, Homo sapiens
cccgtaagcctggtctgggtccagcaggacccagcggagctttcttttccgcagccttccacgcctcaatctccctgctatgacccttgcgaagcagtgctggtggaaagcattcctgagggcctggacttccccaatgcctccacggggaacccttccaccagccaggcctggctgggcctgctcgccggtgcgcacagcagcctggacatcgcctccttctactggaccctcaccaacaatgacacccacacgcaggagccctctgcccagcagggtgaggaggtcctccggcagctgcagaccctggcaccaaagggcgtgaacgtccgcatcgctgtgagcaagcccagcgggccccagccacaggcggacctgcaggctctgctgcagagcggtgcccaggtccgcatggtggacatgcagaagctgacccatggcgtcctgcataccaagttctgggtggtggaccagacccacttctacctgggcagtgccaacatggactggcgttcactgacccaggtcaaggagctgggcgtggtcatgtacaactgcagctgcctggctcgagacctgaccaagatctttgaggcctactggttcctgggccaggcaggcagctccatcccatcaacttggccccggttctatgacacccgctacaaccaagagacaccaatggagatctgcctcaatggaacccctgctctggcctacctggcgagtgcgcccccacccctgtgtccaagtggccgcactccagacctgaaggctctactcaacgtggtggacaatgcccggagtttcatctacgtcgctgtcatgaactacctgcccactctggagttctcccaccctcacaggttctggcctgccattgacgatgggctgcggcgggccacctacgagcgtggcgtcaaggtgcgcctgctcatcagctgctggggacactcggagccatccatgcgggccttcctgctctctctggctgccctgcgtgacaaccatacccactctgacatccaggtgaaactctttgtggtccccgcggatgaggcccaggctcgaatcccatatgcccgtgtcaaccacaacaagtacatggtgactgaacgcgccacctacatcggaacctccaactggtctggcaactacttcacggagacggcgggcacctcgctgctggtgacgcagaatgggaggggcggcctgcggagccagctggaggccattttcctgagggactgggactccccttacagccatgaccttgacacctcagctgacagcgtgggcaacgcctgccgcctgctctgaggcccgatccagtgggcaggccaaggcctgctgggcccccgcggacccaggtgctctgggtcacggtccctgtccccgcacccccgcttctgtctgccccattgtggctcctcaggctctctcccctgctctcccacctctacctccacccccaccggcctgacgctgtggccccgggacccagcagagctgggggagggatcagcccccaaagaaatgggggtgcatgctgggcctggccccctggcccacccccactttccagggcaaaaagggcccagggttataataagtaaataacttgtctgtac

SEQ ID NO: 406405 - DNA, 2618 bp, Homo sapiens
aactgactcgtccgcggccgctctaccccaacaggccgccaccagcgagagtgcggccataaccatcacgtgaccgcccaccgacaccagcgagagtgcagtcgtaaccgtcacgtgaccgcccaccgtcggcccggcgctcccctccgcccgaagctagcaagcggcgcggccaatgagaaaggcgcatgcctggcccccgccggcctgcagtctagccgtagtgcgcctgcgcgcggctaggaggggccgtcaggcggggatacagcctggaaggtgcgtgtggggctgggtctcggagtgggagacgtggagtgcaggtaatgcatgtccatggtacacaaattcacaaggtttgtaaatgagaaaagacgtgaggttccttttgttctttacctgtggcctccctgccctacacggggactctagggtggaatgtagcaaagcccatccaccagccatgtactaccccccaacccggccaggctggagcgaccgtgtctggggagccgagccccgcttctcgctgcggtgagcccggactggggcacgcactgcgcagactccccgctgcagtgggcggagctcccacaggccccgccccctcctcccaccctcgttcagcctgtccagacagaagctggggcccagcggaggtagcagcagacgcctgagagcgaggccgaggcccctcagggtttggagaccctgacacacccaccttctcacctgggctctgcgtatcccccagccttgagggaagatgaagcctaaactgatgtaccaggagctgaaggtgcctgcagaggagcccgccaatgagctgcccatgaatgagattgaggcgtggaaggctgcggaaaagaaagcccgctgggtcctgctggtcctcattctggcggttgtgggcttcggagccctgatgactcagctgtttctatgggaatacggcgacttgcatctctttgggcccaaccagcgcccagccccctgctatgacccttgcgaagcagtgctggtggaaagcattcctgagggcctggacttccccaatgcctccacggggaacccttccaccagccaggcctggctgggcctgctcgccggtgcgcacagcagcctggacatcgcctccttctactggaccctcaccaacaatgacacccacacgcaggagccctctgcccagcagggtgaggaggtcctccggcagctgcagaccctggcaccaaagggcgtgaacgtccgcatcgctgtgagcaagcccagcgggccccagccacaggcggacctgcaggctctgctgcagagcgctggggctggggctggtctgggcctgggggtacccagcctggcccctgatctctgcccctgctggtcacaggtgcccaggtccgcatggtggacatgcagaagctgacccatggcgtcctgcataccaagttctgggtggtggaccagacccacttctacctgggcagtgccaacatggactggcgttcactgacccaggtcaaggagctgggcgtggtcatgtacaactgcagctgcctggctcgagacctgaccaagatctttgaggcctactggttcctgggccaggcaggcagctccatcccatcaacttggccccggttctatgacacccgctacaaccaagagacaccaatggagatctgcctcaatggaacccctgctctggcctacctggcgagtgcgcccccacccctgtgtccaagtggccgcactccagacctgaaggctctactcaacgtggtggacaatgcccggagtttcatctacgtcgctgtcatgaactacctgcccactctggagttctcccaccctcacaggttctggcctgccattgacgatgggctgcggcgggccacctacgagcgtggcgtcaaggtgcgcctgctcatcagctgctggggacactcggagccatccatgcgggccttcctgctctctctggctgccctgcgtgacaaccatacccactctgacatccaggtgaaactctttgtggtccccgcggatgaggcccaggctcgaatcccatatgcccgtgtcaaccacaacaagtacatggtgactgaacgcgccacctacatcggaacctccaactggtctggcaactacttcacggagacggcgggcacctcgctgctggtgacgcagaatgggaggggcggcctgcggagccagctggaggccattttcctgagggactgggactccccttacagccatgaccttgacacctcagctgacagcgtgggcaacgcctgccgcctgctctgaggcccgatccagtgggcaggccaaggcctgctgggcccccgcggacccaggtgctctgggtcacggtccctgtccccgcacccccgcttctgtctgccccattgtggctcctcaggctctctcccctgctctcccacctctacctccacccccaccggcctgacgctgtggccccgggacccagcagagctgggggagggatcagcccccaaagaaatgggggtgcatgctgggcctggccccctggcccacccccactttccagggcaaaaagggcccagggttataataagtaaataacttgtctgtac

SEQ ID NO: 406406 - DNA, 2399 bp, Homo sapiens
aactgactcgtccgcggccgctctaccccaacaggccgccaccagcgagagtgcggccataaccatcacgtgaccgcccaccgacaccagcgagagtgcagtcgtaaccgtcacgtgaccgcccaccgtcggcccggcgctcccctccgcccgaagctagcaagcggcgcggccaatgagaaaggcgcatgcctggcccccgccggcctgcagtctagccgtagtgcgcctgcgcgcggctaggaggggccgtcaggcggggatacagcctggaaggtgcgtgtggggctgggtctcggagtgggagacgtggagtgcagggtggaatgtagcaaagcccatccaccagccatgtactaccccccaacccggccaggctggagcgaccgtgtctggggagccgagccccgcttctcgctgcggtgagcccggactggggcacgcactgcgcagactccccgctgcagtgggcggagctcccacaggccccgccccctcctcccaccctcgttcagcctgtccagacagaagctggggcccagcggaggtagcagcagacgcctgagagcgaggccgaggcccctcagggtttggagaccctgacacacccaccttctcacctgggctctgcgtatcccccagccttgagggaagatgaagcctaaactgatgtaccaggagctgaaggtgcctgcagaggagcccgccaatgagctgcccatgaatgagattgaggcgtggaaggctgcggaaaagaaagcccgctgggtcctgctggtcctcattctggcggttgtgggcttcggagccctgatgactcagctgtttctatgggaatacggcgacttgcatctctttgggcccaaccagcgcccagccccctgctatgacccttgcgaagcagtgctggtggaaagcattcctgagggcctggacttccccaatgcctccacggggaacccttccaccagccaggcctggctgggcctgctcgccggtgcgcacagcagcctggacatcgcctccttctactggaccctcaccaacaatgacacccacacgcaggagccctctgcccagcagggtgaggaggtcctccggcagctgcagaccctggcaccaaagggcgtgaacgtccgcatcgctgtgagcaagcccagcgggccccagccacaggcggacctgcaggctctgctgcagagcggtgcccaggtccgcatggtggacatgcagaagctgacccatggcgtcctgcataccaagttctgggtggtggaccagacccacttctacctgggcagtgccaacatggactggcgttcactgacccaggtcaaggagctgggcgtggtcatgtacaactgcagctgcctggctcgagacctgaccaagatctttgaggcctactggttcctgggccaggcaggcagctccatcccatcaacttggccccggttctatgacacccgctacaaccaagagacaccaatggagatctgcctcaatggaacccctgctctggcctacctggcgagtgcgcccccacccctgtgtccaagtggccgcactccagacctgaaggctctactcaacgtggtggacaatgcccggagtttcatctacgtcgctgtcatgaactacctgcccactctggagttctcccaccctcacagctacgagcgtggcgtcaaggtgcgcctgctcatcagctgctggggacactcggagccatccatgcgggccttcctgctctctctggctgccctgcgtgacaaccatacccactctgacatccaggtgaaactctttgtggtccccgcggatgaggcccaggctcgaatcccatatgcccgtgtcaaccacaacaagtacatggtgactgaacgcgccacctacatcggaacctccaactggtctggcaactacttcacggagacggcgggcacctcgctgctggtgacgcagaatgggaggggcggcctgcggagccagctggaggccattttcctgagggactgggactccccttacagccatgaccttgacacctcagctgacagcgtgggcaacgcctgccgcctgctctgaggcccgatccagtgggcaggccaaggcctgctgggcccccgcggacccaggtgctctgggtcacggtccctgtccccgcacccccgcttctgtctgccccattgtggctcctcaggctctctcccctgctctcccacctctacctccacccccaccggcctgacgctgtggccccgggacccagcagagctgggggagggatcagcccccaaagaaatgggggtgcatgctgggcctggccccctggcccacccccactttccagggcaaaaagggcccagggttataataagtaaataacttgtctgtac

SEQ ID NO: 406407 - DNA, 2955 bp, Homo sapiens
  misc_feature (2644)..(2644): n is a, c, g, or t
aactgactcgtccgcggccgctctaccccaacaggccgccaccagcgagagtgcggccataaccatcacgtgaccgcccaccgacaccagcgagagtgcagtcgtaaccgtcacgtgaccgcccaccgtcggcccggcgctcccctccgcccgaagctagcaagcggcgcggccaatgagaaaggcgcatgcctggcccccgccggcctgcagtctagccgtagtgcgcctgcgcgcggctaggaggggccgtcaggcggggatacagcctggaaggtgcgtgtggggctgggtctcggagtgggagacgtggagtgcagggtggaatgtagcaaagcccatccaccagccatgtactaccccccaacccggccaggctggagcgaccgtgtctggggagccgagccccgcttctcgctgcggtgagcccggactggggcacgcactgcgcagactccccgctgcagtgggcggagctcccacaggccccgccccctcctcccaccctcgttcagcctgtccagacagaagctggggcccagcggaggtagcagcagacgcctgagagcgaggccgaggcccctcagggtttggagaccctgacacacccaccttctcacctgggctctgcgtatcccccagccttgagggaagatgaagcctaaactgatgtaccaggagctgaaggtgcctgcagaggagcccgccaatgagctgcccatgaatgagattgaggcgtggaaggctgcggaaaagaaagcccgctgggtcctgctggtcctcattctggcggttgtgggcttcggagccctgatgactcagctgtttctatgggaatacggcgacttgcatctctttgggcccaaccagcgcccagccccctgctatgacccttgcgaagcagtgctggtggaaagcattcctgagggcctggacttccccaatgcctccacggggaacccttccaccagccaggcctggctgggcctgctcgccggtgcgcacagcagcctggacatcgcctccttctactggaccctcaccaacaatgacacccacacgcaggagccctctgcccagcagggtgaggaggtcctccggcagctgcagaccctggcaccaaagggcgtgaacgtccgcatcgctgtgagcaagcccagcgggccccagccacaggcggacctgcaggctctgctgcagagcggtgcccaggtccgcatggtggacatgcagaagctgacccatggcgtcctgcataccaagttctgggtggtggaccagacccacttctacctgggcagtgccaacatggactggcgttcactgacccaggtcaaggagctgggcgtggtcatgtacaactgcagctgcctggctcgagacctgaccaagatctttgaggcctactggttcctgggccaggcaggcagctccatcccatcaacttggccccggttctatgacacccgctacaaccaagagacaccaatggagatctgcctcaatggaacccctgctctggcctacctggcgagtgcgcccccacccctgtgtccaagtggccgcactccagacctgaaggctctactcaacgtggtggacaatgcccggagtttcatctacgtcgctgtcatgaactacctgcccactctggagttctcccaccctcacaggttctggcctgccattgacgatgggctgcggcgggccacctacgagcgtggcgtcaaggtgcgcctgctcatcagctgctggggacactcggagccatccatgcgggccttcctgctctctctggctgccctgcgtgacaaccatacccactctgacatccaggtgaaactctttgtggtccccgcggatgaggcccaggctcgaatcccatatgcccgtgtcaaccacaacaagtacatggtgactgaacgcgccacctacatcggaacctccaactggtctggcaactacttcacggagacggcgggcacctcgctgctggtgacgcagaatgggaggggcggcctgcggagccagctggaggccattttcctgagggactgggactccccttacagccatgaccttgacacctcagctgacagcgtgggcaacgcctgccgcctgctctgaggcccgatccagtgggcaggccaaggcctgctgggcccccgcggacccaggtgctctgggtcacggtccctgtccccgcacccccgcttctgtctgccccattgtggctcctcaggctctctcccctgctctcccacctctacctccacccccaccggcctgacgctgtggccccgggacccagcagagctgggggagggatcagcccccaaagaaatgggggtgcatgctgggcctggccccctggcccacccccactttccagggcaaaaagggcccagggttataataagtaaataacttgtctgtacaaaaaaaaaagaaagaaaaaaagaaaaaaaaaaaaaaaaaaaaaaaaaaaaaaaaaaaaaaagaaaaaaaaaggaggggcggcggacgaaatagatgatctacctcaaaccatgggcgcgcggaacacagacaaaagagaccagtctcacgcagatagtatatgttgatgacaacagagcggaagtctgcacactctagtatgtgngttgattgtatatatatattatacagtaaagaaagagacgaggacgacgagtcgcgattattttaaacagacaaaggatgatttggatgtaggagatacagacgatgatcagacatgaatgcgaatcacttctatcgatcggtgtagacgatagaaccaccacatttactctagatgagataggaggtagcaaagagacataactttagtgaaaggatacagaaaacgaaaatacgtctagcatagaagaaagatatgtatatactatgatagctagacgaatcatgcgatgagatacagtatatacataa

SEQ ID NO: 406408 - DNA, 2368 bp, Homo sapiens
aactgactcgtccgcggccgctctaccccaacaggccgccaccagcgagagtgcggccataaccatcacgtgaccgcccaccgacaccagcgagagtgcagtcgtaaccgtcacgtgaccgcccaccgtcggcccggcgctcccctccgcccgaagctagcaagcggcgcggccaatgagaaaggcgcatgcctggcccccgccggcctgcagtctagccgtagtgcgcctgcgcgcggctaggaggggccgtcaggcggggatacagcctggaaggtgcgtgtggggctgggtctcggagtgggagacgtggagtgcagggtggaatgtagcaaagcccatccaccagccatgtactaccccccaacccggccaggctggagcgaccgtgtctggggagccgagccccgcttctcgctgcggtgagcccggactggggcacgcactgcgcagactccccgctgcagtgggcggagctcccacaggccccgccccctcctcccaccctcgttcagcctgtccagacagaagctggggcccagcggaggtagcagcagacgcctgagagcgaggccgaggcccctcagggtttggagaccctgacacacccaccttctcacctgggctctgcgtatcccccagccttgagggaagatgaagcctaaactgatgtaccaggagctgaaggtgcctgcagaggagcccgccaatgagctgcccatgaatgagattgaggcgtggaaggctgcggaaaagaaagcccgctgggtcctgctggtcctcattctggcggttgtgggcttcggagccctgatgactcagctgtttctatgggaatacggcgacttgcatctctttgggcccaaccagcgcccagccccctgctatgacccttgcgaagcagtgctggtggaaagcattcctgagggcctggacttccccaatgcctccacggggaacccttccaccagccaggcctggctgggcctgctcgccggtgcgcacagcagcctggacatcgcctccttctactggaccctcaccaacaatgacacccacacgcaggagccctctgcccagcagggtgaggaggtcctccggcagctgcagaccctggcaccaaagggcgtgaacgtgcccaggtccgcatggtggacatgcagaagctgacccatggcgtcctgcataccaagttctgggtggtggaccagacccacttctacctgggcagtgccaacatggactggcgttcactgacccaggtcaaggagctgggcgtggtcatgtacaactgcagctgcctggctcgagacctgaccaagatctttgaggcctactggttcctgggccaggcaggcagctccatcccatcaacttggccccggttctatgacacccgctacaaccaagagacaccaatggagatctgcctcaatggaacccctgctctggcctacctggcgagtgcgcccccacccctgtgtccaagtggccgcactccagacctgaaggctctactcaacgtggtggacaatgcccggagtttcatctacgtcgctgtcatgaactacctgcccactctggagttctcccaccctcacaggttctggcctgccattgacgatgggctgcggcgggccacctacgagcgtggcgtcaaggtgcgcctgctcatcagctgctggggacactcggagccatccatgcgggccttcctgctctctctggctgccctgcgtgacaaccatacccactctgacatccaggtgaaactctttgtggtccccgcggatgaggcccaggctcgaatcccatatgcccgtgtcaaccacaacaagtacatggtgactgaacgcgccacctacatcggaacctccaactggtctggcaactacttcacggagacggcgggcacctcgctgctggtgacgcagaatgggaggggcggcctgcggagccagctggaggccattttcctgagggactgggactccccttacagccatgaccttgacacctcagctgacagcgtgggcaacgcctgccgcctgctctgaggcccgatccagtgggcaggccaaggcctgctgggcccccgcggacccaggtgctctgggtcacggtccctgtccccgcacccccgcttctgtctgccccattgtggctcctcaggctctctcccctgctctcccacctctacctccacccccaccggcctgacgctgtggccccgggacccagcagagctgggggagggatcagcccccaaagaaatgggggtgcatgctgggcctggccccctggcccacccccactttccagggcaaaaagggcccagggttataataagtaaataacttgtctgtac

SEQ ID NO: 406409 - DNA, 2240 bp, Homo sapiens
aactgactcgtccgcggccgctctaccccaacaggccgccaccagcgagagtgcggccataaccatcacgtgaccgcccaccgacaccagcgagagtgcagtcgtaaccgtcacgtgaccgcccaccgtcggcccggcgctcccctccgcccgaagctagcaagcggcgcggccaatgagaaaggcgcatgcctggcccccgccggcctgcagtctagccgtagtgcgcctgcgcgcggctaggaggggccgtcaggcggggatacagcctggaaggtgcgtgtggggctgggtctcggagtgggagacgtggagtgcagggtggaatgtagcaaagcccatccaccagccatgtactaccccccaacccggccaggctggagcgaccgtgtctggggagccgagccccgcttctcgctgcggtgagcccggactggggcacgcactgcgcagactccccgctgcagtgggcggagctcccacaggccccgccccctcctcccaccctcgttcagcctgtccagacagaagctggggcccagcggaggtagcagcagacgcctgagagcgaggccgaggcccctcagggtttggagaccctgacacacccaccttctcacctgggctctgcgtatcccccagccttgagggaagatgaagcctaaactgatgtaccaggagctgaaggtgcctgcagaggagcccgccaatgagctgcccatgaatgagattgaggcgtggaaggctgcggaaaagaaagcccgctgggtcctgctggtcctcattctggcggttgtgggcttcggagccctgatgactcagctgtttctatgggaatacggcgacttgcatctctttgggcccaaccagcgcccagccccctgctatgacccttgcgaagcagtgctggtggaaagcattcctgagggcctggacttccccaatgcctccacggggaacccttccaccagccaggcctggctgggcctgctcgccggtgcgcacagcagcctggacatcgcctccttctactggaccctcaccaacaatgacacccacacgcaggagccctctgcccagcagggtgaggaggtcctccggcagctgcagaccctggcaccaaagggcgtgaacgtccgcatcgctgtgagcaagcccagcgggccccagccacaggcggacctgcaggctctgctgcagagcggtgcccaggtccgcatggtggacatgcagaagctgacccatggcgtcctgcataccaagttctgggtggtggaccagacccacttctacctgggcagtgccaacatggactggcgttcactgacccaggtcaaggagctgggcgtggtcatgtacaactgcagctgcctggctcgagacctgaccaagatctttgaggcctactggttcctgggccaggcaggcagctccatcccatcaacttggccccggttctatgacacccgctacaaccaagagacaccaatggagatctgcctcaatggaacccctgctctggcctacctggcgagtgcgcccccacccctgtgtccaagtggccgcactccagacctgaaggctctactcaacgtggtggacaatgcccggagtttcatctacgtcgctgtcatgaactacctgcccactctggagttctcccaccctcacaggttctggcctgccattgacgatgggctgcggcgggccacctacgagcgtggcgtcaaggtgcgcctgctcatcagctgctggggacactcggagccatccatgcgggccttcctgctctctctggctgccctgcgtgacaaccatacccactctgacatccaggtgaaactctttgtggtccccgcggatgaggcccaggctcgaatcccatatgcccgtgtcaaccacaacaagtacatggtgactgaacgcgccacctacatcggaacctccaactggtctggcaactacttcacggagacggcgggcacctcgctgctggtgacgcagaatgggaggggcggcctgcggagccagctggaggccattttcctgagggactgggactccccttacagccatgaccttgacacctcagctgacagcgtgggcaacgcctgccgcctgctctgaggcccgatccagtgggcaggccaaggcctgctgggcccccgcggacccaggatggccagtggctcagcagaggccccgagatgctctccttcctcccagctgctgccccggca

SEQ ID NO: 406410 - DNA, 2207 bp, Homo sapiens
aactgactcgtccgcggccgctctaccccaacaggccgccaccagcgagagtgcggccataaccatcacgtgaccgcccaccgacaccagcgagagtgcagtcgtaaccgtcacgtgaccgcccaccgtcggcccggcgctcccctccgcccgaagctagcaagcggcgcggccaatgagaaaggcgcatgcctggcccccgccggcctgcagtctagccgtagtgcgcctgcgcgcggctaggaggggccgtcaggcggggatacagcctggaaggtgcgtgtggggctgggtctcggagtgggagacgtggagtgcagggtggaatgtagcaaagcccatccaccagccatgtactaccccccaacccggccaggctggagcgaccgtgtctggggagccgagccccgcttctcgctgcggtgagcccggactggggcacgcactgcgcagactccccgctgcagtgggcggagctcccacaggccccgccccctcctcccaccctcgttcagcctgtccagacagaagctggggcccagcggaggtagcagcagacgcctgagagcgaggccgaggcccctcagggtttggagaccctgacacacccaccttctcacctgggctctgcgtatcccccagccttgagggaagatgaagcctaaactgatgtaccaggagctgaaggtgcctgcagaggagcccgccaatgagctgcccatgaatgagattgaggcgtggaaggctgcggaaaagaaagcccgctgggtcctgctggtcctcattctggcggttgtgggcttcggagccctgatgactcagctgtttctatgggaatacggcgacttgcatctctttgggcccaaccagcgcccagccccctgctatgacccttgcgaagcagtgctggtggaaagcattcctgagggcctggacttccccaatgcctccacggggaacccttccaccagccaggcctggctgggcctgctcgccggtgcgcacagcagcctggacatcgcctccttctactggaccctcaccaacaatgacacccacacgcaggagccctctgcccagcagggtgaggaggtcctccggcagctgcagaccctggcaccaaagggcgtgaacgtccgcatcgctgtgagcaagcccagcgggccccagccacaggcggacctgcaggctctgctgcagagcggtgcccaggtccgcatggtggacatgcagaagctgacccatggcgtcctgcataccaagttctgggtggtggaccagacccacttctacctgggcagtgccaacatggactggcgttcactgacccaggtcaaggagctgggcgtggtcatgtacaactgcagctgcctggctcgagacctgaccaagatctttgaggcctactggttcctgggccaggcaggcagctccatcccatcaacttggccccggttctatgacacccgctacaaccaagagacaccaatggagatctgcctcaatggaacccctgctctggcctacctggcgagtgcgcccccacccctgtgtccaagtggccgcactccagacctgaaggctctactcaacgtggtggacaatgcccggagtttcatctacgtcgctgtcatgaactacctgcccactctggagttctcccaccctcacaggttctggcctgccattgacgatgggctgcggcgggccacctacgagcgtggcgtcaaggtgcgcctgctcatcagctgctggggacactcggagccatccatgcgggccttcggcctgcggagccagctggaggccattttcctgagggactgggactccccttacagccatgaccttgacacctcagctgacagcgtgggcaacgcctgccgcctgctctgaggcccgatccagtgggcaggccaaggcctgctgggcccccgcggacccaggtgctctgggtcacggtccctgtccccgcacccccgcttctgtctgccccattgtggctcctcaggctctctcccctgctctcccacctctacctccacccccaccggcctgacgctgtggccccgggacccagcagagctgggggagggatcagcccccaaagaaatgggggtgcatgctgggcctggccccctggcccacccccactttccagggcaaaaagggcccagggttataataagtaaataacttgtctgtac

SEQ ID NO: 406411 - DNA, 2163 bp, Homo sapiens
aactgactcgtccgcggccgctctaccccaacaggccgccaccagcgagagtgcggccataaccatcacgtgaccgcccaccgacaccagcgagagtgcagtcgtaaccgtcacgtgaccgcccaccgtcggcccggcgctcccctccgcccgaagctagcaagcggcgcggccaatgagaaaggcgcatgcctggcccccgccggcctgcagtctagccgtagtgcgcctgcgcgcggctaggaggggccgtcaggcggggatacagcctggaaggtgcgtgtggggctgggtctcggagtgggagacgtggagtgcagggtggaatgtagcaaagcccatccaccagccatgtactaccccccaacccggccaggctggagcgaccgtgtctggggagccgagccccgcttctcgctgcggtgagcccggactggggcacgcactgcgcagactccccgctgcagtgggcggagctcccacaggccccgccccctcctcccaccctcgttcagcctgtccagacagaagctggggcccagcggaggtagcagcagacgcctgagagcgaggccgaggcccctcagggtttggagaccctgacacacccaccttctcacctgggctctgcgtatcccccagccttgagggaagatgaagcctaaactgatgtaccaggagctgaaggtgcctgcagaggagcccgccaatgagctgcccatgaatgagattgaggcgtggaaggctgcggaaaagaaagcccgctgggtcctgctggtcctcattctggcggttgtgggcttcggagccctgatgactcagctgtttctatgggaatacggcgacttgcatctctttgggcccaaccagcgcccagccccctgctatgacccttgcgaagcagtgctggtggaaagcattcctgagggcctggacttccccaatgcctccacggggaacccttccaccagccaggcctggctgggcctgctcgccggtgcgcacagcagcctggacatcgcctccttctactggaccctcaccaacaatgacacccacacgcaggagccctctgcccagcagggtgaggaggtcctccggcagctgcagaccctggcaccaaagggcgtgaacgtccgcatcgctgtgagcaagcccagcgggccccagccacaggcggacctgcaggctctgctgcagagcggtgcccaggtccgcatggtggacatgcagaagctgacccatggcgtcctgcataccaagttctgggtggtggaccagacccacttctacctgggcagtgccaacatggactggcgttcactgacccaggtcaaggagctgggcgtggtcatgtacaactgcagctgcctggctcgagacctgaccaagatctttgaggcctactggttcctgggccaggcaggcagctccatcccatcaacttggccccggttctatgacacccgctacaaccaagagacaccaatggagatctgcctcaatggaacccctgctctggcctacctggcgagtgcgcccccacccctgtgtccaagtggccgcactccagacctgaaggctctactcaacgtggtggacaatgcccggagtttcatctacgtcgctgtcatgaactacctgcccactctggagttctcccaccctcacaggttctggcctgccattgacgatgggctgcggcgggccacctacgagcgtggcgtcaaggtgcgcctgctcatcagctgctggggacactcggagccatccatgcgggccttcctgctctctctggctgccctgcgtgacaaccatacccactctgacatccaggtgaaactctttgtggtccccgcggatgaggcccaggctcgaatcccatatgcccgtgtcaaccacaacaagtacatggtgactgaacgcgccacctacatcggaacctccaactggtctggcaactacttcacggagacggcgggcacctcgctgctggtgacgcagaatgggaggggcggcctgcggagccagctggaggccattttcctgaggcccaggctcgaatcccatatgcccgtgtcaaccacaacaagtacatggtgactgaacgcgccacctacatcgacctcccactgtctggcaacctactaagcggaacagcgg

SEQ ID NO: 406412 - DNA, 2168 bp, Homo sapiens
aactgactcgtccgcggccgctctaccccaacaggccgccaccagcgagagtgcggccataaccatcacgtgaccgcccaccgacaccagcgagagtgcagtcgtaaccgtcacgtgaccgcccaccgtcggcccggcgctcccctccgcccgaagctagcaagcggcgcggccaatgagaaaggcgcatgcctggcccccgccggcctgcagtctagccgtagtgcgcctgcgcgcggctaggaggggccgtcaggcggggatacagcctggaaggtgcgtgtggggctgggtctcggagtgggagacgtggagtgcagggtggaatgtagcaaagcccatccaccagccatgtactaccccccaacccggccaggctggagcgaccgtgtctggggagccgagccccgcttctcgctgcggtgagcccggactggggcacgcactgcgcagactccccgctgcagtgggcggagctcccacaggccccgccccctcctcccaccctcgttcagcctgtccagacagaagctggggcccagcggaggtagcagcagacgcctgagagcgaggccgaggcccctcagggtttggagaccctgacacacccaccttctcacctgggctctgcgtatcccccagccttgagggaagatgaagcctaaactgatgtaccaggagctgaaggtgcctgcagaggagcccgccaatgagctgcccatgaatgagattgaggcgtggaaggctgcggaaaagaaagcccgctgggtcctgctggtcctcattctggcggttgtgggcttcggagccctgatgactcagctgtttctatgggaatacggcgacttgcatctctttgggcccaaccagcgcccagccccctgctatgacccttgcgaagcagtgctggtggaaagcattcctgagggcctggacttccccaatgcctccacggggaacccttccaccagccaggcctggctgggcctgctcgccggtgcgcacagcagcctggacatcgcctccttctactggaccctcaccaacaatgacacccacacgcaggagccctctgcccagcagggtgaggaggtcctccggcagctgcagaccctggcaccaaagggcgtgaacgtccgcatcgctgtgagcaagcccagcgggccccagccacaggcggacctgcaggctctgctgcagagcggtgcccaggtccgcatggtggacatgcagaagctgacccatggcgtcctgcataccaagttctgggtggtggaccagacccacttctacctgggcagtgccaacatggactggcgttcactgacccaggtcaaggagctgggcgtggtcatgtacaactgcagctgcctggctcgagacctgaccaagatctttgaggcctactggttcctgggccaggcaggcagctccatcccatcaacttggccccggttctatgacacccgctacaaccaagagacaccaatggagatctgcctcaatggaacccctgctctggcctacctggcgagtgcgcccccacccctgtgtccaagtggccgcactccagacctgaaggctctactcaacgtggtggacaatgcccggagtttcatctacgtcgctgtcatgaactacctgcccactctggagttctcccaccctcacagctacgagcgtggcgtcaaggtgcgcctgctcatcagctgctggggacactcggagccatccatgcgggccttcggcctgcggagccagctggaggccattttcctgagggactgggactccccttacagccatgaccttgacacctcagctgacagcgtgggcaacgcctgccgcctgctctgaggcccgatccagtgggcaggccaaggcctgctgggcccccgcggacccaggtgctctgggtcacggtccctgtccccgcacccccgcttctgtctgccccattgtggctcctcaggctctctcccctgctctcccacctctacctccacccccaccggcctgacgctgtggccccgggacccagcagagctgggggagggatcagcccccaaagaaatgggggtgcatgctgggcctggccccctggcccacccccactttccagggcaaaaagggcccagggttataataagtaaataacttgtctgtac

SEQ ID NO: 406413 - DNA, 846 bp, Homo sapiens
ggctgcggcgggccacagcccatcgtcaatggcaggccagaacctgtgagggtgggagaactccagagtgggcaggtagttgttctggcctgccattgacgatgggctgcggcgggccacctacgagcgtggcgtcaaggtgcgcctgctcatcagctgctggggacactcggagccatccatgcgggccttcctgctctctctggctgccctgcgtgacaaccatacccactctgacatccaggtgaaactctttgtggtccccgcggatgaggcccaggctcgaatcccatatgcccgtgtcaaccacaacaagtacatggtgactgaacgcgccacctacatcggaacctccaactggtctggcaactacttcacggagacggcgggcacctcgctgctggtgacgcagaatgggaggggcggcctgcggagccagctggaggccattttcctgagggactgggactccccttacagccatgaccttgacacctcagctgacagcgtgggcaacgcctgccgcctgctctgaggcccgatccagtgggcaggccaaggcctgctgggcccccgcggacccaggtgctctgggtcacggtccctgtccccgcacccccgcttctgtctgccccattgtggctcctcaggctctctcccctgctctcccacctctacctccacccccaccggcctgacgctgtggccccgggacccagcagagctgggggagggatcagcccccaaagaaatgggggtgcatgctgggcctggccccctggcccacccccactttccagggcaaaaagggcccagggttataataagtaaataacttgtctgtac

SEQ ID NO: 406414 - DNA, 834 bp, Homo sapiens
ccattcatgcgcgtcactaattagatgacgaggcatttggctagggtttcgatgaccccgcatcggcgtgttctggcctgccattgacgatgggctgcggcgggccacctacgagcgtggcgtcaaggtgcgcctgctcatcagctgctggggacactcggagccatccatgcgggccttcctgctctctctggctgccctgcgtgacaaccatacccactctgacatccaggtgaaactctttgtggtccccgcggatgaggcccaggctcgaatcccatatgcccgtgtcaaccacaacaagtacatggtgactgaacgcgccacctacatcggaacctccaactggtctggcaactacttcacggagacggcgggcacctcgctgctggtgacgcagaatgggaggggcggcctgcggagccagctggaggccattttcctgagggactgggactccccttacagccatgaccttgacacctcagctgacagcgtgggcaacgcctgccgcctgctctgaggcccgatccagtgggcaggccaaggcctgctgggcccccgcggacccaggtgctctgggtcacggtccctgtccccgcacccccgcttctgtctgccccattgtggctcctcaggctctctcccctgctctcccacctctacctccacccccaccggcctgacgctgtggccccgggacccagcagagctgggggagggatcagcccccaaagaaatgggggtgcatgctgggcctggccccctggcccacccccactttccagggcaaaaagggcccagggttataataagtaaataacttgtctgtac

SEQ ID NO: 406415 - DNA, 2032 bp, Homo sapiens
aactgactcgtccgcggccgctctaccccaacaggccgccaccagcgagagtgcggccataaccatcacgtgaccgcccaccgacaccagcgagagtgcagtcgtaaccgtcacgtgaccgcccaccgtcggcccggcgctcccctccgcccgaagctagcaagcggcgcggccaatgagaaaggcgcatgcctggcccccgccggcctgcagtctagccgtagtgcgcctgcgcgcggctaggaggggccgtcaggcggggatacagcctggaaggtgcgtgtggggctgggtctcggagtgggagacgtggagtgcagggtggaatgtagcaaagcccatccaccagccatgtactaccccccaacccggccaggctggagcgaccgtgtctggggagccgagccccgcttctcgctgcggtgagcccggactggggcacgcactgcgcagactccccgctgcagtgggcggagctcccacaggccccgccccctcctcccaccctcgttcagcctgtccagacagaagctggggcccagcggaggtagcagcagacgcctgagagcgaggccgaggcccctcagggtttggagaccctgacacacccaccttctcacctgggctctgcgtatcccccagccttgagggaagatgaagcctaaactgatgtaccaggagctgaaggtgcctgcagaggagcccgccaatgagctgcccatgaatgagattgaggcgtggaaggctgcggaaaagaaagcccgctgggtcctgctggtcctcattctggcggttgtgggcttcggagccctgatgactcagctgtttctatgggaatacggcgacttgcatctctttgggcccaaccagcgcccagccccctgctatgacccttgcgaagcagtgctggtggaaagcattcctgagggcctggacttccccaatgcctccacggggaacccttccaccagccaggcctggctgggcctgctcgccggtgcgcacagcagcctggacatcgcctccttctactggaccctcaccaacaatgacacccacacgcaggagccctctgcccagcagggtgaggaggtcctccggcagctgcagaccctggcaccaaagggcgtgaacgtccgcatcgctgtgagcaagcccagcgggccccagccacaggcggacctgcaggctctgctgcagagcggtgcccaggtccgcatggtggacatgcagaagctgacccatggcgtcctgcataccaagttctgggtggtggaccagacccacttctacctgggcagtgccaacatggactggcgttcactgacccaggtcaaggagctgggcgtggtcatgtacaactgcagctgcctggctcgagacctgaccaagatctttgaggcctactggttcctgggccaggcaggcagctccatcccatcaacttggccccggttctatgacacccgctacaaccaagagacaccaatggagatctgcctcaatggaacccctgctctggcctacctggcgagtgcgcccccacccctgtgtccaagtggccgcactccagacctgaaggctctactcaacgtggtggacaatgcccggagtttcatctacgtcgctgtcatgaactacctgcccactctggagttctcccaccctcacaggttctggcctgccattgacgatgggctgcggcgggccacctacgagcgtggcgtcaaggtgcgcctgctcatcagctgctgggcccccgcggacccaggtgctctgggtcacggtccctgtccccgcacccccgcttctgtctgccccattgtggctcctcaggctctctcccctgctctcccacctctacctccacccccaccggcctgacgctgtggccccgggacccagcagagctgggggagggatcagcccccaaagaaatgggggtgcatgctgggcctggccccctggcccacccccactttccagggcaaaaagggcccagggttataataagtaaataacttgtctgtac

SEQ ID NO: 406416 - DNA, 1354 bp, Homo sapiens
aactgactcgtccgcggccgctctaccccaacaggccgccaccagcgagagtgcggccataaccatcacgtgaccgcccaccgacaccagcgagagtgcagtcgtaaccgtcacgtgaccgcccaccgtcggcccggcgctcccctccgcccgaagctagcaagcggcgcggccaatgagaaaggcgcatgcctggcccccgccggcctgcagtctagccgtagtgcgcctgcgcgcggctaggaggggccgtcaggcggggatacagcctggaaggtgcgtgtggggctgggtctcggagtgggagacgtggagtgcagggtggaatgtagcaaagcccatccaccagccatgtactaccccccaacccggccaggctggagcgaccgtgtctggggagccgagccccgcttctcgctgcggtgagcccggactggggcacgcactgcgcagactccccgctgcagtgggcggagctcccacaggccccgccccctcctcccaccctcgttcagcctgtccagacagaagctggggcccagcggaggtagcagcagacgcctgagagcgaggccgaggcccctcagggtttggagaccctgacacacccaccttctcacctgggctctgcgtatcccccagccttgagggaagatgaagcctaaactgatgtaccaggagctgaaggtgcctgcagaggagcccgccaatgagctgcccatgaatgagattgaggcgtggaaggctgcggaaaagaaagcccgctgggtcctgctggtcctcattctggcggttgtgggcttcggagccctgatgactcagctgtttctatgggaatacggcgacttgcatctctttgggcccaaccagcgcccagccccctgctatgacccttgcgaagcagtgctggtggaaagcattcctgagggcctggacttccccaatgcctccacggggaacccttccaccagccaggcctggctgggcctgctcgccggtgcgcacagcagcctggacatcgcctccttctactggaccctcaccaacaatgacacccacacgcaggagccctctgcccagcagggtgaggaggtcctccggcagctgcagaccctggcaccaaagggcgtgaacgtccgcatcgctgtgagcaagcccagcgggccccagccacaggcggacctgcaggctctgctgcagagcggtgcccaggtccgcatggtggacatgcagaagctgacccatcagcccccaaagaaatgggggtgcatgctgggcctggccccctggcccacccccactttccagggcaaaaagggcccagggttataataagtaaataacttgtctgtac

SEQ ID NO: 406417 - DNA, 1601 bp, Homo sapiens
aactgactcgtccgcggccgctctaccccaacaggccgccaccagcgagagtgcggccataaccatcacgtgaccgcccaccgacaccagcgagagtgcagtcgtaaccgtcacgtgaccgcccaccgtcggcccggcgctcccctccgcccgaagctagcaagcggcgcggccaatgagaaaggcgcatgcctggcccccgccggcctgcagtctagccgtagtgcgcctgcgcgcggctaggaggggccgtcaggcggggatacagcctggaaggtgcgtgtggggctgggtctcggagtgggagacgtggagtgcagggtggaatgtagcaaagcccatccaccagccatgtactaccccccaacccggccaggctggagcgaccgtgtctggggagccgagccccgcttctcgctgcggtgagcccggactggggcacgcactgcgcagactccccgctgcagtgggcggagctcccacaggccccgccccctcctcccaccctcgttcagcctgtccagacagaagctggggcccagcggaggtagcagcagacgcctgagagcgaggccgaggcccctcagggtttggagaccctgacacacccaccttctcacctgggctctgcgtatcccccagccttgagggaagatgaagcctaaactgatgtaccaggagctgaaggtgcctgcagaggagcccgccaatgagctgcccatgaatgagattgaggcgtggaaggctgcggaaaagaaagcccgctgggtcctgctggtcctcattctggcggttgtgggcttcggagccctgatgactcagctgtttctatgggaatacggcgacttgcatctctttgggcccaaccagcgcccagccccctgctatgacccttgcgaagcagtgctggtggaaagcattcctgagggcctggacttccccaatgcctccacggggaacccttccaccagccaggcctggctgggcctgctcgccggtgcgcacagcagcctggacatcgcctccttctactggaccctcaccaacaatgacacccacacgcaggagccctctgcccagcagggtgaggaggtcctccggcagctgcagaccctggcaccaaagggcgtgaacgtccgcatcgctgtgagcaagcccactggggctggggctggtctgggcctgggggtacccagcctggcccctgatctctgcccctgctggtcacaggtgcccaggtccgcatggtggacatgcagaagctgacccatggcgtcctgcataccaagttctgggtggtggaccagacccacttctacctgggcagtgccaacatggactggcgttcactgacccaggtctgtctgcaccctgtctaccttccttccaggccactccctgccccacagggcacccagcctccgactgcatccctcactcaatccagagtcctctccacccattctctgtaatggcttccttcttgcctcctaccaggcctccctaatccaagccatgcacggtggctcacacctataatctcaacactttgggaggccaaggtgggaggattgcttgagcccaggagttggagaccagcc

SEQ ID NO: 406418 - DNA, 1199 bp, Homo sapiens
aactgactcgtccgcggccgctctaccccaacaggccgccaccagcgagagtgcggccataaccatcacgtgaccgcccaccgacaccagcgagagtgcagtcgtaaccgtcacgtgaccgcccaccgtcggcccggcgctcccctccgcccgaagctagcaagcggcgcggccaatgagaaaggcgcatgcctggcccccgccggcctgcagtctagccgtagtgcgcctgcgcgcggctaggaggggccgtcaggcggggatacagcctggaaggtgcgtgtggggctgggtctcggagtgggagacgtggagtgcagggtggaatgtagcaaagcccatccaccagccatgtactaccccccaacccggccaggctggagcgaccgtgtctggggagccgagccccgcttctcgctgcggtgagcccggactggggcacgcactgcgcagactccccgctgcagtgggcggagctcccacaggccccgccccctcctcccaccctcgttcagcctgtccagacagaagctggggcccagcggaggtagcagcagacgcctgagagcgaggccgaggcccctcagggtttggagaccctgacacacccaccttctcacctgggctctgcgtatcccccagccttgagggaagatgaagcctaaactgatgtaccaggagctgaaggtgcctgcagaggagcccgccaatgagctgcccatgaatgagattgaggcgtggaaggctgcggaaaagaaagcccgctgggtcctgctggtcctcattctggcggttgtgggcttcggagccctgatgactcagctgtttctatgggaatacggcgacttgcatctctttgggcccaaccagcgcccagccccctgctatgacccttgcgaagcagtgctggtggaaagcattcctgagggcctggacttccccaatgcctccacggggaacccttccaccagccaggcctggctgggcctgctcgccggtgcgcacagcagcctggacatcgcctccttctactggaccctcaccaacaatgacacccacacgcaggagccctctgcccagcagggtgaggaggtcctccggcagctcgttcctgagttagcagctcgcccctgagttagcagctcgcccctgagttagctgctcgcccctgagttagcagctcgcccctgagtgagctg

SEQ ID NO: 406419 - DNA, 224 bp, Homo sapiens
tgtcttccacgctataatttatgtcgtcctcggtctctttatgtcaccattcctctccttctgtctcatcccacttaaatcctcacaactccttctgtcgccatcaccctctttaaatcctcacaactcctcttgttgtcatcaacgcccttaactcgctttcgttccctgtaagccctctttgccaccataggtcgtaatcgctccctttaaattcgtcatcg

SEQ ID NO: 406420 - DNA, 2348 bp, Homo sapiens
ggcgcgctgggagccccatggaggttctagggtcctgagaatacaggcattgagacgggctgaggaggaactccagcatccggctgcccgtgcccaccttcagtttcaccctaccctgctcccacaaggatctgagcagggagggggcctgatttccttctcccgctgagaccacagtcctctggaggctaggatctggtgatggggcaccctagctaggagcctgagcctctttataatttagtttccatagaagttatatgtgcatttaaaaaaattcaatcaggctggagcgaccgtgtctggggagccgagccccgcttctcgctgcggtgagcccggactggggcacgcactgcgcagactccccgctgcagtgggcggagctcccacaggccccgccccctcctcccaccctcgttcagcctgtccagacagaagctggggcccagcggaggtagcagcagacgcctgagagcgaggccgaggcccctcagggtttggagaccctgacacacccaccttctcacctgggctctgcgtatcccccagccttgagggaagatgaagcctaaactgatgtaccaggagctgaaggtgcctgcagaggagcccgccaatgagctgcccatgaatgagattgaggcgtggaaggctgcggaaaagaaagcccgctgggtcctgctggtcctcattctggcggttgtgggcttcggagccctgatgactcagctgtttctatgggaatacggcgacttgcatctctttgggcccaaccagcgcccagccccctgctatgacccttgcgaagcagtgctggtggaaagcattcctgagggcctggacttccccaatgcctccacggggaacccttccaccagccaggcctggctgggcctgctcgccggtgcgcacagcagcctggacatcgcctccttctactggaccctcaccaacaatgacacccacacgcaggagccctctgcccagcagggtgaggaggtcctccggcagctgcagaccctggcaccaaagggcgtgaacgtccgcatcgctgtgagcaagcccagcgggccccagccacaggcggacctgcaggctctgctgcagagcggtgcccaggtccgcatggtggacatgcagaagctgacccatggcgtcctgcataccaagttctgggtggtggaccagacccacttctacctgggcagtgccaacatggactggcgttcactgacccaggtcaaggagctgggcgtggtcatgtacaactgcagctgcctggctcgagacctgaccaagatctttgaggcctactggttcctgggccaggcaggcagctccatcccatcaacttggccccggttctatgacacccgctacaaccaagagacaccaatggagatctgcctcaatggaacccctgctctggcctacctggcgagtgcgcccccacccctgtgtccaagtggccgcactccagacctgaaggctctactcaacgtggtggacaatgcccggagtttcatctacgtcgctgtcatgaactacctgcccactctggagttctcccaccctcacaggttctggcctgccattgacgatgggctgcggcgggccacctacgagcgtggcgtcaaggtgcgcctgctcatcagctgctggggacactcggagccatccatgcgggccttcctgctctctctggctgccctgcgtgacaaccatacccactctgacatccaggtgaaactctttgtggtccccgcggatgaggcccaggctcgaatcccatatgcccgtgtcaaccacaacaagtacatggtgactgaacgcgccacctacatcggaacctccaactggtctggcaactacttcacggagacggcgggcacctcgctgctggtgacgcagaatgggaggggcggcctgcggagccagctggaggccattttcctgagggactgggactccccttacagccatgaccttgacacctcagctgacagcgtgggcaacgcctgccgcctgctctgaggcccgatccagtgggcaggccaaggcctgctgggcccccgcggacccaggtgctctgggtcacggtccctgtccccgcacccccgcttctgtctgccccattgtggctcctcaggctctctcccctgctctcccacctctacctccacccccaccggcctgacgctgtggccccgggacccagcagagctgggggagggatcagcccccaaagaaatgggggtgcatgctgggcctggccccctggcccacccccactttccagggcaaaaagggcccagggttataataagtaaataacttgtctgtac

SEQ ID NO: 406421 - DNA, 2303 bp, Homo sapiens
aattacgctaggtacgagcttcgttgaaatcggccgagggtggggctgggtctcggatgggagacgtggagtgcaggtaatgcatgtccatggtacacaaattcacaaggtttgtaaatgagaaaagacgtgaggttccttttgttctttacctgtggcctccctgccctacacggggactctagggtggaatgtagcaaagcccatccaccagccatgtactaccccccaacccggccaggctggagcgaccgtgtctggggagccgagccccgcttctcgctgcggtgagcccggactggggcacgcactgcgcagactccccgctgcagtgggcggagctcccacaggccccgccccctcctcccaccctcgttcagcctgtccagacagaagctggggcccagcggaggtagcagcagacgcctgagagcgaggccgaggcccctcagggtttggagaccctgacacacccaccttctcacctgggctctgcgtatcccccagccttgagggaagatgaagcctaaactgatgtaccaggagctgaaggtgcctgcagaggagcccgccaatgagctgcccatgaatgagattgaggcgtggaaggctgcggaaaagaaagcccgctgggtcctgctggtcctcattctggcggttgtgggcttcggagccctgatgactcagctgtttctatgggaatacggcgacttgcatctctttgggcccaaccagcgcccagccccctgctatgacccttgcgaagcagtgctggtggaaagcattcctgagggcctggacttccccaatgcctccacggggaacccttccaccagccaggcctggctgggcctgctcgccggtgcgcacagcagcctggacatcgcctccttctactggaccctcaccaacaatgacacccacacgcaggagccctctgcccagcagggtgaggaggtcctccggcagctgcagaccctggcaccaaagggcgtgaacgtccgcatcgctgtgagcaagcccagcgggccccagccacaggcggacctgcaggctctgctgcagagcggtgcccaggtccgcatggtggacatgcagaagctgacccatggcgtcctgcataccaagttctgggtggtggaccagacccacttctacctgggcagtgccaacatggactggcgttcactgacccaggtcaaggagctgggcgtggtcatgtacaactgcagctgcctggctcgagacctgaccaagatctttgaggcctactggttcctgggccaggcaggcagctccatcccatcaacttggccccggttctatgacacccgctacaaccaagagacaccaatggagatctgcctcaatggaacccctgctctggcctacctggcgagtgcgcccccacccctgtgtccaagtggccgcactccagacctgaaggctctactcaacgtggtggacaatgcccggagtttcatctacgtcgctgtcatgaactacctgcccactctggagttctcccaccctcacaggttctggcctgccattgacgatgggctgcggcgggccacctacgagcgtggcgtcaaggtgcgcctgctcatcagctgctggggacactcggagccatccatgcgggccttcctgctctctctggctgccctgcgtgacaaccatacccactctgacatccaggtgaaactctttgtggtccccgcggatgaggcccaggctcgaatcccatatgcccgtgtcaaccacaacaagtacatggtgactgaacgcgccacctacatcggaacctccaactggtctggcaactacttcacggagacggcgggcacctcgctgctggtgacgcagaatgggaggggcggcctgcggagccagctggaggccattttcctgagggactgggactccccttacagccatgaccttgacacctcagctgacagcgtgggcaacgcctgccgcctgctctgaggcccgatccagtgggcaggccaaggcctgctgggcccccgcggacccaggtgctctgggtcacggtccctgtccccgcacccccgcttctgtctgccccattgtggctcctcaggctctctcccctgctctcccacctctacctccacccccaccggcctgacgctgtggccccgggacccagcagagctgggggagggatcagcccccaaagaaatgggggtgcatgctgggcctggccccctggcccacccccactttccagggcaaaaagggcccagggttataataagtaaataacttgtctgtac

SEQ ID NO: 406422 - DNA, 2169 bp, Homo sapiens
aactgactcgtccgcggccgctctaccccaacaggccgccaccagcgagagtgcggccataaccatcacgtgaccgcccaccgacaccagcgagagtgcagtcgtaaccgtcacgtgaccgcccaccgtcggcccggcgctcccctccgcccgaagctagcaagcggcgcggccaatgagaaaggcgcatgcctggcccccgccggcctgcagtctagccgtagtgcgcctgcgcgcggctaggaggggccgtcaggcggggatacagcctggaaggtgcgtgtggggctgggtctcggagtgggagacgtggagtgcagtttggagaccctgacacacccaccttctcacctgggctctgcgtatcccccagccttgagggaagatgaagcctaaactgatgtaccaggagctgaaggtgcctgcagaggagcccgccaatgagctgcccatgaatgagattgaggcgtggaaggctgcggaaaagaaagcccgctgggtcctgctggtcctcattctggcggttgtgggcttcggagccctgatgactcagctgtttctatgggaatacggcgacttgcatctctttgggcccaaccagcgcccagccccctgctatgacccttgcgaagcagtgctggtggaaagcattcctgagggcctggacttccccaatgcctccacggggaacccttccaccagccaggcctggctgggcctgctcgccggtgcgcacagcagcctggacatcgcctccttctactggaccctcaccaacaatgacacccacacgcaggagccctctgcccagcagggtgaggaggtcctccggcagctgcagaccctggcaccaaagggcgtgaacgtccgcatcgctgtgagcaagcccagcgggccccagccacaggcggacctgcaggctctgctgcagagcggtgcccaggtccgcatggtggacatgcagaagctgacccatggcgtcctgcataccaagttctgggtggtggaccagacccacttctacctgggcagtgccaacatggactggcgttcactgacccaggtcaaggagctgggcgtggtcatgtacaactgcagctgcctggctcgagacctgaccaagatctttgaggcctactggttcctgggccaggcaggcagctccatcccatcaacttggccccggttctatgacacccgctacaaccaagagacaccaatggagatctgcctcaatggaacccctgctctggcctacctggcgagtgcgcccccacccctgtgtccaagtggccgcactccagacctgaaggctctactcaacgtggtggacaatgcccggagtttcatctacgtcgctgtcatgaactacctgcccactctggagttctcccaccctcacaggttctggcctgccattgacgatgggctgcggcgggccacctacgagcgtggcgtcaaggtgcgcctgctcatcagctgctggggacactcggagccatccatgcgggccttcctgctctctctggctgccctgcgtgacaaccatacccactctgacatccaggtgaaactctttgtggtccccgcggatgaggcccaggctcgaatcccatatgcccgtgtcaaccacaacaagtacatggtgactgaacgcgccacctacatcggaacctccaactggtctggcaactacttcacggagacggcgggcacctcgctgctggtgacgcagaatgggaggggcggcctgcggagccagctggaggccattttcctgagggactgggactccccttacagccatgaccttgacacctcagctgacagcgtgggcaacgcctgccgcctgctctgaggcccgatccagtgggcaggccaaggcctgctgggcccccgcggacccaggtgctctgggtcacggtccctgtccccgcacccccgcttctgtctgccccattgtggctcctcaggctctctcccctgctctcccacctctacctccacccccaccggcctgacgctgtggccccgggacccagcagagctgggggagggatcagcccccaaagaaatgggggtgcatgctgggcctggccccctggcccacccccactttccagggcaaaaagggcccagggttataataagtaaataacttgtctgtac

SEQ ID NO: 406423 - DNA, 2249 bp, Homo sapiens
aattacgctaggtacgagcttcgttgaaatcggccgagggtggggctgggtctcggatgggagacgtggagtgcaggtaatgcatgtccatggtacacaaattcacaaggtttgtaaatgagaaaagacgtgaggttccttttgttctttacctgtggcctccctgccctacacggggactctagggtggaatgtagcaaagcccatccaccagccatgtactaccccccaacccggccaggctggagcgaccgtgtctggggagccgagccccgcttctcgctgcggtgagcccggactggggcacgcactgcgcagactccccgctgcagtgggcggagctcccacaggccccgccccctcctcccaccctcgttcagcctgtccagacagaagctggggcccagcggaggtagcagcagacgcctgagagcgaggccgaggcccctcagggtttggagaccctgacacacccaccttctcacctgggctctgcgtatcccccagccttgagggaagatgaagcctaaactgatgtaccaggagctgaaggtgcctgcagaggagcccgccaatgagctgcccatgaatgagattgaggcgtggaaggctgcggaaaagaaagcccgctgggtcctgctggtcctcattctggcggttgtgggcttcggagccctgatgactcagctgtttctatgggaatacggcgacttgcatctctttgggcccaaccagcgcccagccccctgctatgacccttgcgaagcagtgctggtggaaagcattcctgagggcctggacttccccaatgcgcacagcagcctggacatcgcctccttctactggaccctcaccaacaatgacacccacacgcaggagccctctgcccagcagggtgaggaggtcctccggcagctgcagaccctggcaccaaagggcgtgaacgtccgcatcgctgtgagcaagcccagcgggccccagccacaggcggacctgcaggctctgctgcagagcggtgcccaggtccgcatggtggacatgcagaagctgacccatggcgtcctgcataccaagttctgggtggtggaccagacccacttctacctgggcagtgccaacatggactggcgttcactgacccaggtcaaggagctgggcgtggtcatgtacaactgcagctgcctggctcgagacctgaccaagatctttgaggcctactggttcctgggccaggcaggcagctccatcccatcaacttggccccggttctatgacacccgctacaaccaagagacaccaatggagatctgcctcaatggaacccctgctctggcctacctggcgagtgcgcccccacccctgtgtccaagtggccgcactccagacctgaaggctctactcaacgtggtggacaatgcccggagtttcatctacgtcgctgtcatgaactacctgcccactctggagttctcccaccctcacaggttctggcctgccattgacgatgggctgcggcgggccacctacgagcgtggcgtcaaggtgcgcctgctcatcagctgctggggacactcggagccatccatgcgggccttcctgctctctctggctgccctgcgtgacaaccatacccactctgacatccaggtgaaactctttgtggtccccgcggatgaggcccaggctcgaatcccatatgcccgtgtcaaccacaacaagtacatggtgactgaacgcgccacctacatcggaacctccaactggtctggcaactacttcacggagacggcgggcacctcgctgctggtgacgcagaatgggaggggcggcctgcggagccagctggaggccattttcctgagggactgggactccccttacagccatgaccttgacacctcagctgacagcgtgggcaacgcctgccgcctgctctgaggcccgatccagtgggcaggccaaggcctgctgggcccccgcggacccaggtgctctgggtcacggtccctgtccccgcacccccgcttctgtctgccccattgtggctcctcaggctctctcccctgctctcccacctctacctccacccccaccggcctgacgctgtggccccgggacccagcagagctgggggagggatcagcccccaaagaaatgggggtgcatgctgggcctggccccctggcccacccccactttccagggcaaaaagggcccagggttataataagtaaataacttgtctgtac

SEQ ID NO: 406424 - DNA, 2861 bp, Homo sapiens
  misc_feature (2459)..(2459): n is a, c, g, or t
  misc_feature (2462)..(2462): n is a, c, g, or t
aactgactcgtccgcggccgctctaccccaacaggccgccaccagcgagagtgcggccataaccatcacgtgaccgcccaccgacaccagcgagagtgcagtcgtaaccgtcacgtgaccgcccaccgtcggcccggcgctcccctccgcccgaagctagcaagcggcgcggccaatgagaaaggcgcatgcctggcccccgccggcctgcagtctagccgtagtgcgcctgcgcgcggctaggaggggccgtcaggcggggatacagcctggaaggtgcgtgtggggctgggtctcggagtgggagacgtggagtgcagggtggaatgtagcaaagcccatccaccagccatgtactaccccccaacccggccaggctggagcgaccgtgtctggggagccgagccccgcttctcgctgcggtgagcccggactggggcacgcactgcgcagactccccgctgcagtgggcggagctcccacaggccccgccccctcctcccaccctcgttcagcctgtccagacagaagctggggcccagcggaggtagcagcagacgcctgagagcgaggccgaggcccctcagggtttggagaccctgacacacccaccttctcacctgggctctgcgtatcccccagccttgagggaagatgaagcctaaactgatgtaccaggagctgaaggtgcctgcagaggagcccgccaatgagctgcccatgaatgagattgaggcgtggaaggctgcggaaaagaaagcccgctgggtcctgctggtcctcattctggcggttgtgggcttcggagccctgatgactcagctgtttctatgggaatacggcgacttgcatctctttgggcccaaccagcgcccagccccctgctatgacccttgcgaagcagtgctggtggaaagcattcctgagggcctggacttccccaatgcctccacggggaacccttccaccagccaggcctggctgggcctgctcgccggtgcgcacagcagcctggacatcgcctccttctactggaccctcaccaacaatgacacccacacgcaggagccctctgcccagcagggtgaggaggtcctccggcagctgcagaccctggcaccaaagggcgtgaacgtccgcatcgctgtgagcaagcccagcgggccccagccacaggcggacctgcaggctctgctgcagagcggtgcccaggtccgcatggtggacatgcagaagctgacccatggcgtcctgcataccaagttctgggtggtggaccagacccacttctacctgggcagtgccaacatggactggcgttcactgacccaggtcaaggagctgggcgtggtcatgtacaactgcagctgcctggctcgagacctgaccaagatctttgaggcctactggttcctgggccaggcaggcagctccatcccatcaacttggccccggttctatgacacccgctacaaccaagagacaccaatggagatctgcctcaatggaacccctgctctggcctacctggcgagtgcgcccccacccctgtgtccaagtggccgcactccagacctgaaggctctactcaacgtggtggacaatgcccggagtttcatctacgtcgctgtcatgaactacctgcccactctggagttctcccaccctcacaggttctggcctgccattgacgatgggctgcggcgggccacctacgagcgtggcgtcaaggtgcgcctgctcatcagctgctggggacactcggagccatccatgcgggccttcctgctctctctggctgccctgcgtgacaaccatacccactctgacatccaggtgaaactctttgtggtccccgcggatgaggcccaggctcgaatcccatatgcccgtgtcaaccacaacaagtacatggtgactgaacgcgccacctacatcggaacctccaactggtctggcaactacttcacggagacggcgggcacctcgctgctggtgacgcagaatgggaggggcggcctgcggagccagctggaggccattttcctgagggactgggactccccttacagccatgaccttgacacctcagctgacagcgtgggcaacgcctgccgcctgctctgaggcccgatccagtgggcaggccaaggcctgctgggcccccgcggacccaggtgctctgggtcacggtccctgtccccgcacccccgcttctgtctgccccattgtggctcctcaggctctctcccctgctctcccacctctacctccacccccaccggcctgacgctgtggccccgggacccagcagagctgggggagggatcagcccccaaagaaatgggggtgcatgctgggcctggccccctggcccacccccactttccagggcaaaaagggcccagggttataataagtaaataacttgtctgtacaaaaaaaacaacaaaaacaanaanacaaatcaaaaacaacaacaacacaacaaaaacacaaataacaaaacaaacaaaaacaataagaacactacacccaccatctaaataaaataattcccccacaatgacgcaacaacacatcataacataccaaacaccacacatttatttctaattacccagtagcagggaccccgcaaaaaaacgacagtcagacacaggacaagacagacacacaagcgacgaagaaacaaaaagagcgcaagacgtaaacgaagggtaagaagacaagacgattcttacgaaagacgaacggagacgaagaagaaagactcaatagacccgacaagtgaggcgaacgttcagtgtcgagacaatagaggacagccaccgctaaacaatagaagcgagaaaggagat

SEQ ID NO: 406425 - DNA, 2577 bp, Homo sapiens
aactgactcgtccgcggccgctctaccccaacaggccgccaccagcgagagtgcggccataaccatcacgtgaccgcccaccgacaccagcgagagtgcagtcgtaaccgtcacgtgaccgcccaccgtcggcccggcgctcccctccgcccgaagctagcaagcggcgcggccaatgagaaaggcgcatgcctggcccccgccggcctgcagtctagccgtagtgcgcctgcgcgcggctaggaggggccgtcaggcggggatacagcctggaaggtgcgtgtggggctgggtctcggagtgggagacgtggagtgcagggtggaatgtagcaaagcccatccaccagccatgtactaccccccaacccggccaggctggagcgaccgtgtctggggagccgagccccgcttctcgctgcggtgagcccggactggggcacgcactgcgcagactccccgctgcagtgggcggagctcccacaggccccgccccctcctcccaccctcgttcagcctgtccagacagaagctggggcccagcggaggtagcagcagacgcctgagagcgaggccgaggcccctcagggtttggagaccctgacacacccaccttctcacctgggctctgcgtatcccccagccttgagggaagatgaagcctaaactgatgtaccaggagctgaaggtgcctgcagaggagcccgccaatgagctgcccatgaatgagattgaggcgtggaaggctgcggaaaagaaagcccgctgggtcctgctggtcctcattctggcggttgtgggcttcggagccctgatgactcagctgtttctatgggaatacggcgacttgcatctctttgggcccaaccagcgcccagccccctgctatgacccttgcgaagcagtgctggtggaaagcattcctgagggcctggacttccccaatgcctccacggggaacccttccaccagccaggcctggctgggcctgctcgccggtgcgcacagcagcctggacatcgcctccttctactggaccctcaccaacaatgacacccacacgcaggagccctctgcccagcagggtgaggaggtcctccggcagctgcagaccctggcaccaaagggcgtgaacgtccgcatcgctgtgagcaagcccagcgggccccagccacaggcggacctgcaggctctgctgcagagcggtgcccaggtccgcatggtggacatgcagaagctgacccatggcgtcctgcataccaagttctgggtggtggaccagacccacttctacctgggcagtgccaacatggactggcgttcactgacccaggtcaaggagctgggcgtggtcatgtacaactgcagctgcctggctcgagacctgaccaagatctttgaggcctactggttcctgggccaggcaggcagctccatcccatcaacttggccccggttctatgacacccgctacaaccaagagacaccaatggagatctgcctcaatggaacccctgctctggcctacctggcgagtgcgcccccacccctgtgtccaagtggccgcactccagacctgaaggctctactcaacgtggtggacaatgcccggagtttcatctacgtcgctgtcatgaactacctgcccactctggagttctcccaccctcacaggttctggcctgccattgacgatgggctgcggcgggccacctacgagcgtggcgtcaaggtgcgcctgctcatcagctgctggggacactcggagccatccatgcgggccttcctgctctctctggctgccctgcgtgacaaccatacccactctgacatccaggtgaaactctttgtggtccccgcggatgaggcccaggctcgaatcccatatgcccgtgtcaaccacaacaagtacatggtgactgaacgcgccacctacatcggaacctccaactggtctggcaactacttcacggagacggcgggcacctcgctgctggtgacgcagaatgggaggggcggcctgcggagccagctggaggccattttcctgagggactgggactccccttacagccatgaccttgacacctcagctgacagcgtgggcaacgcctgccgcctgctctgaggcccgatccagtgggcaggccaaggcctgctgggcccccgcggacccaggtgctctgggtcacggtccctgtccccgcacccccgcttctgtctgccccattgtggctcctcaggctctctcccctgctctcccacctctacctccacccccaccggcctgacgctgtggccccgggacccagcagagctgggggagggatcagcccccaaagaaatgggggtgcatgctgggcctggccccctggcccacccccactttccagggcaaaaagggcccagggttataataagtaaataacttgtctgtacaaaaaaaaaaaaaaacccgaggggggggcccgggaccccaatttcccctttggaggagcgttttacaattcacttggcccgcttttttaaaacctttgtgaattgggaaaacccttggttttaccacaattaaattggc

SEQ ID NO: 406426 - DNA, 2464 bp, Homo sapiens
aactgactcgtccgcggccgctctaccccaacaggccgccaccagcgagagtgcggccataaccatcacgtgaccgcccaccgacaccagcgagagtgcagtcgtaaccgtcacgtgaccgcccaccgtcggcccggcgctcccctccgcccgaagctagcaagcggcgcggccaatgagaaaggcgcatgcctggcccccgccggcctgcagtctagccgtagtgcgcctgcgcgcggctaggaggggccgtcaggcggggatacagcctggaaggtgcgtgtggggctgggtctcggagtgggagacgtggagtgcagggtggaatgtagcaaagcccatccaccagccatgtactaccccccaacccggccaggctggagcgaccgtgtctggggagccgagccccgcttctcgctgcggtgagcccggactggggcacgcactgcgcagactccccgctgcagtgggcggagctcccacaggccccgccccctcctcccaccctcgttcagcctgtccagacagaagctggggcccagcggaggtagcagcagacgcctgagagcgaggccgaggcccctcagggtttggagaccctgacacacccaccttctcacctgggctctgcgtatcccccagccttgagggaagatgaagcctaaactgatgtaccaggagctgaaggtgcctgcagaggagcccgccaatgagctgcccatgaatgagattgaggcgtggaaggctgcggaaaagaaagcccgctgggtcctgctggtcctcattctggcggttgtgggcttcggagccctgatgactcagctgtttctatgggaatacggcgacttgcatctctttgggcccaaccagcgcccagccccctgctatgacccttgcgaagcagtgctggtggaaagcattcctgagggcctggacttccccaatgcctccacggggaacccttccaccagccaggcctggctgggcctgctcgccggtgcgcacagcagcctggacatcgcctccttctactggaccctcaccaacaatgacacccacacgcaggagccctctgcccagcagggtgaggaggtcctccggcagctgcagaccctggcaccaaagggcgtgaacgtccgcatcgctgtgagcaagcccactggggctggggctggtctgggcctgggggtacccagcctggcccctgatctctgcccctgctggtcacaggtgcccaggtccgcatggtggacatgcagaagctgacccatggcgtcctgcataccaagttctgggtggtggaccagacccacttctacctgggcagtgccaacatggactggcgttcactgacccaggtcaaggagctgggcgtggtcatgtacaactgcagctgcctggctcgagacctgaccaagatctttgaggcctactggttcctgggccaggcaggcagctccatcccatcaacttggccccggttctatgacacccgctacaaccaagagacaccaatggagatctgcctcaatggaacccctgctctggcctacctggcgagtgcgcccccacccctgtgtccaagtggccgcactccagacctgaaggctctactcaacgtggtggacaatgcccggagtttcatctacgtcgctgtcatgaactacctgcccactctggagttctcccaccctcacaggttctggcctgccattgacgatgggctgcggcgggccacctacgagcgtggcgtcaaggtgcgcctgctcatcagctgctggggacactcggagccatccatgcgggccttcctgctctctctggctgccctgcgtgacaaccatacccactctgacatccaggtgaaactctttgtggtccccgcggatgaggcccaggctcgaatcccatatgcccgtgtcaaccacaacaagtacatggtgactgaacgcgccacctacatcggaacctccaactggtctggcaactacttcacggagacggcgggcacctcgctgctggtgacgcagaatgggaggggcggcctgcggagccagctggaggccattttcctgagggactgggactccccttacagccatgaccttgacacctcagctgacagcgtgggcaacgcctgccgcctgctctgaggcccgatccagtgggcaggccaaggcctgctgggcccccgcggacccaggtgctctgggtcacggtccctgtccccgcacccccgcttctgtctgccccattgtggctcctcaggctctctcccctgctctcccacctctacctccacccccaccggcctgacgctgtggccccgggacccagcagagctgggggagggatcagcccccaaagaaatgggggtgcatgctgggcctggccccctggcccacccccactttccagggcaaaaagggcccagggttataataagtaaataacttgtctgtac

SEQ ID NO: 406427 - DNA, 1854 bp, Homo sapiens
aactgactcgtccgcggccgctctaccccaacaggccgccaccagcgagagtgcggccataaccatcacgtgaccgcccaccgacaccagcgagagtgcagtcgtaaccgtcacgtgaccgcccaccgtcggcccggcgctcccctccgcccgaagctagcaagcggcgcggccaatgagaaaggcgcatgcctggcccccgccggcctgcagtctagccgtagtgcgcctgcgcgcggctaggaggggccgtcaggcggggatacagcctggaaggtgcgtgtggggctgggtctcggagtgggagacgtggagtgcagggtggaatgtagcaaagcccatccaccagccatgtactaccccccaacccggccaggctggagcgaccgtgtctggggagccgagccccgcttctcgctgcggtgagcccggactggggcacgcactgcgcagactccccgctgcagtgggcggagctcccacaggccccgccccctcctcccaccctcgttcagcctgtccagacagaagctggggcccagcggaggtagcagcagacgcctgagagcgaggccgaggcccctcagggtttggagaccctgacacacccaccttctcacctgggctctgcctgaaggtgcctgcagaggagcccgccaatgagctgcccatgaatgagattgaggcgtggaaggctgcggaaaagaaagcccgctgggtcctgctggtcctcattctggcggttgtgggcttcggagccctgatgactcagctgtttctatgggaatacggcgacttgcatctctttgggcccaaccagcgcccagccccctgctatgacccttgcgaagaggtgctggtggaaggcattccatggggtcctgaatacaaccaagagacaccaatggagatctgcctcaatggaacccctgctctggcctacctggcgagtgcgcccccacccctgtgtccaagtggccgcactccagacctgaaggctctactcaacgtggtggacaatgcccggagtttcatctacgtcgctgtcatgaactacctgcccactctggagttctcccaccctcacaggttctggcctgccattgacgatgggctgcggcgggccacctacgagcgtggcgtcaaggtgcgcctgctcatcagctgctggggacactcggagccatccatgcgggccttcctgctctctctggctgccctgcgtgacaaccatacccactctgacatccaggtgaaactctttgtggtccccgcggatgaggcccaggctcgaatcccatatgcccgtgtcaaccacaacaagtacatggtgactgaacgcgccacctacatcggaacctccaactggtctggcaactacttcacggagacggcgggcacctcgctgctggtgacgcagaatgggaggggcggcctgcggagccagctggaggccattttcctgagggactgggactccccttacagccatgaccttgacacctcagctgacagcgtgggcaacgcctgccgcctgctctgaggcccgatccagtgggcaggccaaggcctgctgggcccccgcggacccaggtgctctgggtcacggtccctgtccccgcacccccgcttctgtctgccccattgtggctcctcaggctctctcccctgctctcccacctctacctccacccccaccggcctgacgctgtggccccgggacccagcagagctgggggagggatcagcccccaaagaaatgggggtgcatgctgggcctggccccctggcccacccccactttccagggcaaaaagggcccagggttataataagtaaataacttgtctgtac

SEQ ID NO: 406428 - DNA, 2171 bp, Homo sapiens
aactgactcgtccgcggccgctctaccccaacaggccgccaccagcgagagtgcggccataaccatcacgtgaccgcccaccgacaccagcgagagtgcagtcgtaaccgtcacgtgaccgcccaccgtcggcccggcgctcccctccgcccgaagctagcaagcggcgcggccaatgagaaaggcgcatgcctggcccccgccggcctgcagtctagccgtagtgcgcctgcgcgcggctaggaggggccgtcaggcggggatacagcctggaaggtgcgtgtggggctgggtctcggagtgggagacgtggagtgcagggtggaatgtagcaaagcccatccaccagccatgtactaccccccaacccggccaggctggagcgaccgtgtctggggagccgagccccgcttctcgctgcggtgagcccggactggggcacgcactgcgcagactccccgctgcagtgggcggagctcccacaggccccgccccctcctcccaccctcgttcagcctgtccagacagaagctggggcccagcggaggtagcagcagacgcctgagagcgaggccgaggcccctcagggtttggagaccctgacacacccaccttctcacctgggctctgcgtatcccccagccttgagggaagatgaagcctaaactgatgtaccaggagctgaaggtgcctgcagaggagcccgccaatgagctgcccatgaatgagattgaggcgtggaaggctgcggaaaagaaagcccgctgggtcctgctggtcctcattctggcggttgtgggcttcggagccctgatgactcagctgtttctatgggaatacggcgacttgcatctctttgggcccaaccagcgcccagccccctgctatgacccttgcgaagcagtgctggtggaaagcattcctgagggcctggacttccccaatgcctccacggggaacccttccaccagccaggcctggctgggcctgctcgccggtgcgcacagcagcctggacatcgcctccttctactggaccctcaccaacaatgacacccacacgcaggagccctctgcccagcagggtgaggaggtcctccggcagctgcagaccctggcaccaaagggcgtgaacgtccgcatcgctgtgagcaagcccagcgggccccagccacaggcggacctgcaggctctgctgcagagcggtgcccaggtccgcatggtggacatgcagaagctgacccatggcgtcctgcataccaagttctgggtggtggaccagacccacttctacctgggcagtgccaacatggactggcgttcactgacccaggtcaaggagctgggcgtggtcatgtacaactgcagctgcctggctcgagacctgaccaagatctttgaggcctactggttcctgggccaggcaggcagctccatcccatcaacttggccccggttctatgacacccgctacaaccaagagacaccaatggagatctgcctcaatggaacccctgctctggcctacctggcgagtgcgcccccacccctgtgtccaagtggccgcactccagacctgaaggctctactcaacgtggtggacaatgcccggagtttcatctacgtcgctgtcatgaactacctgcccactctggagttctcccaccctcacaggttctggcctgccattgacgatgggctgcggcgggccacctacgagcgtggcgtcaaggtgcgcctgctcatcagctgctggggacactcggagccatccatgcgggccttcctgctctctctggctgccctgcgtgacaaccatacccactctgacatccaggtgaaactctttgtggtccccgcggatgaggcccaggctcgaatcccatatgcccgtgtcaaccacaacaagtacatggtgactgaacgcgccacctacatcgacccccgcttctgtctgccccattgtggctcctcaggctctctcccctgctctcccacctctacctccacccccaccggcctgacgctgtggccccgggacccagcagagctgggggagggatcagcccccaaagaaatgggggtgcatgctgggcctggccccctggcccacccccactttccagggcaaaaagggcccagggttataataagtaaataacttgtctgtac

SEQ ID NO: 406429 - DNA, 2126 bp, Homo sapiens
aactgactcgtccgcggccgctctaccccaacaggccgccaccagcgagagtgcggccataaccatcacgtgaccgcccaccgacaccagcgagagtgcagtcgtaaccgtcacgtgaccgcccaccgtcggcccggcgctcccctccgcccgaagctagcaagcggcgcggccaatgagaaaggcgcatgcctggcccccgccggcctgcagtctagccgtagtgcgcctgcgcgcggctaggaggggccgtcaggcggggatacagcctggaaggtgcgtgtggggctgggtctcggagtgggagacgtggagtgcagggtggaatgtagcaaagcccatccaccagccatgtactaccccccaacccggccaggctggagcgaccgtgtctggggagccgagccccgcttctcgctgcggtgagcccggactggggcacgcactgcgcagactccccgctgcagtgggcggagctcccacaggccccgccccctcctcccaccctcgttcagcctgtccagacagaagctggggcccagcggaggtagcagcagacgcctgagagcgaggccgaggcccctcagggtttggagaccctgacacacccaccttctcacctgggctctgcgtatcccccagccttgagggaagatgaagcctaaactgatgtaccaggagctgaaggtgcctgcagaggagcccgccaatgagctgcccatgaatgagattgaggcgtggaaggctgcggaaaagaaagcccgctgggtcctgctggtcctcattctggcggttgtgggcttcggagccctgatgactcagctgtttctatgggaatacggcgacttgcatctctttgggcccaaccagcgcccagccccctgctatgacccttgcgaagcagtgctggtggaaagcattcctgagggcctggacttccccaatgcctccacggggaacccttccaccagccaggcctggctgggcctgctcgccggtgcgcacagcagcctggacatcgcctccttctactggaccctcaccaacaatgacacccacacgcaggagccctctgcccagcagggtgaggaggtcctccggcagctgcagaccctggcaccaaagggcgtgaacgtccgcatcgctgtgagcaagcccagcgggccccagccacaggcggacctgcaggctctgctgcagagcggtgcccaggtccgcatggtggacatgcagaagctgacccatggcgtcctgcataccaagttctgggtggtggaccagacccacttctacctgggcagtgccaacatggactggcgttcactgacccaggtcaaggagctgggcgtggtcatgtacaactgcagctgcctggctcgagacctgaccaagatctttgaggcctactggttcctgggccaggcaggcagctccatcccatcaacttggccccggttctatgacacccgctacaaccaagagacaccaatggagatctgcctcaatggaacccctgctctggcctacctggcgagtgcgcccccacccctgtgtccaagtggccgcactccagacctgaaggctctactcaacgtggtggacaatgcccggagtttcatctacgtcgctgtcatgaactacctgcccactctggagttctcccaccctcacaggttctggcctgccattgacgatgggctgcggcgggccacctacgagcgtggcgtcaaggtgcgcctgctcatcagctgctggggacactcggagccatccatgcgggccttcctgctctctctggctgccctgcgtgacaaccatacccactctgacatccaggtgaaactctttgtggtccccgcggatgaggcccaggctcgaatcccatatgcccgtgtcaaccacaacaagtacatggtgactgaacgcgccacctacatcgcctgctctcccacctctacctccacccccaccggcctgacgctgtggccccgggacccagcagagctgggggagggatcagcccccaaagaaatgggggtgcatgctgggcctggccccctggcccacccccactttccagggcaaaaagggcccagggttataataagtaaataacttgtctgtac

SEQ ID NO: 406430 - DNA, 2084 bp, Homo sapiens
aactgactcgtccgcggccgctctaccccaacaggccgccaccagcgagagtgcggccataaccatcacgtgaccgcccaccgacaccagcgagagtgcagtcgtaaccgtcacgtgaccgcccaccgtcggcccggcgctcccctccgcccgaagctagcaagcggcgcggccaatgagaaaggcgcatgcctggcccccgccggcctgcagtctagccgtagtgcgcctgcgcgcggctaggaggggccgtcaggcggggatacagcctggaaggtgcgtgtggggctgggtctcggagtgggagacgtggagtgcagggtggaatgtagcaaagcccatccaccagccatgtactaccccccaacccggccaggctggagcgaccgtgtctggggagccgagccccgcttctcgctgcggtgagcccggactggggcacgcactgcgcagactccccgctgcagtgggcggagctcccacaggccccgccccctcctcccaccctcgttcagcctgtccagacagaagctggggcccagcggaggtagcagcagacgcctgagagcgaggccgaggcccctcagggtttggagaccctgacacacccaccttctcacctgggctctgcgtatcccccagccttgagggaagatgaagcctaaactgatgtaccaggagctgaaggtgcctgcagaggagcccgccaatgagctgcccatgaatgagattgaggcgtggaaggctgcggaaaagaaagcccgctgggtcctgctggtcctcattctggcggttgtgggcttcggagccctgatgactcagctgtttctatgggaatacggcgacttgcatctctttgggcccaaccagcgcccagccccctgctatgacccttgcgaagcagtgctggtggaaagcattcctgagggcctggacttccccaatgcctccacggggaacccttccaccagccaggcctggctgggcctgctcgccggtgcgcacagcagcctggacatcgcctccttctactggaccctcaccaacaatgacacccacacgcaggagccctctgcccagcagggtgaggaggtcctccggcagctgcagaccctggcaccaaagggcgtgaacgtccgcatcgctgtgagcaagcccagcgggccccagccacaggcggacctgcaggctctgctgcagagcggtgcccaggtccgcatggtggacatgcagaagctgacccatggcgtcctgcataccaagttctgggtggtggaccagacccacttctacctgggcagtgccaacatggactggcgttcactgacccaggtcaaggagctgggcgtggtcatgtacaactgcagctgcctggctcgagacctgaccaagatctttgaggcctactggttcctgggccaggcaggcagctccatcccatcaacttggccccggttctatgacacccgctacaaccaagagacaccaatggagatctgcctcaatggaacccctgctctggcctacctggcgagtgcgcccccacccctgtgtccaagtggccgcactccagacctgaaggctctactcaacgtggtggacaatgcccggagtttcatctacgtcgctgtcatgaactacctgcccactctggagttctcccaccctcacaggttctggcctgccattgacgatgggctgcggcgggccacctacgagcgtggcgtcaaggtgcgcctgctcatcagctgctggggacactcggagccatccatgcgggccttcctgctctctctggctgccctgcgtgacaaccatacccactctgacatccaggtgaaactctttgtggtccccgcggatgaggcccaggctcgaatcccatatgcccgtgtcaaccacaacaagtacatggtgactgaacgcgccacctacatcggggctattcgcgtggctcgttgtgtggctcttcgtggggcacgtggagttttgacctgctccgtttccgacctgggccactgtcttcacggtgctccctcactgcgccaccccaggtgccacaccaagagccggtaccgagcttg

SEQ ID NO: 406431 - DNA, 928 bp, Homo sapiens
aattacgctaggtacgagcttcgttgaaatcggccgagggtggggctgggtctcggatgggagacgtggagtgcaggtaatgcatgtccatggtacacaaattcacaaggtttgtaaatgagaaaagacgtgaggttccttttgttctttacctgtggcctccgttctggcctgccattgacgatgggctgcggcgggccacctacgagcgtggcgtcaaggtgcgcctgctcatcagctgctggggacactcggagccatccatgcgggccttcctgctctctctggctgccctgcgtgacaaccatacccactctgacatccaggtgaaactctttgtggtccccgcggatgaggcccaggctcgaatcccatatgcccgtgtcaaccacaacaagtacatggtgactgaacgcgccacctacatcggaacctccaactggtctggcaactacttcacggagacggcgggcacctcgctgctggtgacgcagaatgggaggggcggcctgcggagccagctggaggccattttcctgagggactgggactccccttacagccatgaccttgacacctcagctgacagcgtgggcaacgcctgccgcctgctctgaggcccgatccagtgggcaggccaaggcctgctgggcccccgcggacccaggtgctctgggtcacggtccctgtccccgcacccccgcttctgtctgccccattgtggctcctcaggctctctcccctgctctcccacctctacctccacccccaccggcctgacgctgtggccccgggacccagcagagctgggggagggatcagcccccaaagaaatgggggtgcatgctgggcctggccccctggcccacccccactttccagggcaaaaagggcccagggttataataagtaaataacttgtctgtac

SEQ ID NO: 406432 - DNA, 883 bp, Homo sapiens
  misc_feature (61)..(61): n is a, c, g, or t
  misc_feature (119)..(119): n is a, c, g, or t
  misc_feature (172)..(172): n is a, c, g, or t
  misc_feature (174)..(174): n is a, c, g, or t
attaggcgcgtctgcgtggggccatgggtgagacactccagtactgagacctagagtccanatgcttgtaggagccaagtcgtgttctaagtatttatttaaaacaaaagaatcacgtnttcccatttgtacttcagcgctagcccctgttttgcacagccgagtactggcnantatgttctatgttgggcctcctgctgcaaaacaataaacagaggacgcagaacgcgcctaatattaggcgcgttctgcgtgacaaccatacccactctgacatccaggtgaaactctttgtggtccccgcggatgaggcccaggctcgaatcccatatgcccgtgtcaaccacaacaagtacatggtgactgaacgcgccacctacatcggaacctccaactggtctggcaactacttcacggagacggcgggcacctcgctgctggtgacgcagaatgggaggggcggcctgcggagccagctggaggccattttcctgagggactgggactccccttacagccatgaccttgacacctcagctgacagcgtgggcaacgcctgccgcctgctctgaggcccgatccagtgggcaggccaaggcctgctgggcccccgcggacccaggtgctctgggtcacggtccctgtccccgcacccccgcttctgtctgccccattgtggctcctcaggctctctcccctgctctcccacctctacctccacccccaccggcctgacgctgtggccccgggacccagcagagctgggggagggatcagcccccaaagaaatgggggtgcatgctgggcctggccccctggcccacccccactttccagggcaaaaagggcccagggttataataagtaaataacttgtctgtac

SEQ ID NO: 406433 - DNA, 1090 bp, Homo sapiens
aattacgctaggtacgagcttcgttgaaatcggccgagggtggggctgggtctcggatgggagacgtggagtgcaggtaatgcatgtccatggtacacaaattcacaaggtttgtaaatgagaaaagacgtgaggttccttttgttctttacctgtggcctccctgccctacacggggactctagggtggaatgtagcaaagcccatccaccagccatgtactaccccccaacccggccaggctggagcgaccgtgtctggggagccgagccccgcttctcgctgcggtgagcccggactggggcacgcactgcgcagactccccgctgcagtgggcggagctcccacaggccccgccccctcctcccaccctcgttcagcctgtccagacagaagctggggcccagcggaggtagcagcagacgcctgagagcgaggccgaggcccctcagggtttggagaccctgacacacccaccttctcacctgggctctgcgtatcccccagccttgagggaagatgaagcctaaactgatgtaccaggagctgaaggtgcctgcagaggagcccgccaatgagctgcccatgaatgagattgaggcgtggaaggctgcggaaaagaaagcccgctgggtcctgctggtcctcattctggcggttgtgggcttcggagccctgatgactcagctgtttctatgggaatacggcgacttgcatctctttgggcccaaccagcgcccagccccctgctatgacccttgcgaagcagtgctggtggaaagcattcctgagggcctggacttccccaatgcctccacggggaacccttccaccagccaggcctggctgggcctgctcgccggtgcgcacagcagcctggacatcgcctccttctactggacccctgctctcccacctctacctccacccccaccggcctgacgctgtggccccgggacccagcagagctgggggagggatcagcccccaaagaaatgggggtgcatgctgggcctggccccctggcccacccccactttccagggcaaaaagggcccagggttataataagtaaataacttgtctgtac

SEQ ID NO: 406434 - DNA, 848 bp, Homo sapiens
aactgactcgtccgcggccgctctaccccaacaggccgccaccagcgagagtgcggccataaccatcacgtgaccgcccaccgacaccagcgagagtgcagtcgtaaccgtcacgtgaccgcccaccgtcggcccggcgctcccctccgcccgaagctagcaagcggcgcggccaatgagaaaggcgcatgcctggcccccgccggcctgcagtctagccgtagtgcgcctgcgcgcggctaggaggggccgtcaggcggggatacagcctggaaggtgcgtgtggggctgggtctcggagtgggagacgtggagtgcagggtggaatgtagcaaagcccatccaccagccatgtactaccccccaacccggccaggctggagcgaccgtgtctggggagccgagccccgcttctcgctgcggtgagcccggactggggcacgcactgcgcagactccccgctgcagtgggcggagctcccacaggccccgccccctcctcccaccctcgttcagcctgtccagacagaagctggggcccagcggaggtagcagcagacgcctgagagcgaggccgaggcccctcagggtttggagaccctgacacacccaccttctcacctgggctctgcgtatcccccagccttgagggaagatgaagccctgctctcccacctctacctccacccccaccggcctgacgctgtggccccgggacccagcagagctgggggagggatcagcccccaaagaaatgggggtgcatgctgggcctggccccctggcccacccccactttccagggcaaaaagggcccagggttataataagtaaataacttgtctgtac

SEQ ID NO: 406435 - DNA, 1728 bp, Homo sapiens
cagatccggggatggagggagccggagaagaggagtgagaaggccggggaggcaggccctgctgtcttcctgcaggccggcagcctgctggcagtggaggaccaggccgtccaggaaaggaaggggtcaggaggtcgggcagggcctcagcaggttcagacaagtccccagaagggagctgcaggcgccctcgagtccaggccccaagcctggctccggttgtccaaagagggcctaggccaggcctctggtgcggaaactgagtcacagccagacctcagggcacggcctagacgcttacgagccaaagttaggggtagagagcagagacctccggggggtctcagggagtagggggcttcagggcctcccagtctagagccggattggcgagttagacgcttgtagatccaaggttggattggggtggggtctctgggacgttggatcgctacgcaaggattggggggattcaagtgcttagagatcgaagtctgccctgggtagggggagtcagacaattggaaagcctaggtagttatttggggaggggtctctacgccttggcgaagcgcacagctgcatctttttggcttgaggcctgaggccttgtcgagaagcttccgtgaaagggtgggccagccgggccacgagaaagaaagtgaataaatcaggaatataagtgggcggggggcccctgagaggggggtcgcaaagggtgagacatggccaccaggcgtttaaccgacgctttcttgttgttgcggaataattccatccaaaaccggcagctgttagccgagcaagtgagtagtcacatcacctccagccctctgcattcacgtagcattgctgcgcttgctgatgaccgtatggcactggtgtcaggcatcagcttagatccagaagcagcgattggtgtgacaaaacggccacctcctaagtgggtggatggagtggatgaaattcagtatgatgttggccggattaagcagaagatgaaagaattggccagccttcatgacaagcatttaaacagacccaccctggatgacagcagcgaagaggaacatgccattgagataactacccaagagatcactcagctcttccacaggtgccagcgtgccgtgcaggccctgccgagccgggcccgggcctgctccgagcaggaggggcggctgcttgggaacgtggtggcctcgctggcgcaggccctgcaggaactctccaccagcttccggcacgcacaatcaggctacctcaaacgcatgaagaatcgagaggaaagatcccagcattttttcgacacatcagtaccactaatggatgatggagacgataacactctttaccatcggggttttacagaggaccagttagttctggtggagcagaacacactgatggtggaagagcgggaacgagagattcgccagatggtacagtccatttctgacctgaatgaaatattcagggacttaggggcgatgattgtagaacagggtacagtccttgacagaattgactataacgttgaacagtcctgtatcaaaactgaagatggtttgaaacagcttcacaaggcagaacagtatcaaaagaagaatcggaagatgcttgtgattttaatattatttgtcatcatcattgtgctcattgttgtcctcgttggcgtgaagtctcgataagtggcattgggttttcgtgtgtgccgcgcgtgtggat

SEQ ID NO: 406436 - DNA, 2034 bp, Homo sapiens
cagatccggggatggagggagccggagaagaggagtgagaaggccggggaggcaggccctgctgtcttcctgcaggccggcagcctgctggcagtggaggaccaggccgtccaggaaaggaaggggtcaggaggtcgggcagggcctcagcaggttcagacaagtccccagaagggagctgcaggcgccctcgagtccaggccccaagcctggctccggttgtccaaagagggcctaggccaggcctctggtgcggaaactgagtcacagccagacctcagggcacggcctagacgcttacgagccaaagttaggggtagagagcagagacctccggggggtctcagggagtagggggcttcagggcctcccagtctagagccggattggcgagttagacgcttgtagatccaaggttggattggggtggggtctctgggacgttggatcgctacgcaaggattggggggattcaagtgcttagagatcgaagtctgccctgggtagggggagtcagacaattggaaagcctaggtagttatttggggaggggtctctacgccttggcgaagcgcacagctgcatctttttggcttgaggcctgaggccttgtcgagaagcttccgtgaaagggtgggccagccgggccacgagaaagaaagtgaataaatcaggaatataagtgggcggggggcccctgagaggggggtcgcaaagggtgagacatggccaccaggcgtttaaccgacgctttcttgttgttgcggaataattccatccaaaaccggcagctgttagccgagcaagcttgctgatgaccgtatggcactggtgtcaggcatcagcttagatccagaagcagcgattggtgtgacaaaacggccacctcctaagtgggtggatggagtggatgaaattcagtatgatgttggccggattaagcagaagatgaaagaattggccagccttcatgacaagcatttaaacagacccaccctggatgacagcagcgaagaggaacatgccattgagataactacccaagagatcactcagctcttccacaggtgccagcgtgccgtgcaggccctgccgagccgggcccgggcctgctccgagcaggaggggcggctgcttgggaacgtggtggcctcgctggcgcaggccctgcaggaactctccaccagcttccggcacgcacaatcaggctacctcaaacgcatgaagaatcgagaggaaagatcccagcattttttcgacacatcagtaccactaatggatgatggagacgataacactctttaccatcggggttttacagaggaccagttagttctggtggagcagaacacactgatggtggaagagcgggaacgagagattcgccagatggtacagtccatttctgacctgaatgaaatattcagggacttaggggcgatgattgtagaacagggtacagtccttgacagaattgactataacgttgaacagtcctgtatcaaaactgaagatggtttgaaacagcttcacaaggctggttatgaagaagaaactcaaaataacaggagtggcttatggaactacatggaggtaacagaggagggtaccaaccaaaggcccttgagcaatcaggatgttgggtaacagatttttgcttttaaatgactcctgggtggagcttccccaatgcatcgtcattccctgacccttgcatctgaccctgtgggtgggaccctccgcctccaccatccactcaaggctcacccctggctcctccaccacccggctcctgccccacacccccgatggcctttcctcccctgtaaggcgactgaggtgactcaggtcaccctgctccttcctcgtctcatctcgtccctcctttcctgcttagactgtgccagatgacccttcttgcaaaggggtgggcgggaaggccccccatgcagccaggcagtgcctggatttgtaactggccatcccagcagcagtgccctggatggaaagccacgtccctgtcaccctctcaca

SEQ ID NO: 406437 - DNA, 987 bp, Homo sapiens
cagatccggggatggagggagccggagaagaggagtgagaaggccggggaggcaggccctgctgtcttcctgcaggccggcagcctgctggcagtggaggaccaggccgtccaggaaaggaaggggtcaggaggtcgggcagggcctcagcaggttcagacaagtccccagaagggagctgcaggcgccctcgagtccaggccccaagcctggctccggttgtccaaagagggcctaggccaggcctctggtgcggaaactgagtcacagccagacctcagggcacggcctagacgcttacgagccaaagttaggggtagagagcagagacctccggggggtctcagggagtagggggcttcagggcctcccagtctagagccggattggcgagttagacgcttgtagatccaaggttggattggggtggggtctctgggacgttggatcgctacgcaaggattggggggattcaagtgcttagagatcgaagtctgccctgggtagggggagtcagacaattggaaagcctaggtagttatttggggaggggtctctacgccttggcgaagcgcacagctgcatctttttggcttgaggcctgaggccttgtcgagaagcttccgtgaaagggtgggccagccgggccacgagaaagaaagtgaataaatcaggaatataagtgggcggggggcccctgagaggggggtcgcaaagggtgagacatggccaccaggcgtttaaccgacgctttcttgttgttgcggaataattccatccaaaaccggcagctgttagccgagcaagtgagtagtcacatcacctccagccctctgcattcacgtagcattgctgcggtgagtctcctggcggcctctccgacacacggaccgtgtgcactgcggctctgcctgtttgtctgtctctgtctgtctctctgatggctgggggctgtgattggaactctggcaaatctggcttcagagc

SEQ ID NO: 406438 - DNA, 1678 bp, Homo sapiens
cagatccggggatggagggagccggagaagaggagtgagaaggccggggaggcaggccctgctgtcttcctgcaggccggcagcctgctggcagtggaggaccaggccgtccaggaaaggaaggggtcaggaggtcgggcagggcctcagcaggttcagacaagtccccagaagggagctgcaggcgccctcgagtccaggccccaagcctggctccggttgtccaaagagggcctaggccaggcctctggtgcggaaactgagtcacagccagacctcagggcacggcctagacgcttacgagccaaagttaggggtagagagcagagacctccggggggtctcagggagtagggggcttcagggcctcccagtctagagccggattggcgagttagacgcttgtagatccaaggttggattggggtggggtctctgggacgttggatcgctacgcaaggattggggggattcaagtgcttagagatcgaagtctgccctgggtagggggagtcagacaattggaaagcctaggtagttatttggggaggggtctctacgccttggcgaagcgcacagctgcatctttttggcttgaggcctgaggccttgtcgagaagcttccgtgaaagggtgggccagccgggccacgagaaagaaagtgaataaatcaggaatataagtgggcggggggcccctgagaggggggtcgcaaagggtgagacatggccaccaggcgtttaaccgacgctttcttgttgttgcggaataattccatccaaaaccggcagctgttagccgagcaagcttgctgatgaccgtatggcactggtgtcaggcatcagcttagatccagaagcagcgattggtgtgacaaaacggccacctcctaagtgggtggatggagtggatgaaattcagtatgatgttggccggattaagcagaagatgaaagaattggccagccttcatgacaagcatttaaacagacccaccctggatgacagcagcgaagaggaacatgccattgagataactacccaagagatcactcagctcttccacaggtgccagcgtgccgtgcaggccctgccgagccgggcccgggcctgctccgagcaggaggggcggctgcttgggaacgtggtggcctcgctggcgcaggccctgcaggaactctccaccagcttccggcacgcacaatcaggctacctcaaacgcatgaagaatcgagaggaaagatcccagcattttttcgacacatcagtaccactaatggatgatggagacgataacactctttaccatcggggttttacagaggaccagttagttctggtggagcagaacacactgatggtggaagagcgggaacgagagattcgccagatggtacagtccatttctgacctgaatgaaatattcagggacttaggggcgatgattgtagaacagggtacagtccttgacagaattgactataacgttgaacagtcctgtatcaaaactgaagatggtttgaaacagcttcacaaggcagaacagtatcaaaagaagaatcggaagatgcttgtgattttaatattatttgtcatcatcattgtgctcattgttgtcctcgttggcgtgaagtctcgataagtggcattgggttttcgtgtgtgccgcgcgtgtggat

SEQ ID NO: 406439 - DNA, 1515 bp, Homo sapiens
cagatccggggatggagggagccggagaagaggagtgagaaggccggggaggcaggccctgctgtcttcctgcaggccggcagcctgctggcagtggaggaccaggccgtccaggaaaggaaggggtcaggaggtcgggcagggcctcagcaggttcagacaagtccccagaagggagctgcaggcgccctcgagtccaggccccaagcctggctccggttgtccaaagagggcctaggccaggcctctggtgcggaaactgagtcacagccagacctcagggcacggcctagacgcttacgagccaaagttaggggtagagagcagagacctccggggggtctcagggagtagggggcttcagggcctcccagtctagagccggattggcgagttagacgcttgtagatccaaggttggattggggtggggtctctgggacgttggatcgctacgcaaggattggggggattcaagtgcttagagatcgaagtctgccctgggtagggggagtcagacaattggaaagcctaggtagttatttggggaggggtctctacgccttggcgaagcgcacagctgcatctttttggcttgaggcctgaggccttgtcgagaagcttccgtgaaagggtgggccagccgggccacgagaaagaaagtgaataaatcaggaatataagtgggcggggggcccctgagaggggggtcgcaaagggtgagacatggccaccaggcgtttaaccgacgctttcttgttgttgcggaataattccatccaaaaccggcagctgttagccgagcaagcttgctgatgaccgtatggcactggtgtcaggcatcagcttagatccagaagcagcgattggtgtgacaaaacggccacctcctaagtgggtggatggagtggatgaaattcagtatgatgttggccggattaagcagaagatgaaagaattggccagccttcatgacaagcatttaaacagacccaccctggatgacagcagcgaagaggaacatgccattgagataactacccaagagatcactcaggcatgaagaatcgagaggaaagatcccagcattttttcgacacatcagtaccactaatggatgatggagacgataacactctttaccatcggggttttacagaggaccagttagttctggtggagcagaacacactgatggtggaagagcgggaacgagagattcgccagatggtacagtccatttctgacctgaatgaaatattcagggacttaggggcgatgattgtagaacagggtacagtccttgacagaattgactataacgttgaacagtcctgtatcaaaactgaagatggtttgaaacagcttcacaaggcagaacagtatcaaaagaagaatcggaagatgcttgtgattttaatattatttgtcatcatcattgtgctcattgttgtcctcgttggcgtgaagtctcgataagtggcattgggttttcgtgtgtgccgcgcgtgtggat

SEQ ID NO: 406440 - DNA, 606 bp, Homo sapiens
  misc_feature (174)..(174): n is a, c, g, or t
gggtggtttggttccaccaataaataaattttctatttctatactaagctcatcctttggaacatcatcttcatctccagattcttctccaagcttcttccaccagggtgcttgtatgtgcttcagggttgtgagatgggcctgcttggccttggctgccacaggcctggatcnacttaggaagagctcaggttctttccccctcgtgccgaattcggcacgagggaaaaacacatccaacaatcaagtttctaagaaggtgtcaagtggggaataataataatgtataataatcaagaaattagtttattaaaaggaagcagaagcattgaccattttttcccagagaagaggagaaatctgtagtgagcaaaggacagaccatgaatcctccttgagaagtagtactctcagaaaggagaagcgccactcaagttcttttaacccaagactttagagaaattaggtccaagatttttatatgttcagttgtttatgtataaaaataactttctggattttgtggggaggagcaggagaggaaggaagttaatacctatgtaatacatagaaacttccacaataaaatgccattgatggttgaaa

SEQ ID NO: 406441 - DNA, 1738 bp, Homo sapiens
cggtatcgccacttggagaccaccgcgaatgaagtttgcattttcctctgttcttgagcccagcttcttctcgtctcccaccccagcttcccggcattggaagaagggaccgtcctcttccttgtcttggccacccaaatcctggtatcgaaagggttgaacggaccggaagtgtgcagcagcgacgggtccccagctaatcgacgccggaagtagcaattactagacaagcattccgccgccggcttcgctatggcggcaattcccccagattcctggcagccacccaacgtttacttggagaccagcatgggaatcattgtgctggagctgtactggaagcatgctccaaagacctgtaagaactttgctgagttggctcgtcgaggttactacaatggcacaaaattccacagaattatcaaagacttcatgatccaaggaggtgacccaacagggacaggtcgaggtggtgcatctatctatggcaaacagtttgaagatgaacttcatccagacttgaaattcacgggggctggaattctcgcaatggccaatgcggggccagataccaatggcagccagttctttgtgaccctcgcccccacccagtggcttgacggcaaacacaccatttttggccgagtgtgtcagggcataggaatggtgaatcgcgtgggaatggtagaaacaaactcccaggaccgccctgtggacgacgtgaagatcattaaggcatacccttctgggtagacttgctaccctcttgagcagctcttctgagatggccccagtgaaccagcttctagatgacatagaatgacatgtaatgctaaatttcattttggctttgcaagtcatgaagcttaggaggcctggcatcttgggtgagttagagatggaagtacattttaataggatgcttcttttctcttcccccagtgcctaggttgccagagcatttgcacaaatgcccctgtttatcaataggtgactacttactacacatgaaccataatgctgcttcttgtgcatgtctgctctgatatacgtcgaacaatgtagcagccactgtcatttctcagtggttttgcctaaccaaacttcttcctaaggagatttatattctggcctacacagcagtccttgatggctgacagccacagaattccaaaccaagtagtgtctgtcagccctcttaactctgtgcacgccctatttcagtcttttacatttgttcttctagggaatgtatgcatctctatatatattttccctctcaaaaccagaacatcaacagtgctgtttctgacacttcagacatcccacgcaaagccacattgaatttttgccaaatgaaaaacacatccaacaatcaagtttctaagaaggtgtcaagtggggaataataataatgtataataatcaagaaattagtttattaaaaggaagcagaagcattgaccattttttcccagagaagaggagaaatctgtagtgagcaaaggacagaccatgaatcctccttgagaagtagtactctcagaaaggagaagcgccactcaagttcttttaacccaagactttagagaaattaggtccaagatttttatatgttcagttgtttatgtataaaaataactttctggattttgtggggaggagcaggagaggaaggaagttaatacctatgtaatacatagaaacttccacaataaaatgccattgatggttgaaa

SEQ ID NO: 406442 - DNA, 1346 bp, Homo sapiens
gagaacagtgttttcttccggaaaagaaacgggggctgtgacaggctccctgtggtgaagccgactaaaaggtcgaggtggtgcatctatctatggcaaacagtttgaagatgaacttcatccagacttgaaattcacgggggctggaattctcgcaatggccaatgcggggccagataccaatggcagccagttctttgtgaccctcgcccccacccagtggcttgacggcaaacacaccatttttggccgagtgtgtcagggcataggaatggtgaatcgcgtgggaatggtagaaacaaactcccaggaccgccctgtggacgacgtgaagatcattaaggcatacccttctgggtagacttgctaccctcttgagcagctcttctgagatggccccagtgaaccagcttctagatgacatagaatgacatgtaatgctaaatttcattttggctttgcaagtcatgaagcttaggaggcctggcatcttgggtgagttagagatggaagtacattttaataggatgcttcttttctcttcccccagtgcctaggttgccagagcatttgcacaaatgcccctgtttatcaataggtgactacttactacacatgaaccataatgctgcttcttgtgcatgtctgctctgatatacgtcgaacaatgtagcagccactgtcatttctcagtggttttgcctaaccaaacttcttcctaaggagatttatattctggcctacacagcagtccttgatggctgacagccacagaattccaaaccaagtagtgtctgtcagccctcttaactctgtgcacgccctatttcagtcttttacatttgttcttctagggaatgtatgcatctctatatatattttccctctcaaaaccagaacatcaacagtgctgtttctgacacttcagacatcccacgcaaagccacattgaatttttgccaaatgaaaaacacatccaacaatcaagtttctaagaaggtgtcaagtggggaataataataatgtataataatcaagaaattagtttattaaaaggaagcagaagcattgaccattttttcccagagaagaggagaaatctgtagtgagcaaaggacagaccatgaatcctccttgagaagtagtactctcagaaaggagaagcgccactcaagttcttttaacccaagactttagagaaattaggtccaagatttttatatgttcagttgtttatgtataaaaataactttctggattttgtggggaggagcaggagaggaaggaagttaatacctatgtaatacatagaaacttccacaataaaatgccattgatggttgaaa

SEQ ID NO: 406443 - DNA, 1495 bp, Homo sapiens
cggtatcgccacttggagaccaccgcgaatgaagtttgcattttcctctgttcttgagcccagcttcttctcgtctcccaccccagcttcccggcattggaagaagggaccgtcctcttccttgtcttggccacccaaatcctggtatcgaaagggttgaacggaccggaagtgtgcagcagcgacgggtccccagctaatcgacgccggaagtagcaattactagacaagcattccgccgccggcttcgctatggcggcaattcccccagattcctggcagccacccaacgtttacttggagaccagcatgggaatcattgtgctggagctgtactggaagcatgctccaaagacctgtaagaactttgctgagttggctcgtcgaggttactacaatggcacaaaattccacagaattatcaaagacttcatgatccaaggaggtgacccaacagggacaggtcgaggtggtgcatctatctatggcaaacagtttgaagatgaacttcatccagacttgaaattcacggtcttctgagatggccccagtgaaccagcttctagatgacatagaatgacatgtaatgctaaatttcattttggctttgcaagtcatgaagcttaggaggcctggcatcttgggtgagttagagatggaagtacattttaataggatgcttcttttctcttcccccagtgcctaggttgccagagcatttgcacaaatgcccctgtttatcaataggtgactacttactacacatgaaccataatgctgcttcttgtgcatgtctgctctgatatacgtcgaacaatgtagcagccactgtcatttctcagtggttttgcctaaccaaacttcttcctaaggagatttatattctggcctacacagcagtccttgatggctgacagccacagaattccaaaccaagtagtgtctgtcagccctcttaactctgtgcacgccctatttcagtcttttacatttgttcttctagggaatgtatgcatctctatatatattttccctctcaaaaccagaacatcaacagtgctgtttctgacacttcagacatcccacgcaaagccacattgaatttttgccaaatgaaaaacacatccaacaatcaagtttctaagaaggtgtcaagtggggaataataataatgtataataatcaagaaattagtttattaaaaggaagcagaagcattgaccattttttcccagagaagaggagaaatctgtagtgagcaaaggacagaccatgaatcctccttgagaagtagtactctcagaaaggagaagcgccactcaagttcttttaacccaagactttagagaaattaggtccaagatttttatatgttcagttgtttatgtataaaaataactttctggattttgtggggaggagcaggagaggaaggaagttaatacctatgtaatacatagaaacttccacaataaaatgccattgatggttgaaa

SEQ ID NO: 406444 - DNA, 1718 bp, Homo sapiens
taacgctaggtacgaggctgggtggtgctgttcttgagcccagcttcttctcgtctcccaccccagcttcccggcattggaagaagggaccgtcctcttccttgtcttggccacccaaatcctggtatcgaaagggttgaacggaccggaagtgtgcagcagcgacgggtccccagctaatcgacgccggaagtagcaattactagacaagcattccgccgccggcttcgctatggcggcaattcccccagattcctggcagccacccaacgtttacttggagaccagcatgggaatcattgtgctggagctgtactggaagcatgctccaaagacctgtaagaactttgctgagttggctcgtcgaggttactacaatggcacaaaattccacagaattatcaaagacttcatgatccaaggaggtgacccaacagggacaggtcgaggtggtgcatctatctatggcaaacagtttgaagatgaacttcatccagacttgaaattcacgggggctggaattctcgcaatggccaatgcggggccagataccaatggcagccagttctttgtgaccctcgcccccacccagtggcttgacggcaaacacaccatttttggccgagtgtgtcagggcataggaatggtgaatcgcgtgggaatggtagaaacaaactcccaggaccgccctgtggacgacgtgaagatcattaaggcatacccttctgggtagacttgctaccctcttgagcagctcttctgagatggccccagtgaaccagcttctagatgacatagaatgacatgtaatgctaaatttcattttggctttgcaagtcatgaagcttaggaggcctggcatcttgggtgagttagagatggaagtacattttaataggatgcttcttttctcttcccccagtgcctaggttgccagagcatttgcacaaatgcccctgtttatcaataggtgactacttactacacatgaaccataatgctgcttcttgtgcatgtctgctctgatatacgtcgaacaatgtagcagccactgtcatttctcagtggttttgcctaaccaaacttcttcctaaggagatttatattctggcctacacagcagtccttgatggctgacagccacagaattccaaaccaagtagtgtctgtcagccctcttaactctgtgcacgccctatttcagtcttttacatttgttcttctagggaatgtatgcatctctatatatattttccctctcaaaaccagaacatcaacagtgctgtttctgacacttcagacatcccacgcaaagccacattgaatttttgccaaatgaaaaacacatccaacaatcaagtttctaagaaggtgtcaagtggggaataataataatgtataataatcaagaaattagtttattaaaaggaagcagaagcattgaccattttttcccagagaagaggagaaatctgtagtgagcaaaggacagaccatgaatcctccttgagaagtagtactctcagaaaggagaagcgccactcaagttcttttaacccaagactttagagaaattaggtccaagatttttatatgttcagttgtttatgtataaaaataactttctggattttgtggggaggagcaggagaggaaggaagttaatacctatgtaatacatagaaacttccacaataaaatgccattgatggttgaaa

SEQ ID NO: 406445 - DNA, 1189 bp, Homo sapiens
cggtatcgccacttggagaccaccgcgaatgaagtttgcattttcctctgttcttgagcccagcttcttctcgtctcccaccccagcttcccggcattggaagaagggaccgtcctcttccttgtcttggccacccaaatcctggtatcgaaagggttgaacggaccggaagtgtgcagcagcgacgggtccccagctaatcgacgccggaagtagcaattactagacaagcattccgccgccggcttcgctatggcggcaattcccccagattcctggcagccacccaacgtttacttggagaccagcatgggaatcattgtgctggagctgtactggaagcatgctccaaagacctgtaagaactttgctgagttggctcgtcgaggttactacaatggcacaaaattccacagaattatcaaagacttcatgatccaaggaggtgacccaacagggacaggtcgaggtggtgcatctatctatggcaaacagtttgaagatgaacttcatccagacttgaaattcacgggggctggaattctcgcaatggccaatgcggggccagataccaatggcagccagttctttgtgaccctcgcccccacccagtggcttgacggcaaacacaccatttttggccgagtgtgtcagggcataggaatggtgaatcgcgtgggaatggtagaaacaaactcccaggaccgccctgtggacgacgtgaagatcattaaggcatacccttctgggtagacttgctaccctcttgagcagcaaccataatgctgcttcttgtgcatgtctgctctgatatacgtcgaacaatgtagcagccactgtcatttctcagtggttttgcctaaccaaacttcttcctaaggagatttctagggaatgtatgcatctctatatatattttccctctcaaaaccagaacatcaacagtgctgtttctgacacttcagacatcccacgcaaagccacattgaatttttgccaaatgaaaaacacatccaacaatcaagtttccaagactttagagaaattaggtccaagatttttatatgttcagttgtttatgtataaaaataactttctggattttgtggggaggagcaggagaggaaggaagttaatacctatgtaatacatagaaacttccacaataaaatgccattgatggttgaaa

SEQ ID NO: 406446 - DNA, 1838 bp, Homo sapiens
cccctcggaccaccggactggcctggggcgggacgtgggcgcgggggcgcggcgtgcggcacgctgcagggctgaagcggcggcggcggtggggactgcacgtagcccggcgctcggcatggctctcctggtgctcggtctggtgagctgtaccttctttctggcagtgaatggtctgtattcctctagtgatgatgtgatcgaattaactccatcgaatttcaaccgagaagttattcagagtgatagtttgtggcttgtagaattctatgctccatggtgtggtcactgtcaaagattaacaccagaatggaagaaagcagcaactgcattaaaagatgttgtcaaagttggtgcagttgatgcagataagcatcattccctaggaggtcagtatggtgttcagggatttcctaccattaagatttttggatccaacaaaaacagaccagaagattaccaaggtggcagaactggtgaagccattgtagatgctgcgctgagtgctctgcgccagctcgtgaaggatcgcctcgggggacggagcggaggatacagttctggaaaacaaggcagaagtgatagttcaagtaagaaggatgtgattgagctgacagacgacagctttgataagaatgttctggacagtgaagatgtttggatggttgagttctatgctccttggtgtggacactgcaaaaacctagagccagagtgggctgccgcagcttcagaagtaaaagagcagacgaaaggaaaagtgaaactggcagctgtggatgctacagtcaatcaggttctggcctcccgatacgggattagaggatttcctacaatcaagatatttcagaaaggcgagtctcctgtggattatgacggtgggcggacaagatccgacatcgtgtcccgggcccttgatttgttttctgataacgccccacctcctgagctgcttgagattatcaacgaggacattgccaagaggacgtgtgaggagcaccagctctgtgttgtggctgtgctgccccatatccttgatactggagctgcaggcagaaattcttatctggaagttcttctgaagttggcagacaaatacaaaaagaaaatgtgggggtggctgtggacagaagctggagcccagtctgaacttgagaccgcgttggggattggagggtttgggtaccccgccatggccgccatcaatgcacgcaagatgaaatttgctctgctaaaaggctccttcagtgagcaaggcatcaacgagtttctcagggagctctcttttgggcgtggctccacggcacctgtaggaggcggggctttccctaccatcgttgagagagagccttgggacggcagggatggcgagcttcccgtggaggatgacattgacctcagtgatgtggagcttgatgacttagggaaagatgagttgtgagagccacaacagaggcttcagaccattttcttttcttgggagccagtggatttttccagcagtgaagggacattctctacactcagatgactctaccagtggccttttaaccaagaagtagtacttgattggtcatttgaaaacactgcaacagtgaacttttgcatctcaagaaaacattgaaaaattctatgaattgttgtagccggtgaattgagtcgtattctgtcacataatattttgaagaaaacttggctgtcgaaacatttttctctctgactgctgcttgaatgttcttggaggctgtttcttatgtatgggttttttttaatgtgatcccttcatttgaatattaatggctttttccattaaagaataaaatattttggacaatgcc

SEQ ID NO: 406447 - DNA, 1465 bp, Homo sapiens
cccctcggaccaccggactggcctggggcgggacgtgggcgcgggggcgcggcgtgcggcacgctgcagggctgaagcggcggcggcggtggggactgcacgtagcccggcgctcggcatggctctcctggtgctcggtctggtgagctgtaccttctttctggcagtgaatggtctgtattcctctagtgatgatgtgatcgaattaactccatcgaatttcaaccgagaagttgcagacacgttcattccagcagtgcatcagtatctgtgggctttgtcagcacattctcatagctcccataggtgctgggtccacttgtccaccagcattcaaccacccagcacatgggacagcacaagccagcacactgcccatctcaacacagcatagtatcgtcccacaacgctttggtgccaagcttgcaatgcccagcatcaacaagcccatccacttccgcatcagcgccagggtccaagtcatagggtaggtatccagcgggcatattcacatcacccacatatcaacagcattttcttgaggcatacccacaccacacacacaccagcaacgcagcacaggcatctcaccacacagggtagggccaggcaaactagggtggacaggcaccattaggtcaagaatagcgtggcggctatggcagtaggctcatgccggcccagccatccgtcgcacagggaatcgcaacatcggagcgggggcaaccgcacaggccggcagggcatcaccaaggccatgtcgcggcacaacgaaccacgcgggcacagcaaagtcggaatccacggctccacacacgtcccaccacacgcgcatagctcgccatccgcaagccctgcaacacaggcaagagcaccaggcattccggcaatccaacgcacatggctcccatggggaaacacgacatgcacccggcctacgcaccccgggcactcggcgctcgcacgatacctacacggcctcccgcacggcgtggctgggaaccagcttcgggcagacaaaacaccctacgaacacgcccacacacagttagggagcacggccacgccacacacaccacaccacaggtacaacacacgcagccagcacacgaaacaacgggacacacccaggagcaacacgttcgcgacccgatcttgggtctgagcttgcaaccacacacggcgccaacacacagccgcgacgtcatcatggggagcagactcacaccgaagcacacacgggaccccaccgaaccgagcacgtctccccaacccaacacccgtcggcgcaagcaaactcacaaccagggcgcgcagatcaactccgatgccagcagtacaccagctggcgcgacgcaccaactccaagcaaccaccaaccccgccgcgaccacacctacaatcagggtagcaccgagacacgtcgcccaacccaatcagcacgacgggacacatctacatccca

SEQ ID NO: 406448 - DNA, 2316 bp, Homo sapiens
ccctttatatgctctaggccctgtacaaactgtacggtaactggccccgggattttattgcgcctcccgattttatacgggttgcagtactccgggctcggcatggctctcctgggtgctcggtctggtgagctgtaccttctttctggcagtgaatggtctgtattcctctagtgatgatgtgatcgaattaactccatcgaatttcaaccgagaagttattcagagtgatagtttgtggcttgtagaattctatgctccatggtgtggtcactgtcaaagattaacaccagaatggaagaaagcagcaactgcattaaaagatgttgtcaaagttggtgcagttgatgcagataagcatcattccctaggaggtcagtatggtgttcagggatttcctaccattaagatttttggatccaacaaaaacagaccagaagattaccaaggtggcagaactggtgaagccattgtagatgctgcgctgagtgctctgcgccagctcgtgaaggatcgcctcgggggacggagcggaggatacagttctggaaaacaaggcagaagtgatagttcaagtaagaaggatgtgattgagctgacagacgacagctttgataagaatgttctggacagtgaagatgtttggatggttgagttctatgctccttggtgtggacactgcaaaaacctagagccagagtgggctgccgcagcttcagaagtaaaagagcagacgaaaggaaaagtgaaactggcagctgtggatgctacagtcaatcaggttctggcctcccgatacgggattagaggatttcctacaatcaagatatttcagaaaggcgagtctcctgtggattatgacggtgggcggacaagatccgacatcgtgtcccgggcccttgatttgttttctgataacgccccacctcctgagctgcttgagattatcaacgaggacattgccaagaggacgtgtgaggagcaccagctctgtgttgtggctgtgctgccccatatccttgatactggagctgcaggcagaaattcttatctggaagttcttctgaagttggcagacaaatacaaaaagaaaatgtgggggtggctgtggacagaagctggagcccagtctgaacttgagaccgcgttggggattggagggtttgggtaccccgccatggccgccatcaatgcacgcaagatgaaatttgctctgctaaaaggctccttcagtgagcaaggcatcaacgagtttctcagggagctctcttttgggcgtggctccacggcacctgtaggaggcggggctttccctaccatcgttgagagagagccttgggacggcagggatggcgagcttcccgtggaggatgacattgacctcagtgatgtggagcttgatgacttagggaaagatgagttgtgagagccacaacagaggcttcagaccattttcttttcttgggagccagtggatttttccagcagtgaagggacattctctacactcagatgactctaccagtggccttttaaccaagaagtagtacttgattggtcatttgaaaacactgcaacagtgaacttttgcatctcaagaaaacattgaaaaattctatgaattgttgtagccggtgaattgagtcgtattctgtcacataatattttgaagaaaacttggctgtcgaaacatttttctctctgactgctgcttgaatgttcttggaggctgtttcttatgtatgggttttttttaatgtgatcccttcatttgaatattaatggctttttccattaaagaataaaatattttggacaatgccgataaatgtatgaagttagtatccacatcataaattcagagtgatgtttagcagtaaatcaatattttgaagtgatacacagatgtctttcctccccacaaacttttttaaacaaaaaacaagacctcttttctttagatggtgccacctatgcccaccacaacagagattttacatggaaaccgggctcagtgagaactgatttcctgcccaatatttgtctttgggctgtctctagtgactaattattaaggaatctagctggttatacagttcaaggctttctatgttgttaatgaacctcaaaatagccgttaagacatgaaatacagcagcaggttaccaatgcgaacaggtagttcgcatttatgtaaaacattcagaaaatgaagttttgaatttgttggaacattcaaaggacttgagagcattttattgtaacttaaaaaaataaatacaactgtcactaacttttgtgagcaatttctctgaa

SEQ ID NO: 406449 - DNA, 2189 bp, Homo sapiens
cccctcggaccaccggactggcctggggcgggacgtgggcgcgggggcgcggcgtgcggcacgctgcagggctgaagcggcggcggcggtggggactgcacgtagcccggcgctcggcatggctctcctggtgctcggtgtggtcactgtcaaagattaacaccagaatggaagaaagcagcaactgcattaaaagatgttgtcaaagttggtgcagttgatgcagataagcatcattccctaggaggtcagtatggtgttcagggatttcctaccattaagatttttggatccaacaaaaacagaccagaagattaccaaggtggcagaactggtgaagccattgtagatgctgcgctgagtgctctgcgccagctcgtgaaggatcgcctcgggggacggagcggaggatacagttctggaaaacaaggcagaagtgatagttcaagtaagaaggatgtgattgagctgacagacgacagctttgataagaatgttctggacagtgaagatgtttggatggttgagttctatgctccttggtgtggacactgcaaaaacctagagccagagtgggctgccgcagcttcagaagtaaaagagcagacgaaaggaaaagtgaaactggcagctgtggatgctacagtcaatcaggttctggcctcccgatacgggattagaggatttcctacaatcaagatatttcagaaaggcgagtctcctgtggattatgacggtgggcggacaagatccgacatcgtgtcccgggcccttgatttgttttctgataacgccccacctcctgagctgcttgagattatcaacgaggacattgccaagaggacgtgtgaggagcaccagctctgtgttgtggctgtgctgccccatatccttgatactggagctgcaggcagaaattcttatctggaagttcttctgaagttggcagacaaatacaaaaagaaaatgtgggggtggctgtggacagaagctggagcccagtctgaacttgagaccgcgttggggattggagggtttgggtaccccgccatggccgccatcaatgcacgcaagatgaaatttgctctgctaaaaggctccttcagtgagcaaggcatcaacgagtttctcagggagctctcttttgggcgtggctccacggcacctgtaggaggcggggctttccctaccatcgttgagagagagccttgggacggcagggatggcgagcttcccgtggaggatgacattgacctcagtgatgtggagcttgatgacttagggaaagatgagttgtgagagccacaacagaggcttcagaccattttcttttcttgggagccagtggatttttccagcagtgaagggacattctctacactcagatgactctaccagtggccttttaaccaagaagtagtacttgattggtcatttgaaaacactgcaacagtgaacttttgcatctcaagaaaacattgaaaaattctatgaattgttgtagccggtgaattgagtcgtattctgtcacataatattttgaagaaaacttggctgtcgaaacatttttctctctgactgctgcttgaatgttcttggaggctgtttcttatgtatgggttttttttaatgtgatcccttcatttgaatattaatggctttttccattaaagaataaaatattttggacaatgccgataaatgtatgaagttagtatccacatcataaattcagagtgatgtttagcagtaaatcaatattttgaagtgatacacagatgtctttcctccccacaaacttttttaaacaaaaaacaagacctcttttctttagatggtgccacctatgcccaccacaacagagattttacatggaaaccgggctcagtgagaactgatttcctgcccaatatttgtctttgggctgtctctagtgactaattattaaggaatctagctggttatacagttcaaggctttctatgttgttaatgaacctcaaaatagccgttaagacatgaaatacagcagcaggttaccaatgcgaacaggtagttcgcatttatgtaaaacattcagaaaatgaagttttgaatttgttggaacattcaaaggacttgagagcattttattgtaacttaaaaaaataaatacaactgtcactaacttttgtgagcaatttctctgaa

SEQ ID NO: 406450 - DNA, 2056 bp, Homo sapiens
tttaatgcagttgctgctttaaaagattaacaacatcttttaatgcagttgctgctttaaaagatgttgtcaaagttggtgcagttgatgcagataagcatcattccctaggaggtcagtatggtgttcagggatttcctaccattaagatttttggatccaacaaaaacagaccagaagattaccaaggtggcagaactggtgaagccattgtagatgctgcgctgagtgctctgcgccagctcgtgaaggatcgcctcgggggacggagcggaggatacagttctggaaaacaaggcagaagtgatagttcaagtaagaaggatgtgattgagctgacagacgacagctttgataagaatgttctggacagtgaagatgtttggatggttgagttctatgctccttggtgtggacactgcaaaaacctagagccagagtgggctgccgcagcttcagaagtaaaagagcagacgaaaggaaaagtgaaactggcagctgtggatgctacagtcaatcaggttctggcctcccgatacgggattagaggatttcctacaatcaagatatttcagaaaggcgagtctcctgtggattatgacggtgggcggacaagatccgacatcgtgtcccgggcccttgatttgttttctgataacgccccacctcctgagctgcttgagattatcaacgaggacattgccaagaggacgtgtgaggagcaccagctctgtgttgtggctgtgctgccccatatccttgatactggagctgcaggcagaaattcttatctggaagttcttctgaagttggcagacaaatacaaaaagaaaatgtgggggtggctgtggacagaagctggagcccagtctgaacttgagaccgcgttggggattggagggtttgggtaccccgccatggccgccatcaatgcacgcaagatgaaatttgctctgctaaaaggctccttcagtgagcaaggcatcaacgagtttctcagggagctctcttttgggcgtggctccacggcacctgtaggaggcggggctttccctaccatcgttgagagagagccttgggacggcagggatggcgagcttcccgtggaggatgacattgacctcagtgatgtggagcttgatgacttagggaaagatgagttgtgagagccacaacagaggcttcagaccattttcttttcttgggagccagtggatttttccagcagtgaagggacattctctacactcagatgactctaccagtggccttttaaccaagaagtagtacttgattggtcatttgaaaacactgcaacagtgaacttttgcatctcaagaaaacattgaaaaattctatgaattgttgtagccggtgaattgagtcgtattctgtcacataatattttgaagaaaacttggctgtcgaaacatttttctctctgactgctgcttgaatgttcttggaggctgtttcttatgtatgggttttttttaatgtgatcccttcatttgaatattaatggctttttccattaaagaataaaatattttggacaatgccgataaatgtatgaagttagtatccacatcataaattcagagtgatgtttagcagtaaatcaatattttgaagtgatacacagatgtctttcctccccacaaacttttttaaacaaaaaacaagacctcttttctttagatggtgccacctatgcccaccacaacagagattttacatggaaaccgggctcagtgagaactgatttcctgcccaatatttgtctttgggctgtctctagtgactaattattaaggaatctagctggttatacagttcaaggctttctatgttgttaatgaacctcaaaatagccgttaagacatgaaatacagcagcaggttaccaatgcgaacaggtagttcgcatttatgtaaaacattcagaaaatgaagttttgaatttgttggaacattcaaaggacttgagagcattttattgtaacttaaaaaaataaatacaactgtcactaacttttgtgagcaatttctctgaa

SEQ ID NO: 406451 - DNA, 2192 bp, Homo sapiens
gccagaaatcactcgaacccgggaggcggaggttgcagtgacctgagatggtgccactgtactccagcctgggcaacagggtgagactccatctcaaaaaataataataataaataaaaaaggaaaaggaattggttttccaagtgttaagtttagtgcaaaatgcattgtggggagaaagtgtgttctgtcagagatacacgtgtcagaactgtgtcacacctggtgaagccgacagtgaggtaaagacacagtcttgggccgggccagatgaggcacttgctgaaggccgggctgaggaccgcctaccttccgtctcctgtaggtggcagaactggtgaagccattgtagatgctgcgctgagtgctctgcgccagctcgtgaaggatcgcctcgggggacggagcggaggatacagttctggaaaacaaggcagaagtgatagttcaagtaagaaggatgtgattgagctgacagacgacagctttgataagaatgttctggacagtgaagatgtttggatggttgagttctatgctccttggtgtggacactgcaaaaacctagagccagagtgggctgccgcagcttcagaagtaaaagagcagacgaaaggaaaagtgaaactggcagctgtggatgctacagtcaatcaggttctggcctcccgatacgggattagaggatttcctacaatcaagatatttcagaaaggcgagtctcctgtggattatgacggtgggcggacaagatccgacatcgtgtcccgggcccttgatttgttttctgataacgccccacctcctgagctgcttgagattatcaacgaggacattgccaagaggacgtgtgaggagcaccagctctgtgttgtggctgtgctgccccatatccttgatactggagctgcaggcagaaattcttatctggaagttcttctgaagttggcagacaaatacaaaaagaaaatgtgggggtggctgtggacagaagctggagcccagtctgaacttgagaccgcgttggggattggagggtttgggtaccccgccatggccgccatcaatgcacgcaagatgaaatttgctctgctaaaaggctccttcagtgagcaaggcatcaacgagtttctcagggagctctcttttgggcgtggctccacggcacctgtaggaggcggggctttccctaccatcgttgagagagagccttgggacggcagggatggcgagcttcccgtggaggatgacattgacctcagtgatgtggagcttgatgacttagggaaagatgagttgtgagagccacaacagaggcttcagaccattttcttttcttgggagccagtggatttttccagcagtgaagggacattctctacactcagatgactctaccagtggccttttaaccaagaagtagtacttgattggtcatttgaaaacactgcaacagtgaacttttgcatctcaagaaaacattgaaaaattctatgaattgttgtagccggtgaattgagtcgtattctgtcacataatattttgaagaaaacttggctgtcgaaacatttttctctctgactgctgcttgaatgttcttggaggctgtttcttatgtatgggttttttttaatgtgatcccttcatttgaatattaatggctttttccattaaagaataaaatattttggacaatgccgataaatgtatgaagttagtatccacatcataaattcagagtgatgtttagcagtaaatcaatattttgaagtgatacacagatgtctttcctccccacaaacttttttaaacaaaaaacaagacctcttttctttagatggtgccacctatgcccaccacaacagagattttacatggaaaccgggctcagtgagaactgatttcctgcccaatatttgtctttgggctgtctctagtgactaattattaaggaatctagctggttatacagttcaaggctttctatgttgttaatgaacctcaaaatagccgttaagacatgaaatacagcagcaggttaccaatgcgaacaggtagttcgcatttatgtaaaacattcagaaaatgaagttttgaatttgttggaacattcaaaggacttgagagcattttattgtaacttaaaaaaataaatacaactgtcactaacttttgtgagcaatttctctgaa

SEQ ID NO: 406452 - DNA, 2277 bp, Homo sapiens
cccctcggaccaccggactggcctggggcgggacgtgggcgcgggggcgcggcgtgcggcacgctgcagggctgaagcggcggcggcggtggggactgcacgtagcccggcgctcggcatggctctcctggtgctcggtctggtgagctgtaccttctttctggcagtgaatggtctgtattcctctagtgatgatgtgatcgaattaactccatcgaatttcaaccgagaagttattcagagtgatagtttgtggcttgtagaattctatgctccatggtgtggtcactgtcaaagattaacaccagaatggaagaaagcagcaactgcattaaaagatgttgtcaaagttggtgcagttgatgcagataagcatcattccctaggaggtcagtatggtgttcagggatttcctaccattaagatttttggatccaacaaaaacagaccagaagattaccaaggtggcagaactggtgaagccattgtagatgctgcgctgagtgctctgcgccagctcgtgaaggatcgcctcgggggacggagcggaggatacagttctggaaaacaaggcagaagtgatagttcaagtaagaaggatgtgattgagctgacagacgacagctttgataagaatgttctggacagtgaagatgtttggatggttgagttctatgctccttggtgtggacactgcaaaaacctagagccagagtgggctgccgcagcttcagaagtaaaagagcagacgaaaggaaaagtgattagaggatttcctacaatcaagatatttcagaaaggcgagtctcctgtggattatgacggtgggcggacaagatccgacatcgtgtcccgggcccttgatttgttttctgataacgccccacctcctgagctgcttgagattatcaacgaggacattgccaagaggacgtgtgaggagcaccagctctgtgttgtggctgtgctgccccatatccttgatactggagctgcaggcagaaattcttatctggaagttcttctgaagttggcagacaaatacaaaaagaaaatgtgggggtggctgtggacagaagctggagcccagtctgaacttgagaccgcgttggggattggagggtttgggtaccccgccatggccgccatcaatgcacgcaagatgaaatttgctctgctaaaaggctccttcagtgagcaaggcatcaacgagtttctcagggagctctcttttgggcgtggctccacggcacctgtaggaggcggggctttccctaccatcgttgagagagagccttgggacggcagggatggcgagcttcccgtggaggatgacattgacctcagtgatgtggagcttgatgacttagggaaagatgagttgtgagagccacaacagaggcttcagaccattttcttttcttgggagccagtggatttttccagcagtgaagggacattctctacactcagatgactctaccagtggccttttaaccaagaagtagtacttgattggtcatttgaaaacactgcaacagtgaacttttgcatctcaagaaaacattgaaaaattctatgaattgttgtagccggtgaattgagtcgtattctgtcacataatattttgaagaaaacttggctgtcgaaacatttttctctctgactgctgcttgaatgttcttggaggctgtttcttatgtatgggttttttttaatgtgatcccttcatttgaatattaatggctttttccattaaagaataaaatattttggacaatgccgataaatgtatgaagttagtatccacatcataaattcagagtgatgtttagcagtaaatcaatattttgaagtgatacacagatgtctttcctccccacaaacttttttaaacaaaaaacaagacctcttttctttagatggtgccacctatgcccaccacaacagagattttacatggaaaccgggctcagtgagaactgatttcctgcccaatatttgtctttgggctgtctctagtgactaattattaaggaatctagctggttatacagttcaaggctttctatgttgttaatgaacctcaaaatagccgttaagacatgaaatacagcagcaggttaccaatgcgaacaggtagttcgcatttatgtaaaacattcagaaaatgaagttttgaatttgttggaacattcaaaggacttgagagcattttattgtaacttaaaaaaataaatacaactgtcactaacttttgtgagcaatttctctgaa

SEQ ID NO: 406453 - DNA, 2267 bp, Homo sapiens
cccctcggaccaccggactggcctggggcgggacgtgggcgcgggggcgcggcgtgcggcacgctgcagggctgaagcggcggcggcggtggggactgcacgtagcccggcgctcggcatggctctcctggtgctcggtctggtgagctgtaccttctttctggcagtgaatggtctgtattcctctagtgatgatgtgatcgaattaactccatcgaatttcaaccgagaagttattcagagtgatagtttgtggcttgtagaattctatgctccatggtgtggtcactgtcaaagattaacaccagaatggaagaaagcagcaactgcattaaaagatgttgtcaaagttggtgcagttgatgcagataagcatcattccctaggaggtcagtatggtgttcagggatttcctaccattaagatttttggatccaacaaaaacagaccagaagattaccaaggtggcagaactggtgaagccattgtagatgctgcgctgagtgctctgcgccagctcgtgaaggatcgcctcgggggacggagcggaggatacagttctggaaaacaaggcagaagtgatagttcaagtaagaaggatgtgattgagctgacagacgacagctttgataagaatgttctggacagtgaagatgtttggatggttgagttctatgctccttggtgtggacactgcaaaaacctagagccagagtgggctgccgcagcttcagaagtaaaagagcagacgaaaggaaaagtgaaactggcagctgtggatgctacagtcaatcaggttctggcctcccgatacgggattagaggatttcctacaatcaagatatttcagaaaggcgagtctcctgtggattatgacggtgggcggacaagatccgacatcgtgtcccgggcccttgatttgttttctgataacgccccacctcctgagctgcttgagattatcaacgaggacattgccaagaggacgtgtgaggagcaccagctctgtgttgtggctgtgctgccccatatccttgatactggagctgcaggcagaaattcttatctggaagttcttctgaagttggcagacaaatacaaaaagaaaatgtgggggtggctgtggacagaagctggagcccagtctgaacttgagaccgcgttggggattggagggtttgggtaccccgccatggccgccatcaatgcacgcaagatgaaatttgctctgctaaaaggctccttcagtgagcaaggcatcaacgagtttctcagggagctctcttttgggcgtggctccacggcacctgtaggaggcggggctttccctaccatcgttgagagagagccttgggacggcagggatggcgagcttcccgtggaggatgacattgacctcagtgatgtggagcttgatgacttagggaaagatgagttgtgagagccacaacagaggcttcagaccattttcttttcttgggagccagtggatttttccagcagtgaagggacattctctacactcagatgactctaccagtggccttttaaccaagaagtagtacttgattggtcatttgaaaacactgcaacagtgaacttttgcatctcaagaaaacattgaaaaattctatgaattgttgtagccggtgaattgagtcgtattctgtcacataatattttgaagaaaacttggctgtcgaaacatttttctctctgactgctgcttgaatgttcttggaggctgtttcttatgtatgggttttttttaatgtgatcccttcatttgaatattaatggctttttccattaaagaataaaatattttggacaatgccgataaatgtatgaagttagtatccacatcataaattcagagtgatgtttagcagtaaatcaatattttgaagtgatacacagatgtctttcctccccacaaactattttacatggaaaccgggctcagtgagaactgatttcctgcccaatatttgtctttgggctgtctctagtgactaattattaaggaatctagctggttatacagttcaaggctttctatgttgttaatgaacctcaaaatagccgttaagacatgaaatacagcagcaggttaccaatgcgaacaggtagttcgcatttatgtaaaacattcagaaaatgaagttttgaatttgttggaacattcaaaggacttgagagcattttattgtaacttaaaaaaataaatacaactgtcactaacttttgtgagcaatttctctgaa

SEQ ID NO: 406454 - DNA, 2418 bp, Homo sapiens
  misc_feature (1869)..(1869): n is a, c, g, or t
  misc_feature (1886)..(1886): n is a, c, g, or t
  misc_feature (1889)..(1889): n is a, c, g, or t
  misc_feature (1902)..(1902): n is a, c, g, or t
  misc_feature (1926)..(1926): n is a, c, g, or t
  misc_feature (1933)..(1933): n is a, c, g, or t
  misc_feature (1944)..(1944): n is a, c, g, or t
  misc_feature (1964)..(1964): n is a, c, g, or t
  misc_feature (1970)..(1970): n is a, c, g, or t
cccctcggaccaccggactggcctggggcgggacgtgggcgcgggggcgcggcgtgcggcacgctgcagggctgaagcggcggcggcggtggggactgcacgtagcccggcgctcggcatggctctcctggtgctcggtctggtgagctgtaccttctttctggcagtgaatggtctgtattcctctagtgatgatgtgatcgaattaactccatcgaatttcaaccgagaagttattcagagtgatagtttgtggcttgtagaattctatgctccatggtgtggtcactgtcaaagattaacaccagaatggaagaaagcagcaactgcattaaaagatgttgtcaaagttggtgcagttgatgcagataagcatcattccctaggaggtcagtatggtgttcagggatttcctaccattaagatttttggatccaacaaaaacagaccagaagattaccaaggtggcagaactggtgaagccattgtagatgctgcgctgagtgctctgcgccagctcgtgaaggatcgcctcgggggacggagcggaggatacagttctggaaaacaaggcagaagtgatagttcaagtaagaaggatgtgattgagctgacagacgacagctttgataagaatgttctggacagtgaagatgtttggatggttgagttctatgctccttggtgtggacactgcaaaaacctagagccagagtgggctgccgcagcttcagaagtaaaagagcagacgaaaggaaaagtgaaactggcagctgtggatgctacagtcaatcaggttctggcctcccgatacgggattagaggatttcctacaatcaagatatttcagaaaggcgagtctcctgtggattatgacggtgggcggacaagatccgacatcgtgtcccgggcccttgatttgttttctgataacgccccacctcctgagctgcttgagattatcaacgaggacattgccaagaggacgtgtgaggagcaccagctctgtgttgtggctgtgctgccccatatccttgatactggagctgcaggcagaaattcttatctggaagttcttctgaagttggcagacaaatacaaaaagaaaatgtgggggtggctgtggacagaagctggagcccagtctgaacttgagaccgcgttggggattggagggtttgggtaccccgccatggccgccatcaatgcacgcaagatgaaatttgctctgctaaaaggctccttcagtgagcaaggcatcaacgagtttctcagggagctctcttttgggcgtggctccacggcacctgtaggaggcggggctttccctaccatcgttgagagagagccttgggacggcagggatggcgagcttcccgtggaggatgacattgacctcagtgatgtggagcttgatgacttagggaaagatgagttgtgagagccacaacagaggcttcagaccattttcttttcttgggagccagtggatttttccagcagtgaagggacattctctacactcagatgactctaccagtggccttttaaccaagaagtagtacttgattggtcatttgaaaacactgcaacagtgaacttttgcatctcaagaaaacattgaaaaattctatgaattgttgtagccggtgaattgagtcgtattctgtcacataatattttgaagaaaacttggctgtcgaaacatttttctctctgactgctgcttgaatgttcttggaggctgtttcttatgtatgggttttttttaatgtgatcccttcatttgaatattaatggctttttccattaaagaataaaatattttggacaatgccaaaaaaaaaaaaaaaaaaaaaaaaaaacccnacaaaaaaaaaaaaaangcnaaaaccaaaaaanaaaaaaaaaaattggacaaagccnaaaaaanaaaaaaaaaanaaaccacaacaaaaaaacanaaagangtataacagtaaatcaatattttgaagtgatacacagatgtctttcctccccacaaacttttttaaacaaaaaacaagacctcttttctttagatggtgccacctatgcccaccacaacagagattttacatggaaaccgggctcagtgagaactgatttcctgcccaatatttgtctttgggctgtctctagtgactaattattaaggaatctagctggttatacagttcaaggctttctatgttgttaatgaacctcaaaatagccgttaagacatgaaatacagcagcaggttaccaatgcgaacaggtagttcgcatttatgtaaaacattcagaaaatgaagttttgaatttgttggaacattcaaaggacttgagagcattttattgtaacttaaaaaaataaatacaactgtcactaacttttgtgagcaatttctctgaa

SEQ ID NO: 406455 - DNA, 2219 bp, Homo sapiens
cccctcggaccaccggactggcctggggcgggacgtgggcgcgggggcgcggcgtgcggcacgctgcagggctgaagcggcggcggcggtggggactgcacgtagcccggcgctcggcatggctctcctggtgctcggtctggtgagctgtaccttctttctggcagtgaatggtctgtattcctctagtgatgatgtgatcgaattaactccatcgaatttcaaccgagaagttattcagagtgatagtttgtggcttgtagaattctatgctccatggtgtggtcactgtcaaagattaacaccagaatggaagaaagcagcaactgcattaaaagatgttgtcaaagttggtgcagttgatgcagataagcatcattccctaggaggtcagtatggtgttcagggatttcctaccattaagatttttggatccaacaaaaacagaccagaagattaccaaggtggcagaactggtgaagccattgtagatgctgcgctgagtgctctgcgccagctcgtgaaggatcgcctcgggggacggagcggaggatacagttctggaaaacaaggcagaagtgatagttcaagtaagaaggatgtgattgagctgacagacgacagctttgataagaatgttctggacagtgaagatgtttggatggttgagttctatgctccttggtgtggacactgcaaaaacctagagccagagtgggctgccgcagcttcagaagtaaaagagcagacgaaaggaaaagtgaaactggcagctgtggatgctacagtcaatcaggttctggcctcccgatacgggattagaggatttcctacaatcaagatatttcagaaaggcgagtctcctgtggattatgacggtgggcggacaagatccgacatcgtgtcccgggcccttgatttgttttctgataacgccccacctcctgagctgcttgagattatcaacgaggacattgccaagaggacgtgtgaggagcaccagctctgtgttgtggctgtgctgccccatatccttgatactggagctgcaggcagaaattcttatctggaagttcttctgaagttggcagacaaatacaaaaagaaaatgtgggggtggctgtggacagaagctggagcccagtctgaacttgagaccgcgttggggattggagggtttgggtaccccgccatggccgccatcaatgcacgcaagatgaaatttgctctgctaaaaggctccttcagtgagcaaggcatcaacgagtttctcagggagctctcttttgggcgtggctccacggcacctgtaggaggcggggctttccctaccatcgttgagagagagccttgggacggcagggatggcgagcttcccgtggaggatgacattgacctcagtgatgtggagcttgatgacttagggaaagatgagttgtgagagccacaacagaggcttcagaccattttcttttcttgggagccagtggatttttccagcagtgaagggacattctctacactcagatgactctaccagtggccttttaaccaagaagtagtacttgattggtcatttgaaaacactgcaacagtgaacttttgcatctcaagaaaacattgaaaaattctatgaattgttgtagccggtgaattgagtcgtattctgtcacataatattttgaagaaaacttggctgtcgaaacatttttctctctgactgctgcttgaatgttcttggaggctgtttcttatgtatgggttttttttaatgtgatcccttcatttgaatattaatggctttttccattaaagaataaaatattttggacaatgccaaaaaaaaaaaaaaaaaaaaaaaaaaaaactttgttgggccccccgggcccccgcgaaaaactttttaaaaccttgctgccgttgtggggcccgcgggccccatgtgggtgttaggtgtgaacatgtgtggtccaatcctgtgtttcccctaaggaaaatccctgggctcatagaactagggtggtgtgggatttcttcacccgcatattataaaaaacccccccggggggaacaacccggaggatgtttctgagaacaaattcctcgaaagagtggcgctttcgaggaggggcccacataccggggggaccttttattcacagcgggagtccacaacgcgagcagcctccgagattcttaaattttacccccccgactat

SEQ ID NO: 406456 - DNA, 2331 bp, Homo sapiens
  misc_feature (1666)..(1667): n is a, c, g, or t
  misc_feature (1670)..(1670): n is a, c, g, or t
  misc_feature (1683)..(1683): n is a, c, g, or t
  misc_feature (1695)..(1695): n is a, c, g, or t
  misc_feature (1749)..(1749): n is a, c, g, or t
  misc_feature (1782)..(1782): n is a, c, g, or t
  misc_feature (1799)..(1799): n is a, c, g, or t
  misc_feature (1802)..(1802): n is a, c, g, or t
  misc_feature (1815)..(1815): n is a, c, g, or t
  misc_feature (1839)..(1839): n is a, c, g, or t
  misc_feature (1846)..(1846): n is a, c, g, or t
  misc_feature (1857)..(1857): n is a, c, g, or t
  misc_feature (1877)..(1877): n is a, c, g, or t
  misc_feature (1883)..(1883): n is a, c, g, or t
cccctcggaccaccggactggcctggggcgggacgtgggcgcgggggcgcggcgtgcggcacgctgcagggctgaagcggcggcggcggtggggactgcacgtagcccggcgctcggcatggctctcctggtgctcggtctggtgagctgtaccttctttctggcagtgaatggtctgtattcctctagtgatgatgtgatcgaattaactccatcgaatttcaaccgagaagttattcagagtgatagtttgtggcttgtagaattctatgctccatggtgtggtcactgtcaaagattaacaccagaatggaagaaagcagcaactgcattaaaagatgttgtcaaagttggtgcagttgatgcagataagcatcattccctaggaggtcagtatggtgttcagggatttcctaccattaagatttttggatccaacaaaaacagaccagaagattaccaaggtggcagaactggtgaagccattgtagatgctgcgctgagtgctctgcgccagctcgtgaaggatcgcctcgggggacggagcggaggatacagttctggaaaacaaggcagaagtgatagttcaagtaagaaggatgtgattgagctgacagacgacagctttgataagaatgttctggacagtgaagatgtttggatggttgagttctatgctccttggtgtggacactgcaaaaacctagagccagagtgggctgccgcagcttcagaagtaaaagagcagacgaaaggaaaagtgaaactggcagctgtggatgctacagtcaatcaggttctggcctcccgatacgggattagaggatttcctacaatcaagatatttcagaaaggcgagtctcctgtggattatgacggtgggcggacaagatccgacatcgtgtcccgggcccttgatttgttttctgataacgccccacctcctgagctgcttgagattatcaacgaggacattgccaagaggacgtgtgaggagcaccagctctgtgttgtggctgtgctgccccatatccttgatactggagctgcaggcagaaattcttatctggaagttcttctgaagttggcagacaaatacaaaaagaaaatgtgggggtggctgtggacagaagctggagcccagtctgaacttgagaccgcgttggggattggagggtttgggtaccccgccatggccgccatcaatgcacgcaagatgaaatttgctctgctaaaaggctccttcagtgagcaaggcatcaacgagtttctcagggagctctcttttgggcgtggctccacggcacctgtaggaggcggggctttccctaccatcgttgagagagagccttgggacggcagggatggcgagcttcccgtggaggatgacattgacctcagtgatgtggagcttgatgacttagggaaagatgagttgtgagagccacaacagaggcttcagaccattttcttttcttgggagccagtggatttttccagcagtgaagggacattctctacactcagatgactctaccagtggccttttaaccaagaagtagtacttgattggtcatttgaaaacactgcaacagtgaacttttgcatctcaagaaaacattgaaaaattctatgaattgttgtagccggtgaattgaaacataannaancacataaaaatanaaaaaaaacctnaccacccaaacaactctcccaccaacaacaacaaaaaaaaacaaagaaacaaanacaaaaaaaaaaaaaaaaaaaaaaaaaaacccnacaaaaaaaaaaaaaangcnaaaaccaaaaaanaaaaaaaaaaattggacaaagccnaaaaaanaaaaaaaaaanaaaccacaacaaaaaaacanaaagangtataacagtaaatcaatattttgaagtgatacacagatgtctttcctccccacaaacttttttaaacaaaaaacaagacctcttttctttagatggtgccacctatgcccaccacaacagagattttacatggaaaccgggctcagtgagaactgatttcctgcccaatatttgtctttgggctgtctctagtgactaattattaaggaatctagctggttatacagttcaaggctttctatgttgttaatgaacctcaaaatagccgttaagacatgaaatacagcagcaggttaccaatgcgaacaggtagttcgcatttatgtaaaacattcagaaaatgaagttttgaatttgttggaacattcaaaggacttgagagcattttattgtaacttaaaaaaataaatacaactgtcactaacttttgtgagcaatttctctgaa

SEQ ID NO: 406457 - DNA, 2445 bp, Homo sapiens
cccctcggaccaccggactggcctggggcgggacgtgggcgcgggggcgcggcgtgcggcacgctgcagggctgaagcggcggcggcggtggggactgcacgtagcccggcgctcggcatggctctcctggtgctcggtctggtgagctgtaccttctttctggcagtgaatggtctgtattcctctagtgatgatgtgatcgaattaactccatcgaatttcaaccgagaagttattcagagtgatagtttgtggcttgtagaattctatgctccatggtgtggtcactgtcaaagattaacaccagaatggaagaaagcagcaactgcattaaaagatgttgtcaaagttggtgcagttgatgcagataagcatcattccctaggaggtcagtatggtgttcagggatttcctaccattaagatttttggatccaacaaaaacagaccagaagattaccaaggtggcagaactggtgaagccattgtagatgctgcgctgagtgctctgcgccagctcgtgaaggatcgcctcgggggacggagcggaggatacagttctggaaaacaaggcagaagtgatagttcaagtaagaaggatgtgattgagctgacagacgacagctttgataagaatgttctggacagtgaagatgtttggatggttgagttctatgctccttggtgtggacactgcaaaaacctagagccagagtgggctgccgcagcttcagaagtaaaagagcagacgaaaggaaaagtgaaactggcagctgtggatgctacagtcaatcaggttctggcctcccgatacgggattagaggatttcctacaatcaagatatttcagaaaggcgagtctcctgtggattatgacggtgggcggacaagatccgacatcgtgtcccgggcccttgatttgttttctgataacgccccacctcctgagctgcttgagattatcaacgaggacattgccaagaggacgtgtgaggagcaccagctctgtgttgtggctgtgctgccccatatccttgatactggagctgcaggcagaaattcttatctggaagttcttctgaagttggcagacaaatacaaaaagaaaatgtgggggtggctgtggacagaagctggagcccagtctgaacttgagaccgcgttggggattggagggtttgggtaccccgccatggccgccatcaatgcacgcaagatgaaatttgctctgctaaaaggctccttcagtgagcaaggcatcaacgagtttctcagggagctctcttttgggcgtggctccacggcacctgtaggaggcggggctttccctaccatcgttgagagagagccttgggacggcagggatggcgaggtgagtgcccgggagggaagctgtgcgggcagcagtcctggtttactctcttgagcctgtgcatctctgcacctggagtcaagtccttcccatcagacctcagccctggtgcacccgcgggccttttaagaggttcttctctgaagacccttcatcttccttatcacaagtttaagtgctgcatggcatttgatactcttgacagccaagatacatttcagtagtaaggttgctttcctgattattaccttaaagtgaacatttaacctggaattcatttactttatcttagaaaaatagaaaatgatagctttgaaattagcacttatttctgtactgttgtgtcccaccctcctcaaaaggacacgttcaagtggcttccagtgttaaaatggtgagtgatgtgatgttgaaatgtttcacctgagttctgagcttttccatccgtataatcataggtacgaaggtcagggtaggagtcagactgaggagaacctggattgtagcaggagtagctccagagagtcgctcttccgtaaaatgagatgttgaccttccagggtgtccccttctgcagatctaacagtggctttctgtcgtctcccagcttcccgtggaggatgacattgacctcagtgatgtggagcttgatgacttagggaaagatgagttgtgagagccacaacagaggcttcagaccattttcttttcttgggagccagtggatttttccagcagtgaagggacattctctacactcagatgactctaccagtggccttttaaccaagaagtagtacttgattggtcatttgaaaacactgcaacagtgaacttttgcatctcaagaaaacattgaaaaattctatgaattgttgtagccggtgaattgagtcgtattctgtcacataatattttgaagaaaacttggctgtcgaaacatttttctctctgactgctgcttgaatgttcttggaggctgtttcttatgtatgggttttttttaatgtgatcccttcatttgaatattaatggctttttccattaaagaataaaatattttggacaatgcc

SEQ ID NO: 406458 - DNA, 1460 bp, Homo sapiens
  misc_feature (11)..(11): n is a, c, g, or t
ccattttaacnctggaagccactgaacgtgtccttttgaggagggtgggacacaacagtacagaaataagtgctgcatggcatttgatactcttgacagccaagatacatttcagtagtaaggttgctttcctgattattaccttaaagtgaacatttaacctggaattcatttactttatcttagaaaaatagaaaatgatagctttgaaattagcacttatttctgtactgttgtgtcccaccctcctcaaaaggacacgttcaagtggcttccagtgttaaaatggtgagtgatgtgatgttgaaatgtttcacctgagttctgagcttttccatccgtataatcataggtacgaaggtcagggtaggagtcagactgaggagaacctggattgtagcaggagtagctccagagagtcgctcttccgtaaaatgagatgttgaccttccagggtgtccccttctgcagatctaacagtggctttctgtcgtctcccagcttcccgtggaggatgacattgacctcagtgatgtggagcttgatgacttagggaaagatgagttgtgagagccacaacagaggcttcagaccattttcttttcttgggagccagtggatttttccagcagtgaagggacattctctacactcagatgactctaccagtggccttttaaccaagaagtagtacttgattggtcatttgaaaacactgcaacagtgaacttttgcatctcaagaaaacattgaaaaattctatgaattgttgtagccggtgaattgagtcgtattctgtcacataatattttgaagaaaacttggctgtcgaaacatttttctctctgactgctgcttgaatgttcttggaggctgtttcttatgtatgggttttttttaatgtgatcccttcatttgaatattaatggctttttccattaaagaataaaatattttggacaatgccgataaatgtatgaagttagtatccacatcataaattcagagtgatgtttagcagtaaatcaatattttgaagtgatacacagatgtctttcctccccacaaacttttttaaacaaaaaacaagacctcttttctttagatggtgccacctatgcccaccacaacagagattttacatggaaaccgggctcagtgagaactgatttcctgcccaatatttgtctttgggctgtctctagtgactaattattaaggaatctagctggttatacagttcaaggctttctatgttgttaatgaacctcaaaatagccgttaagacatgaaatacagcagcaggttaccaatgcgaacaggtagttcgcatttatgtaaaacattcagaaaatgaagttttgaatttgttggaacattcaaaggacttgagagcattttattgtaacttaaaaaaataaatacaactgtcactaacttttgtgagcaatttctctgaa

SEQ ID NO: 406459 - DNA, 1415 bp, Homo sapiens
cccctcggaccaccggactggcctggggcgggacgtgggcgcgggggcgcggcgtgcggcacgctgcagggctgaagcggcggcggcggtggggactgcacgtagcccggcgctcggcatggctctcctggtgctcggtctggtgagctgtaccttctttctggcagtgaatggtctgtattcctctagtgatgatgtgatcgaattaactccatcgaatttcaaccgagaagttattcagagtgatagtttgtggcttgtagaattctatgctccatggtgtggtcactgtcaaagattaacaccagaatggaagaaagcagcaactgcattaaaagatgttgtcaaagttggtgcagttgatgcagataagcatcattccctaggaggtcagtatggtgttcagggatttcctaccattaagatttttggatccaacaaaaacagaccagaagattaccaaggtggcagaactggtgaagccattgtagatgctgcgctgagtgctctgcgccagctcgtgaaggatcgcctcgggggacggagcggaggatacagttctggaaaacaaggcagaagtgatagttcaagtaagaaggatgtgattgagctgacagacgacagctttgataagaatgttctggacagtgaagatgtttggatggttgagttctatgctccttggtgtggacactgcaaaaacctagagccagagtgggctgccgcagcttcagaagtaaaagagcagacgaaaggaaaagtgaaactggcagctgtggatgctacagtcaatcaggttctggcctcccgatacgggattagaggatttcctacaatcaagatatttcagaaaggcgagtctcctgtggattatgacggtgggcggacaagatccgacatcgtgtcccgggcccttgatttgttttctgataacgccccacctcctgagctgcttgagattatcaacgaggacattgccaagaggacgtgtgaggagcaccagctctgtgttgtggctgtgctgccccatatccttgatactggagctgcaggcagaaattcttatctggaagttcttctgaagttggcagacaaatacaaaaagaaaatgtgggggtggctgtggacagaagctggagcccagtctgaacttgagaccgcgttggggattggagggtttgggtaccccgccatggccgccatcaatgcacgcaagatgaaatttgctctgctaaaaggctccttcagtgagcaaggcatcaacgagtttctcagggagctctcttttgggcgtggctccacggcacctgtaggaggcggggctttccctaccatcgttgatacagagtcttggcaccgcccccgattacgacttcccctcgagtataacctcaccccagtcatacgcattccct

SEQ ID NO: 406460 - DNA, 1128 bp, Homo sapiens
cccctcggaccaccggactggcctggggcgggacgtgggcgcgggggcgcggcgtgcggcacgctgcagggctgaagcggcggcggcggtggggactgcacgtagcccggcgctcggcatggctctcctggtgctcggtctggtgagctgtaccttctttctggcagtgaatggtctgtattcctctagtgatgatgtgatcgaattaactccatcgaatttcaaccgagaagtgtgagagccacaacagaggcttcagaccattttcttttcttgggagccagtggatttttccagcagtgaagggacattctctacactcagatgactctaccagtggccttttaaccaagaagtagtacttgattggtcatttgaaaacactgcaacagtgaacttttgcatctcaagaaaacattgaaaaattctatgaattgttgtagccggtgaattgagtcgtattctgtcacataatattttgaagaaaacttggctgtcgaaacatttttctctctgactgctgcttgaatgttcttggaggctgtttcttatgtatgggttttttttaatgtgatcccttcatttgaatattaatggctttttccattaaagaataaaatattttggacaatgccgataaatgtatgaagttagtatccacatcataaattcagagtgatgtttagcagtaaatcaatattttgaagtgatacacagatgtctttcctccccacaaacttttttaaacaaaaaacaagacctcttttctttagatggtgccacctatgcccaccacaacagagattttacatggaaaccgggctcagtgagaactgatttcctgcccaatatttgtctttgggctgtctctagtgactaattattaaggaatctagctggttatacagttcaaggctttctatgttgttaatgaacctcaaaatagccgttaagacatgaaatacagcagcaggttaccaatgcgaacaggtagttcgcatttatgtaaaacattcagaaaatgaagttttgaatttgttggaacattcaaaggacttgagagcattttattgtaacttaaaaaaataaatacaactgtcactaacttttgtgagcaatttctctgaa

SEQ ID NO: 406461 - DNA, 1913 bp, Homo sapiens
  misc_feature (1248)..(1249): n is a, c, g, or t
  misc_feature (1252)..(1252): n is a, c, g, or t
  misc_feature (1265)..(1265): n is a, c, g, or t
  misc_feature (1277)..(1277): n is a, c, g, or t
  misc_feature (1331)..(1331): n is a, c, g, or t
  misc_feature (1364)..(1364): n is a, c, g, or t
  misc_feature (1381)..(1381): n is a, c, g, or t
  misc_feature (1384)..(1384): n is a, c, g, or t
  misc_feature (1397)..(1397): n is a, c, g, or t
  misc_feature (1421)..(1421): n is a, c, g, or t
  misc_feature (1428)..(1428): n is a, c, g, or t
  misc_feature (1439)..(1439): n is a, c, g, or t
  misc_feature (1459)..(1459): n is a, c, g, or t
  misc_feature (1465)..(1465): n is a, c, g, or t
cccctcggaccaccggactggcctggggcgggacgtgggcgcgggggcgcggcgtgcggcacgctgcagggctgaagcggcggcggcggtggggactgcacgtagcccggcgctcggcatggctctcctggtgctcggtctggtgagctgtaccttctttctggcagtgaatggtctgtattcctctagtgatgatgtgatcgaattaactccatcgaatttcaaccgagaagttattcagagtgatagtttgtggcttgtagaattctatgctccatggtgtggtcactgtcaaagattaacaccagaatggaagaaagcagcaactgcattaaaagatgttgtcaaagttggtgcagttgatgcagataagcatcattccctaggaggtcagtatggtgttcagggatttcctaccattaagatttttggatccaacaaaaacagaccagaagattaccaaggtggcagaactggtgaagccattgtagatgctgcgctgagtgctctgcgccagctcgtgaaggatcgcctcgggggacggagcggaggatacagttctggaaaacaaggcagaagtgatagttcaagtaagaaggatgtgattgagctgacagacgacagctttgataagaatgttctggacagtgaagatgtttggatggttgagttctatgctccttggtgtggacactgcaaaaacctagagccagagtgggctgccgcagcttcagaagtaaaagagcagacgaaaggaaaagtgaaactggcagctgtggatgctacagtcaatcaggttctggcctcccgatacgggattagaggatttcctacaatcaagatatttcagaaaggcgagtctcctgtggattatgacggtgggcggacaagatccgacatcgtgtcccgggcccttgatttgagagagagccttgggacggcagggatggcgagcttcccgtggaggatgacattgacctcagtgatgtggagcttgatgacttagggaaagatgagttgtgagagccacaacagaggcttcagaccattttcttttcttgggagccagtggatttttccagcagtgaagggacattctctacactcagatgactctaccagtggccttttaaccaagaagtagtacttgattggtcatttgaaaacactgcaacagtgaacttttgcatctcaagaaaacattgaaaaattctatgaattgttgtagccggtgaattgaaacataannaancacataaaaatanaaaaaaaacctnaccacccaaacaactctcccaccaacaacaacaaaaaaaaacaaagaaacaaanacaaaaaaaaaaaaaaaaaaaaaaaaaaacccnacaaaaaaaaaaaaaangcnaaaaccaaaaaanaaaaaaaaaaattggacaaagccnaaaaaanaaaaaaaaaanaaaccacaacaaaaaaacanaaagangtataacagtaaatcaatattttgaagtgatacacagatgtctttcctccccacaaacttttttaaacaaaaaacaagacctcttttctttagatggtgccacctatgcccaccacaacagagattttacatggaaaccgggctcagtgagaactgatttcctgcccaatatttgtctttgggctgtctctagtgactaattattaaggaatctagctggttatacagttcaaggctttctatgttgttaatgaacctcaaaatagccgttaagacatgaaatacagcagcaggttaccaatgcgaacaggtagttcgcatttatgtaaaacattcagaaaatgaagttttgaatttgttggaacattcaaaggacttgagagcattttattgtaacttaaaaaaataaatacaactgtcactaacttttgtgagcaatttctctgaa

SEQ ID NO: 406462 - DNA, 1375 bp, Homo sapiens
cccctcggaccaccggactggcctggggcgggacgtgggcgcgggggcgcggcgtgcggcacgctgcagggctgaagcggcggcggcggtggggactgcacgtagcccggcgctcggcatggctctcctggtgctcggtctggtgagctgtaccttctttctggcagtgaatggtctgtattcctctagtgatgatgtgatcgaattaactccatcgaatttcaaccgagaagttattcagagtgatagtttgtggcttgtagaattctatgctccatggtgtggtcactgtcaaagattaacaccagaatggaagaaagcagcaactgcattaaaagatgttgtcaaagttggtgcagttgatgcagataagcatcattccctaggaggtcagtatggtgttcagggatttcctaccattaagatttttggatccaacaaaaacagaccagaagattaccaaggtggcagaactggtgaagccattgtagatgctgcgctgagtgctctgcgccagctcgtgaaggatcgcctcgggggacggagcggaggatacagttctggaaaacaaggcagaagtgatagttcaagtaagaaggatgtgattgagctgacagacgacagctttgataagaatgttctggacagtgaagatgtttggatggttgagttctatgctccttggtgtggacactgcaaaaacctagagccagagtgggctgccgcagcttcagaagtaaaagagcagacgaaaggaaaagtgaaactggcagctgtggatgctacagtcaatcaggttctggcctcccgatacgggattagaggatttcctacaatcaagatatttcagaaaggcgagtctcctgtggattatgacggtgggcggacaagatccgacatcgtgtcccgggcccttgatttgttttctgataacgccccacctcctgagctgcttgagattatcaacgaggacattgccaagaggacgtgtgaggagcaccagctctgtgttgtggctgtgctgccccatatccttgatactgaccccaccagctttgacaaccagccacggcaggagcatttacaccacggccatccacaaatgctacaggccagcacacggctgctgatgggagaatctcaagagtcaacagatgaagaaaatgggtgctccatagaatgccaacagctttagtctaaatatacacatttttatacatggaagaatccattgtcaacttttaaacattggttaccttttgggagaataaagggaatgggggcgatgatcacagctcggatgatattattattttaaagataaaatcataaaataattttaaagataaaataaatataattaaaatgataaaat

SEQ ID NO: 406463 - DNA, 350 bp, Homo sapiens
tctgtcagagatacacgtgtcagaactgtgtcacacctggtgaagccgacagtgaggtaaagacacagtcttgggccgggccagatgaggcacttgctgaaggccgggctgaggaccgcctaccttccgtctcctgtaggtggcagaactggtgaagccattgtagatgctgcgctgagtgctctgcgccagctcgtgaaggatcgcctcgggggacggagcggaggatacagttctggaaaacaagtaagaccataaaatgtcagtttttaatgtgtcataattttgaagccagagtggataccttgtataagatagttgttttttaacagtatgttaaagtggtgaac

SEQ ID NO: 406464 - DNA, 634 bp, Homo sapiens
  misc_feature (102)..(102): n is a, c, g, or t
gctggagggcagctcaggctgacccccaatcgttgcttccaggggtacccgacatggcctggccctctcaaatgcccatgtctcctggctcggctgtgcatnctccctctcatgggttggcaggggcagggaggtgcagtggacagaaacaagacaggcctgggctcaagccacgccctcctgctttctggccgactggcttcaggtttccccatttgttccacagcggggataatgccagtgctgagagccgactgtgccaggctccttcacattccctcctcgcagccccacgtggtgacaccccaccagctttgacaaccagccacggcaggagcatttacaccacggccatccacaaatgctacaggccagcacacggctgctgatgggagaatctcaagagtcaacagatgaagaaaatgggtgctccatagaatgccaacagctttagtctaaatatacacatttttatacatggaagaatccattgtcaacttttaaacattggttaccttttgggagaataaagggaatgggggcgatgatcacagctcggatgatattattattttaaagataaaatcataaaataattttaaagataaaataaatataattaaaatgataaaat

SEQ ID NO: 406465 - DNA, 480 bp, Homo sapiens
acaggaagacagctggcccagtgaccctcagaagtggattgcagaagtgggggtacctcccaggttccacagcggggataatgccagtgctgagagccgactgtgccaggctccttcacattccctcctcgcagccccacgtggtgacaccccaccagctttgacaaccagccacggcaggagcatttacaccacggccatccacaaatgctacaggccagcacacggctgctgatgggagaatctcaagagtcaacagatgaagaaaatgggtgctccatagaatgccaacagctttagtctaaatatacacatttttatacatggaagaatccattgtcaacttttaaacattggttaccttttgggagaataaagggaatgggggcgatgatcacagctcggatgatattattattttaaagataaaatcataaaataattttaaagataaaataaatataattaaaatgataaaat

SEQ ID NO: 406466 - DNA, 2331 bp, Homo sapiens
cccctcggaccaccggactggcctggggcgggacgtgggcgcgggggcgcggcgtgcggcacgctgcagggctgaagcggcggcggcggtggggactgcacgtagcccggcgctcggcatggctctcctggtgctcggtctggtgagctgtaccttctttctggcagtgaatggtctgtattcctctagtgatgatgtgatcgaattaactccatcgaatttcaaccgagaagttattcagagtgatagtttgtggcttgtagaattctatgctccatggtgtggtcactgtcaaagattaacaccagaatggaagaaagcagcaactgcattaaaagatgttgtcaaagttggtgcagttgatgcagataagcatcattccctaggaggtcagtatggtgttcagggatttcctaccattaagatttttggatccaacaaaaacagaccagaagattaccaaggtggcagaactggtgaagccattgtagatgctgcgctgagtgctctgcgccagctcgtgaaggatcgcctcgggggacggagcggaggatacagttctggaaaacaaggcagaagtgatagttcaagtaagaaggatgtgattgagctgacagacgacagctttgataagaatgttctggacagtgaagatgtttggatggttgagttctatgctccttggtgtggacactgcaaaaacctagagccagagtgggctgccgcagcttcagaagtaaaagagcagacgaaaggaaaagtgaaactggcagctgtggatgctacagtcaatcaggttctggcctcccgatacgggattagaggatttcctacaatcaagatatttcagaaaggcgagtctcctgtggattatgacggtgggcggacaagatccgacatcgtgtcccgggcccttgatttgttttctgataacgccccacctcctgagctgcttgagattatcaacgaggacattgccaagaggacgtgtgaggagcaccagctctgtgttgtggctgtgctgccccatatccttgatactggagctgcaggcagaaattcttatctggaagttcttctgaagttggcagacaaatacaaaaagaaaatgtgggggtggctgtggacagaagctggagcccagtctgaacttgagaccgcgttggggattggagggtttgggtaccccgccatggccgccatcaatgcacgcaagatgaaatttgctctgctaaaaggctccttcagtgagcaaggcatcaacgagtttctcagggagctctcttttgggcgtggctccacggcacctgtaggaggcggggctttccctaccatcgttgagagagagccttgggacggcagggatggcgagcttcccgtggaggatgacattgacctcagtgatgtggagcttgatgacttagggaaagatgagttgtgagagccacaacagaggcttcagaccattttcttttcttgggagccagtggatttttccagcagtgaagggacattctctacactcagatgactctaccagtggccttttaaccaagaagtagtacttgattggtcatttgaaaacactgcaacagtgaacttttgcatctcaagaaaacattgaaaaattctatgaattgttgtagccggtgaattgagtcgtattctgtcacataatattttgaagaaaacttggctgtcgaaacatttttctctctgactgctgcttgaatgttcttggaggctgtttcttatgtatgggttttttttaatgtgatcccttcatttgaatattaatggctttttccattaaagaataaaatattttggacaatgccgataaatgtatgaagttagtatccacatcataaattcagagtgatgtttagcagtaaatcaatattttgaagtgatacacagatgtctttcctccccacaaacttttttaaacaaaaaacaagacctcttttctttagatggtgccacctatgcccaccacaacagagattttacatggaaaccgggctcagtgagaactgatttcctgcccaatatttgtctttgggctgtctctagtgactaattattaaggaatctagctggttatacagttcaaggctttctatgttgttaatgaacctcaaaatagccgttaagacatgaaatacagcagcaggttaccaatgcgaacaggtagttcgcatttatgtaaaacattcagaaaatgaagttttgaatttgttggaacattcaaaggacttgagagcattttattgtaacttaaaaaaataaatacaactgtcactaacttttgtgagcaatttctctgaa

SEQ ID NO: 406467 - DNA, 2104 bp, Homo sapiens
aattgagaatcaaaggctttaatggttgctttgtgttgtcttcccccaaaaggtgtggtcactgtcaaagattaacaccagaatggaagaaagcagcaactgcattaaaagatgttgtcaaagttggtgcagttgatgcagataagcatcattccctaggaggtcagtatggtgttcagggatttcctaccattaagatttttggatccaacaaaaacagaccagaagattaccaaggtggcagaactggtgaagccattgtagatgctgcgctgagtgctctgcgccagctcgtgaaggatcgcctcgggggacggagcggaggatacagttctggaaaacaaggcagaagtgatagttcaagtaagaaggatgtgattgagctgacagacgacagctttgataagaatgttctggacagtgaagatgtttggatggttgagttctatgctccttggtgtggacactgcaaaaacctagagccagagtgggctgccgcagcttcagaagtaaaagagcagacgaaaggaaaagtgaaactggcagctgtggatgctacagtcaatcaggttctggcctcccgatacgggattagaggatttcctacaatcaagatatttcagaaaggcgagtctcctgtggattatgacggtgggcggacaagatccgacatcgtgtcccgggcccttgatttgttttctgataacgccccacctcctgagctgcttgagattatcaacgaggacattgccaagaggacgtgtgaggagcaccagctctgtgttgtggctgtgctgccccatatccttgatactggagctgcaggcagaaattcttatctggaagttcttctgaagttggcagacaaatacaaaaagaaaatgtgggggtggctgtggacagaagctggagcccagtctgaacttgagaccgcgttggggattggagggtttgggtaccccgccatggccgccatcaatgcacgcaagatgaaatttgctctgctaaaaggctccttcagtgagcaaggcatcaacgagtttctcagggagctctcttttgggcgtggctccacggcacctgtaggaggcggggctttccctaccatcgttgagagagagccttgggacggcagggatggcgagcttcccgtggaggatgacattgacctcagtgatgtggagcttgatgacttagggaaagatgagttgtgagagccacaacagaggcttcagaccattttcttttcttgggagccagtggatttttccagcagtgaagggacattctctacactcagatgactctaccagtggccttttaaccaagaagtagtacttgattggtcatttgaaaacactgcaacagtgaacttttgcatctcaagaaaacattgaaaaattctatgaattgttgtagccggtgaattgagtcgtattctgtcacataatattttgaagaaaacttggctgtcgaaacatttttctctctgactgctgcttgaatgttcttggaggctgtttcttatgtatgggttttttttaatgtgatcccttcatttgaatattaatggctttttccattaaagaataaaatattttggacaatgccgataaatgtatgaagttagtatccacatcataaattcagagtgatgtttagcagtaaatcaatattttgaagtgatacacagatgtctttcctccccacaaacttttttaaacaaaaaacaagacctcttttctttagatggtgccacctatgcccaccacaacagagattttacatggaaaccgggctcagtgagaactgatttcctgcccaatatttgtctttgggctgtctctagtgactaattattaaggaatctagctggttatacagttcaaggctttctatgttgttaatgaacctcaaaatagccgttaagacatgaaatacagcagcaggttaccaatgcgaacaggtagttcgcatttatgtaaaacattcagaaaatgaagttttgaatttgttggaacattcaaaggacttgagagcattttattgtaacttaaaaaaataaatacaactgtcactaacttttgtgagcaatttctctgaa

SEQ ID NO: 406468 - DNA, 2244 bp, Homo sapiens
gataaatgacagttactctcagccctgccaattctgtgagctgcagagttccctccatgggctttgatttcccccatcattccatttagattctcttctggtgttcaaggctaaagcccttattgactgattgcaaactgcaccctgtgctttattacctttttctgagtctatgtgaagcagataatgagttcttgtggagtctgctttagcggaaggaaaaattgttatttcttttacatttccacaggatgttgtcaaagttggtgcagttgatgcagataagcatcattccctaggaggtcagtatggtgttcagggatttcctaccattaagatttttggatccaacaaaaacagaccagaagattaccaaggtggcagaactggtgaagccattgtagatgctgcgctgagtgctctgcgccagctcgtgaaggatcgcctcgggggacggagcggaggatacagttctggaaaacaaggcagaagtgatagttcaagtaagaaggatgtgattgagctgacagacgacagctttgataagaatgttctggacagtgaagatgtttggatggttgagttctatgctccttggtgtggacactgcaaaaacctagagccagagtgggctgccgcagcttcagaagtaaaagagcagacgaaaggaaaagtgaaactggcagctgtggatgctacagtcaatcaggttctggcctcccgatacgggattagaggatttcctacaatcaagatatttcagaaaggcgagtctcctgtggattatgacggtgggcggacaagatccgacatcgtgtcccgggcccttgatttgttttctgataacgccccacctcctgagctgcttgagattatcaacgaggacattgccaagaggacgtgtgaggagcaccagctctgtgttgtggctgtgctgccccatatccttgatactggagctgcaggcagaaattcttatctggaagttcttctgaagttggcagacaaatacaaaaagaaaatgtgggggtggctgtggacagaagctggagcccagtctgaacttgagaccgcgttggggattggagggtttgggtaccccgccatggccgccatcaatgcacgcaagatgaaatttgctctgctaaaaggctccttcagtgagcaaggcatcaacgagtttctcagggagctctcttttgggcgtggctccacggcacctgtaggaggcggggctttccctaccatcgttgagagagagccttgggacggcagggatggcgagcttcccgtggaggatgacattgacctcagtgatgtggagcttgatgacttagggaaagatgagttgtgagagccacaacagaggcttcagaccattttcttttcttgggagccagtggatttttccagcagtgaagggacattctctacactcagatgactctaccagtggccttttaaccaagaagtagtacttgattggtcatttgaaaacactgcaacagtgaacttttgcatctcaagaaaacattgaaaaattctatgaattgttgtagccggtgaattgagtcgtattctgtcacataatattttgaagaaaacttggctgtcgaaacatttttctctctgactgctgcttgaatgttcttggaggctgtttcttatgtatgggttttttttaatgtgatcccttcatttgaatattaatggctttttccattaaagaataaaatattttggacaatgccgataaatgtatgaagttagtatccacatcataaattcagagtgatgtttagcagtaaatcaatattttgaagtgatacacagatgtctttcctccccacaaacttttttaaacaaaaaacaagacctcttttctttagatggtgccacctatgcccaccacaacagagattttacatggaaaccgggctcagtgagaactgatttcctgcccaatatttgtctttgggctgtctctagtgactaattattaaggaatctagctggttatacagttcaaggctttctatgttgttaatgaacctcaaaatagccgttaagacatgaaatacagcagcaggttaccaatgcgaacaggtagttcgcatttatgtaaaacattcagaaaatgaagttttgaatttgttggaacattcaaaggacttgagagcattttattgtaacttaaaaaaataaatacaactgtcactaacttttgtgagcaatttctctgaa

SEQ ID NO: 406469 - DNA, 1827 bp, Homo sapiens
ctgtgctgaggtgacctgatttcccaatgcacgacaaggagcggaggatacagttctgggaaaacaaggcagaagtgatagttcaagtaagaaggatgtgattgagctgacagacgacagctttgataagaatgttctggacagtgaagatgtttggatggttgagttctatgctccttggtgtggacactgcaaaaacctagagccagagtgggctgccgcagcttcagaagtaaaagagcagacgaaaggaaaagtgaaactggcagctgtggatgctacagtcaatcaggttctggcctcccgatacgggattagaggatttcctacaatcaagatatttcagaaaggcgagtctcctgtggattatgacggtgggcggacaagatccgacatcgtgtcccgggcccttgatttgttttctgataacgccccacctcctgagctgcttgagattatcaacgaggacattgccaagaggacgtgtgaggagcaccagctctgtgttgtggctgtgctgccccatatccttgatactggagctgcaggcagaaattcttatctggaagttcttctgaagttggcagacaaatacaaaaagaaaatgtgggggtggctgtggacagaagctggagcccagtctgaacttgagaccgcgttggggattggagggtttgggtaccccgccatggccgccatcaatgcacgcaagatgaaatttgctctgctaaaaggctccttcagtgagcaaggcatcaacgagtttctcagggagctctcttttgggcgtggctccacggcacctgtaggaggcggggctttccctaccatcgttgagagagagccttgggacggcagggatggcgagcttcccgtggaggatgacattgacctcagtgatgtggagcttgatgacttagggaaagatgagttgtgagagccacaacagaggcttcagaccattttcttttcttgggagccagtggatttttccagcagtgaagggacattctctacactcagatgactctaccagtggccttttaaccaagaagtagtacttgattggtcatttgaaaacactgcaacagtgaacttttgcatctcaagaaaacattgaaaaattctatgaattgttgtagccggtgaattgagtcgtattctgtcacataatattttgaagaaaacttggctgtcgaaacatttttctctctgactgctgcttgaatgttcttggaggctgtttcttatgtatgggttttttttaatgtgatcccttcatttgaatattaatggctttttccattaaagaataaaatattttggacaatgccgataaatgtatgaagttagtatccacatcataaattcagagtgatgtttagcagtaaatcaatattttgaagtgatacacagatgtctttcctccccacaaacttttttaaacaaaaaacaagacctcttttctttagatggtgccacctatgcccaccacaacagagattttacatggaaaccgggctcagtgagaactgatttcctgcccaatatttgtctttgggctgtctctagtgactaattattaaggaatctagctggttatacagttcaaggctttctatgttgttaatgaacctcaaaatagccgttaagacatgaaatacagcagcaggttaccaatgcgaacaggtagttcgcatttatgtaaaacattcagaaaatgaagttttgaatttgttggaacattcaaaggacttgagagcattttattgtaacttaaaaaaataaatacaactgtcactaacttttgtgagcaatttctctgaa

SEQ ID NO: 406470 - DNA, 2287 bp, Homo sapiens
cccctcggaccaccggactggcctggggcgggacgtgggcgcgggggcgcggcgtgcggcacgctgcagggctgaagcggcggcggcggtggggactgcacgtagcccggcgctcggcatggctctcctggtgctcggtctggtgagctgtaccttctttctggcagtgaatggtctgtattcctctagtgatgatgtgatcgaattaactccatcgaatttcaaccgagaagttattcagagtgatagtttgtggcttgtagaattctatgctccatggtgtggtcactgtcaaagattaacaccagaatggaagaaagcagcaactgcattaaaagatgttgtcaaagttggtgcagttgatgcagataagcatcattccctaggaggtcagtatggtgttcagggatttcctaccattaagatttttggatccaacaaaaacagaccagaagattaccaaggtggcagaactggtgaagccattgtagatgctgcgctgagtgctctgcgccagctcgtgaaggatcgcctcgggggacggagcggaggatacagttctggaaaacaaggcagaagtgatagttcaagtaagaaggatgtgattgagctgacagacgacagctttgataagaatgttctggacagtgaagatgtttggatggttgagttctatgctccttggtgtggacactgcaaaaacctagagccagagtgggctgccgcagcttcagaagtaaaagagcagacgaaaggaaaagtgaaactggcagctgtggatgctacagtcaatcaggttctggcctcccgatacgggattagaggatttcctacaatcaagatatttcagaaaggcgagtctcctgtggattatgacggtgggcggacaagatccgacatcgtgtcccgggcccttgatttgttttctgataacgccccacctcctgagctgcttgagattatcaacgaggacattgccaagaggacgtgtgaggagcaccagctctgtgttgtggctgtgctgccccatatccttgatactggagctgcaggcagaaattcttatctggaagttcttctgaagttggcagacaaatacaaaaagaaaatgtgggggtggctgtggacagaagctggagcccagtctgaacttgagaccgcgttggggattggagggtttgggtaccccgccatggccgccatcaatgcacgcaagatgaaatttgctctgggagctctcttttgggcgtggctccacggcacctgtaggaggcggggctttccctaccatcgttgagagagagccttgggacggcagggatggcgagcttcccgtggaggatgacattgacctcagtgatgtggagcttgatgacttagggaaagatgagttgtgagagccacaacagaggcttcagaccattttcttttcttgggagccagtggatttttccagcagtgaagggacattctctacactcagatgactctaccagtggccttttaaccaagaagtagtacttgattggtcatttgaaaacactgcaacagtgaacttttgcatctcaagaaaacattgaaaaattctatgaattgttgtagccggtgaattgagtcgtattctgtcacataatattttgaagaaaacttggctgtcgaaacatttttctctctgactgctgcttgaatgttcttggaggctgtttcttatgtatgggttttttttaatgtgatcccttcatttgaatattaatggctttttccattaaagaataaaatattttggacaatgccgataaatgtatgaagttagtatccacatcataaattcagagtgatgtttagcagtaaatcaatattttgaagtgatacacagatgtctttcctccccacaaacttttttaaacaaaaaacaagacctcttttctttagatggtgccacctatgcccaccacaacagagattttacatggaaaccgggctcagtgagaactgatttcctgcccaatatttgtctttgggctgtctctagtgactaattattaaggaatctagctggttatacagttcaaggctttctatgttgttaatgaacctcaaaatagccgttaagacatgaaatacagcagcaggttaccaatgcgaacaggtagttcgcatttatgtaaaacattcagaaaatgaagttttgaatttgttggaacattcaaaggacttgagagcattttattgtaacttaaaaaaataaatacaactgtcactaacttttgtgagcaatttctctgaa

SEQ ID NO: 406471 - DNA, 2938 bp, Homo sapiens
cccctcggaccaccggactggcctggggcgggacgtgggcgcgggggcgcggcgtgcggcacgctgcagggctgaagcggcggcggcggtggggactgcacgtagcccggcgctcggcatggctctcctggtgctcggtctggtgagctgtaccttctttctggcagtgaatggtctgtattcctctagtgatgatgtgatcgaattaactccatcgaatttcaaccgagaagttattcagagtgatagtttgtggcttgtagaattctatgctccatggtgtggtcactgtcaaagattaacaccagaatggaagaaagcagcaactgcattaaaagatgttgtcaaagttggtgcagttgatgcagataagcatcattccctaggaggtcagtatggtgttcagggatttcctaccattaagatttttggatccaacaaaaacagaccagaagattaccaaggtggcagaactggtgaagccattgtagatgctgcgctgagtgctctgcgccagctcgtgaaggatcgcctcgggggacggagcggaggatacagttctggaaaacaaggcagaagtgatagttcaagtaagaaggatgtgattgagctgacagacgacagctttgataagaatgttctggacagtgaagatgtttggatggttgagttctatgctccttggtgtggacactgcaaaaacctagagccagagtgggctgccgcagcttcagaagtaaaagagcagacgaaaggaaaagtgaaactggcagctgtggatgctacagtcaatcaggttctggcctcccgatacgggattagaggatttcctacaatcaagatatttcagaaaggcgagtctcctgtggattatgacggtgggcggacaagatccgacatcgtgtcccgggcccttgatttgttttctgataacgccccacctcctgagctgcttgagattatcaacgaggacattgccaagaggacgtgtgaggagcaccagctctgtgttgtggctgtgctgccccatatccttgatactggagctgcaggcagaaattcttatctggaagttcttctgaagttggcagacaaatacaaaaagaaaatgtgggggtggctgtggacagaagctggagcccagtctgaacttgagaccgcgttggggattggagggtttgggtaccccgccatggccgccatcaatgcacgcaagatgaaatttgctctgctaaaaggctccttcagtgagcaaggcatcaacgagtttctcagggagctctcttttgggcgtggctccacggcacctgtaggaggcggggctttccctaccatcgttgagagagagccttgggacggcagggatggcgaggtgagtgcccgggagggaagctgtgcgggcagcagtcctggtttactctcttgagcctgtgcatctctgcacctggagtcaagtccttcccatcagacctcagccctggtgcacccgcgggccttttaagaggttcttctctgaagacccttcatcttccttatcacaagtttaagtgctgcatggcatttgatactcttgacagccaagatacatttcagtagtaaggttgctttcctgattattaccttaaagtgaacatttaacctggaattcatttactttatcttagaaaaatagaaaatgatagctttgaaattagcacttatttctgtactgttgtgtcccaccctcctcaaaaggacacgttcaagtggcttccagtgttaaaatggtgagtgatgtgatgttgaaatgtttcacctgagttctgagcttttccatccgtataatcataggtacgaaggtcagggtaggagtcagactgaggagaacctggattgtagcaggagtagctccagagagtcgctcttccgtaaaatgagatgttgaccttccagggtgtccccttctgcagatctaacagtggctttctgtcgtctcccagcttcccgtggaggatgacattgacctcagtgatgtggagcttgatgacttagggaaagatgagttgtgagagccacaacagaggcttcagaccattttcttttcttgggagccagtggatttttccagcagtgaagggacattctctacactcagatgactctaccagtggccttttaaccaagaagtagtacttgattggtcatttgaaaacactgcaacagtgaacttttgcatctcaagaaaacattgaaaaattctatgaattgttgtagccggtgaattgagtcgtattctgtcacataatattttgaagaaaacttggctgtcgaaacatttttctctctgactgctgcttgaatgttcttggaggctgtttcttatgtatgggttttttttaatgtgatcccttcatttgaatattaatggctttttccattaaagaataaaatattttggacaatgccgataaatgtatgaagttagtatccacatcataaattcagagtgatgtttagcagtaaatcaatattttgaagtgatacacagatgtctttcctccccacaaacttttttaaacaaaaaacaagacctcttttctttagatggtgccacctatgcccaccacaacagagattttacatggaaaccgggctcagtgagaactgatttcctgcccaatatttgtctttgggctgtctctagtgactaattattaaggaatctagctggttatacagttcaaggctttctatgttgttaatgaacctcaaaatagccgttaagacatgaaatacagcagcaggttaccaatgcgaacaggtagttcgcatttatgtaaaacattcagaaaatgaagttttgaatttgttggaacattcaaaggacttgagagcattttattgtaacttaaaaaaataaatacaactgtcactaacttttgtgagcaatttctctgaa

SEQ ID NO: 406472 - DNA, 1965 bp, Homo sapiens
cccctcggaccaccggactggcctggggcgggacgtgggcgcgggggcgcggcgtgcggcacgctgcagggctgaagcggcggcggcggtggggactgcacgtagcccggcgctcggcatggctctcctggtgctcggtctggtgagctgtaccttctttctggcagtgaatggtctgtattcctctagtgatgatgtgatcgaattaactccatcgaatttcaaccgagaagttattcagagtgatagtttgtggcttgtagaattctatgctccatggtgtggtcactgtcaaagattaacaccagaatggaagaaagcagcaactgcattaaaagatgttgtcaaagttggtgcagttgatgcagataagcatcattccctaggaggtcagtatggtgttcagggatttcctaccattaagatttttggatccaacaaaaacagaccagaagattaccaaggtggcagaactggtgaagccattgtagatgctgcgctgagtgctctgcgccagctcgtgaaggatcgcctcgggggacggagcggaggatacagttctggaaaacaaggcagaagtgatagttcaagtaagaaggatgtgattgagctgacagacgacagctttgataagaatgttctggacagtgaagatgtttggatggttgagttctatgctccttggtgtggacactgcaaaaacctagagccagagtgggctgccgcagcttcagaagtaaaagagcagacgaaaggaaaagtgaaactggcagctgtggatgctacagtcaatcaggttctggcctcccgatacgggattagaggatttcctacaatcaagatatttcagaaaggcgagtctcctgtggattatgacggtgggcggacaagatccgacatcgtgtcccgggcccttgatttgttttctgataacgccccacctcctgagctgcttgagattatcaacgaggacattgccaagaggacgtgtgaggagcaccagctctgtgttgtggctgtgctgccccatatccttgatactggagctgcaggcagaaattcttatctggaagttcttctgaagttggcagacaaatacaaaaagaaaatgtgggggtggctgtggacagaagctggagcccagtctgaacttgagaccgcgttggggattggagggtttgggtaccccgccatggccgccatcaatgcacgcaagatgaaatttgctctgctaaaaggctccttcagtgagcaaggcatcaacgagtttctcagggagctctcttttgggcgtggctccacggcacctgtaggaggcggggctttccctaccatcgttgagagagagccttgggacggcagggatggcgagcttcccgtggaggatgacattgacctcagtgatgtggagcttgatgacttagggaaagatgagttgtgagagccacaacagaggcttcagaccattttcttttcttgggagccagtggatttttccagcagtgaagggacattctctacactcagatgactctaccagtggccttttaaccaagaagtagtacttgattggtcatttgaaaacactgcaacagtgaacttttgcatctcaagaaaacattgaaaaattctatgaattgttgtagccggtgaattgagtcgtattctgtcacataatattttgaagaaaacttggctgtcgaaacatttttctctctgactgctgcttgaatgttcttggaggctgtttcttatgtatgggttttttttaatgtgatcccttcatttgaatattaatggcttttccttacggataacatttggtcatgcataaacaaacaccgcaaccaaaacaacacaccacaaaaaacaacaaatagacaccggggggggcacaccgttagtataagagggccaaacgaggaagtccccaaaggaccaccagtagaaacccccctgatttgc

SEQ ID NO: 406473 - DNA, 1189 bp, Homo sapiens
actgatatggggaggtggtctggggaggtctgtgtggtctgccccttgaggaggtggaggtggtccctggggctttccagcgggaggtggcagaggctgctggggatgcctcctggtgggggtggtccttgtggccttccgtggaggaactcgttgatgccttgctcactgaaggagccttttagcagagcaaatttcatcttgcgtgcattgatggcggccatggcgggcttcccgtggaggatgacattgacctcagtgatgtggagcttgatgacttagggaaagatgagttgtgagagccacaacagaggcttcagaccattttcttttcttgggagccagtggatttttccagcagtgaagggacattctctacactcagatgactctaccagtggccttttaaccaagaagtagtacttgattggtcatttgaaaacactgcaacagtgaacttttgcatctcaagaaaacattgaaaaattctatgaattgttgtagccggtgaattgagtcgtattctgtcacataatattttgaagaaaacttggctgtcgaaacatttttctctctgactgctgcttgaatgttcttggaggctgtttcttatgtatgggttttttttaatgtgatcccttcatttgaatattaatggctttttccattaaagaataaaatattttggacaatgccgataaatgtatgaagttagtatccacatcataaattcagagtgatgtttagcagtaaatcaatattttgaagtgatacacagatgtctttcctccccacaaacttttttaaacaaaaaacaagacctcttttctttagatggtgccacctatgcccaccacaacagagattttacatggaaaccgggctcagtgagaactgatttcctgcccaatatttgtctttgggctgtctctagtgactaattattaaggaatctagctggttatacagttcaaggctttctatgttgttaatgaacctcaaaatagccgttaagacatgaaatacagcagcaggttaccaatgcgaacaggtagttcgcatttatgtaaaacattcagaaaatgaagttttgaatttgttggaacattcaaaggacttgagagcattttattgtaacttaaaaaaataaatacaactgtcactaacttttgtgagcaatttctctgaa

SEQ ID NO: 406474 - DNA, 1374 bp, Homo sapiens
cccctcggaccaccggactggcctggggcgggacgtgggcgcgggggcgcggcgtgcggcacgctgcagggctgaagcggcggcggcggtggggactgcacgtagcccggcgctcggcatggctctcctggtgctcggtctggtgagctgtaccttctttctggcagtgaatggtctgtattcctctagtgatgatgtgatcgaattaactccatcgaatttcaaccgagaagttattcagagtgatagtttgtggcttgtagaattctatgctccatggtgtggtcactgtcaaagattaacaccagaatggaagaaagcagcaactgcattaaaagatgttgtcaaagttggtgcagttgatgcagataagcatcattccctaggaggtcagtatggtgttcagggatttcctaccattaagatttttggatccaacaaaaacagaccagaagattaccaaggtggcagaactggtgaagccattgtagatgctgcgctgagtgctctgcgccagctcgtgaaggatcgcctcgggggacggagcggaggatacagttctggaaaacaaggcagaagtgatagttcaagtaagaaggatgtgattgagctgacagacgacagctttgataagaatgttctggacagtgaagatgtttggatggttgagttctatgctccttggtgtggacactgcaaaaacctagagccagagtgggctgccgcagcttcagaagtaaaagagcagacgaaaggaaaagtgaaactggcagctgtggatgctacagtcaatcaggttctggcctcccgatacgggattagaggatttcctacaatcaagatatttcagaaaggcgagtctcctgtggattatgacggtgggcggacaagatccgacatcgtgtcccgggcccttgatttgttttctgataacgccccacctcctgagctgcttgagattatcaacgaggacattgccaagaggacgtgtgaggagcaccagctctgtgttgtggctgtgctgccccatatccttgatactggagctgcaggcagaaattcttatctggaagttcttctgaagttggcagacaaatacaaaaagaaaatgtgggggtggctgtggacagaagctggagcccagtctgaacttgagaccgcgttggggattggagggtttgggtaccccgccatggccgccatcaatgcacgcaagatgaaatttgctctgctaaaaggctccttcagtgagcaaggcatcaacgagtttctcaggtaatttgttttcttaggttgtttgttgttttgtctgtttgtttggttctgttgtaggtttatatttggaactaggtatatataagccaggtaataaat

SEQ ID NO: 406475 - DNA, 1505 bp, Homo sapiens
cccctcggaccaccggactggcctggggcgggacgtgggcgcgggggcgcggcgtgcggcacgctgcagggctgaagcggcggcggcggtggggactgcacgtagcccggcgctcggcatggctctcctggtgctcggtctggtgagctgtaccttctttctggcagtgaatggtctgtattcctctagtgatgatgtgatcgaattaactccatcgaatttcaaccgagaagttattcagagtgatagtttgtggcttgtagaattctatgctccatggtgtggtcactgtcaaagattaacaccagaatggaagaaagcagcaactgcattaaaagatgttgtcaaagttggtgcagttgatgcagataagcatcattccctaggaggtcagtatggtgttcagggatttcctaccattaagatttttggatccaacaaaaacagaccagaagattaccaaggtggcagaactggtgaagccattgtagatgctgcgctgagtgctctgcgccagctcgtgaaggatcgcctcgggggacggagcggaggatacagttctggaaaacaaggcagaagtgatagttcaagtaagaaggatgtgattgagctgacagacgacagctttgataagaatgttctggacagtgaagatgtttggatggttgagttctatgctccttggtgtggacactgcaaaaacctagagccagagtgggctgccgcagcttcagaagtaaaagagcagacgaaaggaaaagtgaaactggcagctgtggatgctacagtcaatcaggttctggcctcccgatacgggattagaggatttcctacaatcaagatatttcagaaaggcgagtctcctgtggattatgacggtgggcggacaagatccgacatcgtgtcccgggcccttgatttgttttctgataacgccccacctcctgagctgcttgagattatcaacgaggacattgccaagaggacgtgtgaggagcaccagctctgtgttgtggctgtgctgccccatatccttgatactggagctgcaggcagaaattcttatctggaagttcttctgaagttggcagacaaatacaaaaagaaaatgtggggtttttaaacaaaaaacaagacctcttttctttagatggtgccacctatgcccaccacaacagagattttacatggaaaccgggctcagtgagaactgatttcctgcccaatatttgtctttgggctgtctctagtgactaattattaaggaatctagctggttatacagttcaaggctttctatgttgttaatgaacctcaaaatagccgttaagacatgaaatacagcagcaggttaccaatgcgaacaggtagttcgcatttatgtaaaacattcagaaaatgaagttttgaatttgttggaacattcaaaggacttgagagcattttattgtaacttaaaaaaataaatacaactgtcactaacttttgtgagcaatttctctgaa

SEQ ID NO: 406476 - DNA, 894 bp, Homo sapiens
cccctcggaccaccggactggcctggggcgggacgtgggcgcgggggcgcggcgtgcggcacgctgcagggctgaagcggcggcggcggtggggactgcacgtagcccggcgctcggcatggctctcctggtgctcggtctggtgagctgtaccttctttctggcagtgaatggtctgtattcctctagtgatgatgtgatcgaattaactccatcgaatttcaaccgagaagttattcagagtgatagtttgtggcttgtagaattctatgctccatggtgtggtcactgtcaaagattaacaccagaatggaagaaagcagcaactgcattaaaagatgttgtcaaagttggtgcagttgatgcagataagcatcattccctaggaggtcagtatggtgttcagggatttcctaccattaagatttttggatccaacaaaaacagaccagaagattaccaaggtaaggacttttcctagctacttcattcccctggtagacaagaacctactgttctttaacaagcttgagaacctgctctacctgcaaggttctcaacctcattgtacctgaattatctataaatggtacacagtgattcctataccctccgagtcattctgaagatgaaatatgtgtcacacaggtttgtctcatcacttaacgcttgcttaggtctatgctacattggcaatgatagaaaatagtgttctgtgctaccctgttgtctttctcattacagtcacttgtatttaataaagatctacatgtattttcttgctctaatctctcttccctttactgtaggaaaagggtctaacataacactatggaaaaggagactgtaatttgagagtcttagtctcctaaactgtcaataataaatggatac

SEQ ID NO: 406477 - DNA, 1870 bp, Homo sapiens
atatgagctcaggcctggctgggctccaggagaatctttccacaaggcaagagataacacaaagtcaaggtgaagatcagggtagccctttaaaaggcctccttgtgccctagagttgccacagctcttctactccactgctgtctatcttgcctgccggcacccagccaccatgtgggagctcgtggctctcttgctgcttaccctagcttatttgttttggcccaagagaaggtgccctggtgccaagtaccccaagagcctcctgtccctgcccctggtgggcagcctgccattcctccccagacacggccatatgcataacaacttcttcaagctgcagaaaaaatatggccccatctattcggttcgtatgggcaccaagactacagtgattgtcggccaccaccagctggccaaggaggtgcttattaagaagggcaaggacttctctgggcggcctcaaatggcaactctagacatcgcgtccaacaaccgtaagggtatcgccttcgctgactctggcgcacactggcagctgcatcgaaggctggcgatggccacctttgccctgttcaaggatggcgatcagaagctggagaagatcatttgtcaggaaatcagtacattgtgtgatatgctggccacccacaacggacagtccatagacatctcctttcctgtcttcgtggcggtaaccaatgtcatctccttgatctgcttcaatacctcctacaagaatggggaccctgagttgaatgtcatacagaattacaatgaaggcatcatagacaacctgagcaaagacagcctggtggacctagtcccctggttgaagattttccccaacaaaaccctggaaaaattaaagagccatgttaaaatacgaaatgatctgctgaataaaatacttgaaaattacaaggagaaattccggagtgactctatcaccaacatgctggacacactgatgcaagccaagatgaactcagataatggcaatgctggcccagatcaagactcagagctgctttcagataaccacattctcaccaccataggggacatctttggggctggcgtggagaccaccacctctgtggttaaatggaccctggccttcctgctgcacaatcctcaggtgaagaagaagctctacgaggagattgaccagaatgtgggtttcagccgcacaccaactatcagtgaccgtaaccgtctcctcctgctggaggccaccatccgagaggtgcttcgcctcaggcccgtggcccctatgctcatcccccacaaggccaacgttgactccagcatcggtgagtttgctgtggacaagggcacagaagttatcatcaatctgtgggcgctgcatcacaatgagaaggagtggcaccagccggatcagttcatgcctgagcgtttcttgaatccagcggggacccagctcatctcaccgtcagtaagctatttgcccttcggagcaggacctcgctcctgtataggtgagatcctggcccgccaggagctcttcctcatcatggcctggctgctgcagaggttcgacctggaggtgccagatgatgggcagctgccctccctggaaggcatccccaaggtggtctttctgatcgactctttcaaagtgaagatcaaggtgcgccaggcctggagggaagcccaggctgagggtagcacctaaaggctgtaactcacagcccctgtccaccctatgtggccccacaacacagatttagagatacaaccccccacccttctccgccattcttccctactcccaacccactctgccttctttttcagcttgtggcaatgccagtgatgtgcataaacagtttttttttttccataa

SEQ ID NO: 406478 - DNA, 323 bp, Homo sapiens
ctccctccatttcactccctcatgatctacctacaccactcccccctccactcgaaggcatccccaaggtggtctttctgatcgactctttcaaagtgaagatcaaggtgcgccaggcctggagggaagcccaggctgagggtagcacctaaaggctgtaactcacagcccctgtccaccctatgtggccccacaacacagatttagagatacaaccccccacccttctccgccattcttccctactcccaacccactctgccttctttttcagcttgtggcaatgccagtgatgtgcataaacagtttttttttttccataa

SEQ ID NO: 406479 - DNA, 729 bp, Homo sapiens
cgtcacgagacggtcttacgatttgacactacgaacgactactgtcacatcgtggacctcgctcctgtataggtgagatcctggcccgccaggagctcttcctcatcatggcctggctgctgcagaggttcgacctggaggtgccagatgatgggcagctgccctccctggaaggcatccccaaggtggtctttctgatcgactctttcaaagtgaagatcaaggtgcgccaggcctggagggaagcccaggctgagggtagcacctaaaggctgtaactcacagcccctgtccaccctatgtggccccacaacacagatttagagatacaaccccccacccttctccgccattcttccctactcccaacccactctgccttctttttcagcttgtggcaatgccagtgatgtgcataaacagtttttttttttccataataaggtccctgagtagttcatttatgtattcatttgctcactcattctttcaacaccgattttattgagcaccttaaaaaaaacaatcacgtctagcactactactacaagaccgcgtctatccaaaaaaaataaaactcggaggggggcccgggcccaaatccccataaggaggggatttacaaaaaacggccgtcgtttaccaactcgggacggggaaaaccctgggcttacccaaattaaaacgccttggggaataatcccctttcgccagggtgcgaaataaccc

SEQ ID NO: 406480 - DNA, 368 bp, Homo sapiens
tcgtgccgctcgtgccgaattcggcacgaggaaggcatccccaaggtggtctttctgatcgactctttcaaagtgaagatcaaggtgcgccaggcctggagggaagcccaggctgagggtagcacctaaaggctgtaactcacagcccctgtccaccctatgtggccccacaacacagatttagagatacaaccccccacccttctccgccattcttccctactcccaacccactctgccttctttttcagcttgtggcaatgccagtgatgtgcataaacagtttttttttttccataaaaaaaaaggcttacgaaaagatgtaattaaaaaaacctcgagggggggcccggtgcccaattcgccct

SEQ ID NO: 406481 - DNA, 1760 bp, Homo sapiens
  misc_feature (24)..(24): n is a, c, g, or t
  misc_feature (33)..(33): n is a, c, g, or t
aagtgcatgtgataacctgccctnctcggttantttctcttgcctgccggcacccagccaccatgtgggagctcgtggctctcttgctgcttaccctagcttatttgttttggcccaagagaaggtgccctggtgccaagtaccccaagagcctcctgtccctgcccctggtgggcagcctgccattcctccccagacacggccatatgcataacaacttcttcaagctgcagaaaaaatatggccccatctattcggttcgtatgggcaccaagactacagtgattgtcggccaccaccagctggccaaggaggtgcttattaagaagggcaaggacttctctgggcggcctcaaatggcaactctagacatcgcgtccaacaaccgtaagggtatcgccttcgctgactctggcgcacactggcagctgcatcgaaggctggcgatggccacctttgccctgttcaaggatggcgatcagaagctggagaagatcatttgtcaggaaatcagtacattgtgtgatatgctggccacccacaacggacagtccatagacatctcctttcctgtcttcgtggcggtaaccaatgtcatctccttgatctgcttcaatacctcctacaagaatggggaccctgagttgaatgtcatacagaattacaatgaaggcatcatagacaacctgagcaaagacagcctggtggacctagtcccctggttgaagattttccccaacaaaaccctggaaaaattaaagagccatgttaaaatacgaaatgatctgctgaataaaatacttgaaaattacaaggagaaattccggagtgactctatcaccaacatgctggacacactgatgcaagccaagatgaactcagataatggcaatgctggcccagatcaagactcagagctgctttcagataaccacattctcaccaccataggggacatctttggggctggcgtggagaccaccacctctgtggttaaatggaccctggccttcctgctgcacaatcctcaggtgaagaagaagctctacgaggagattgaccagaatgtgggtttcagccgcacaccaactatcagtgaccgtaaccgtctcctcctgctggaggccaccatccgagaggtgcttcgcctcaggcccgtggcccctatgctcatcccccacaaggccaacgttgactccagcatcggtgagtttgctgtggacaagggcacagaagttatcatcaatctgtgggcgctgcatcacaatgagaaggagtggcaccagccggatcagttcatgcctgagcgtttcttgaatccagcggggacccagctcatctcaccgtcagtaagctatttgcccttcggagcaggacctcgctcctgtataggtgagatcctggcccgccaggagctcttcctcatcatggcctggctgctgcagaggttcgacctggaggtgccagatgatgggcagctgccctccctggaaggcatccccaaggtggtctttctgatcgactctttcaaagtgaagatcaaggtgcgccaggcctggagggaagcccaggctgagggtagcacctaaaggctgtaactcacagcccctgtccaccctatgtggccccacaacacagatttagagatacaaccccccacccttctccgccattcttccctactcccaacccactctgccttctttttcagcttgtggcaatgccagtgatgtgcataaacagtttttttttttccataa

SEQ ID NO: 406482 - DNA, 1827 bp, Homo sapiens
atatgagctcaggcctggctgggctccaggagaatctttccacaaggcaagagataacacaaagtcaaggtgaagatcagggtagccctttaaaaggcctccttgtgccctagagttgccacagctcttctactccactgctgtctatcttgcctgccggcacccagccaccatgtgggagctcgtggctctcttgctgcttaccctagcttatttgttttggcccaagagaaggtgccctggtgccaagtaccccaagagcctcctgtccctgcccctggtgggcagcctgccattcctccccagacacggccatatgcataacaacttcttcaagctgcagaaaaaatatggccccatctattcggttcgtatgggcaccaagactacagtgattgtcggccaccaccagctggccaaggaggtgcttattaagaagggcaaggacttctctgggcggcctcaaatggcaactctagacatcgcgtccaacaaccgtaagggtatcgccttcgctgactctggcgcacactggcagctgcatcgaaggctggcgatggccacctttgccctgttcaaggatggcgatcagaagctggagaagatcatttgtcaggaaatcagtacattgtgtgatatgctggccacccacaacggacagtccatagacatctcctttcctgtcttcgtggcggtaaccaatgtcatctccttgatctgcttcaatacctcctacaagaatggggaccctgagttgaatgtcatacagaattacaatgaaggcatcatagacaacctgagcaaagacagcctggtggacctagtcccctggttgaagattttccccaacaaaaccctggaaaaattaaagagccatgttaaaatacgaaatgatctgctgaataaaatacttgaaaattacaagtgatgcaagccaagatgaactcagataatggcaatgctggcccagatcaagactcagagctgctttcagataaccacattctcaccaccataggggacatctttggggctggcgtggagaccaccacctctgtggttaaatggaccctggccttcctgctgcacaatcctcaggtgaagaagaagctctacgaggagattgaccagaatgtgggtttcagccgcacaccaactatcagtgaccgtaaccgtctcctcctgctggaggccaccatccgagaggtgcttcgcctcaggcccgtggcccctatgctcatcccccacaaggccaacgttgactccagcatcggtgagtttgctgtggacaagggcacagaagttatcatcaatctgtgggcgctgcatcacaatgagaaggagtggcaccagccggatcagttcatgcctgagcgtttcttgaatccagcggggacccagctcatctcaccgtcagtaagctatttgcccttcggagcaggacctcgctcctgtataggtgagatcctggcccgccaggagctcttcctcatcatggcctggctgctgcagaggttcgacctggaggtgccagatgatgggcagctgccctccctggaaggcatccccaaggtggtctttctgatcgactctttcaaagtgaagatcaaggtgcgccaggcctggagggaagcccaggctgagggtagcacctaaaggctgtaactcacagcccctgtccaccctatgtggccccacaacacagatttagagatacaaccccccacccttctccgccattcttccctactcccaacccactctgccttctttttcagcttgtggcaatgccagtgatgtgcataaacagtttttttttttccataa

SEQ ID NO: 406483 - DNA, 1694 bp, Homo sapiens
  misc_feature (2)..(3): n is a, c, g, or t
  misc_feature (16)..(16): n is a, c, g, or t
  misc_feature (20)..(20): n is a, c, g, or t
  misc_feature (28)..(28): n is a, c, g, or t
anncgagacctttatngaanactcccanacacagactcttctactccactgctgtctatcttgcctgccggcacccagccaccatgtgggagctcgtggctctcttgctgcttaccctagcttatttgttttggcccaagagaaggtgccctggtgccaagtaccccaagagcctcctgtccctgcccctggtgggcagcctgccattcctccccagacacggccatatgcataacaacttcttcaagctgcagaaaaaatatggccccatctattcggttcgtatgggcaccaagactacagtgattgtcggccaccaccagctggccaaggaggtgcttattaagaagggcaaggacttctctgggcggcctcaaatggcaactctagacatcgcgtccaacaaccgtaagggtatcgccttcgctgactctggcgcacactggcagctgcatcgaaggctggcgatggccacctttgccctgttcaaggatggcgatcagaagctggagaagatcatttgtcaggaaatcagtacattgtgtgatatgctggccacccacaacggacagtccatagacatctcctttcctgtcttcgtggcggtaaccaatgtcatctccttgatctgcttcaatacctcctacaagaatggggaccctgagttgaatgtcatacagaattacaatgaaggcatcatagacaacctgagcaaagacagcctggtggacctagtcccctggttgaaggagaaattccggagtgactctatcaccaacatgctggacacactgatgcaagccaagatgaactcagataatggcaatgctggcccagatcaagactcagagctgctttcagataaccacattctcaccaccataggggacatctttggggctggcgtggagaccaccacctctgtggttaaatggaccctggccttcctgctgcacaatcctcaggtgaagaagaagctctacgaggagattgaccagaatgtgggtttcagccgcacaccaactatcagtgaccgtaaccgtctcctcctgctggaggccaccatccgagaggtgcttcgcctcaggcccgtggcccctatgctcatcccccacaaggccaacgttgactccagcatcggtgagtttgctgtggacaagggcacagaagttatcatcaatctgtgggcgctgcatcacaatgagaaggagtggcaccagccggatcagttcatgcctgagcgtttcttgaatccagcggggacccagctcatctcaccgtcagtaagctatttgcccttcggagcaggacctcgctcctgtataggtgagatcctggcccgccaggagctcttcctcatcatggcctggctgctgcagaggttcgacctggaggtgccagatgatgggcagctgccctccctggaaggcatccccaaggtggtctttctgatcgactctttcaaagtgaagatcaaggtgcgccaggcctggagggaagcccaggctgagggtagcacctaaaggctgtaactcacagcccctgtccaccctatgtggccccacaacacagatttagagatacaaccccccacccttctccgccattcttccctactcccaacccactctgccttctttttcagcttgtggcaatgccagtgatgtgcataaacagtttttttttttccataa

SEQ ID NO: 406484 - DNA, 2211 bp, Homo sapiens
  misc_feature (1888)..(1892): n is a, c, g, or t
atatgagctcaggcctggctgggctccaggagaatctttccacaaggcaagagataacacaaagtcaaggtgaagatcagggtagccctttaaaaggcctccttgtgccctagagttgccacagctcttctactccactgctgtctatcttgcctgccggcacccagccaccatgtgggagctcgtggctctcttgctgcttaccctagcttatttgttttggcccaagagaaggtgccctggtgccaagtaccccaagagcctcctgtccctgcccctggtgggcagcctgccattcctccccagacacggccatatgcataacaacttcttcaagctgcagaaaaaatatggccccatctattcggttcgtatgggcaccaagactacagtgattgtcggccaccaccagctggccaaggaggtgcttattaagaagggcaaggacttctctgggcggcctcaaatggcaactctagacatcgcgtccaacaaccgtaagggtatcgccttcgctgactctggcgcacactggcagctgcatcgaaggctggcgatggccacctttgccctgttcaaggatggcgatcagaagctggagaagatcatttgtcaggaaatcagtacattgtgtgatatgctggccacccacaacggacagtccatagacatctcctttcctgtcttcgtggcggtaaccaatgtcatctccttgatctgcttcaatacctcctacaagaatggggaccctgagttgaatgtcatacagaattacaatgaaggcatcatagacaacctgagcaaagacagcctggtggacctagtcccctggttgaagattttccccaacaaaaccctggaaaaattaaagagccatgttaaaatacgaaatgatctgctgaataaaatacttgaaaattacaaggagaaattccggagtgactctatcaccaacatgctggacacactgatgcaagccaagatgaactcagataatggcaatgctggcccagatcaagactcagagctgctttcagataaccacattctcaccaccataggggacatctttggggctggcgtggagaccaccacctctgtggttaaatggaccctggccttcctgctgcacaatcctcaggtgaagaagaagctctacgaggagattgaccagaatgtgggtttcagccgcacaccaactatcagtgaccgtaaccgtctcctcctgctggaggccaccatccgagaggtgcttcgcctcaggcccgtggcccctatgctcatcccccacaaggccaacgttgactccagcatcggtgagtttgctgtggacaagggcacagaagttatcatcaatctgtgggcgctgcatcacaatgagaaggagtggcaccagccggatcagttcatgcctgagcgtttcttgaatccagcggggacccagctcatctcaccgtcagtaagctatttgcccttcggagcaggacctcgctcctgtataggtgagatcctggcccgccaggagctcttcctcatcatggcctggctgctgcagaggttcgacctggaggtgccagatgatgggcagctgccctccctggaaggcatccccaaggtggtctttctgatcgactctttcaaagtgaagatcaaggtgcgccaggcctggagggaagcccaggctgagggtagcacctaaaggctgtaactcacagcccctgtccaccctatgtggccccacaacacagatttagagatacaaccccccacccttctccgccattcttccctactcccaacccactctgccttctttttcagcttgtggcaatgccagtgatgtgcataaacagtttttttttttccataaaaaaaaaaaaaaaaaaannnnnaaaaaaaaaaaaaaaaaaaaaaaaacccttgtgggccggctcggcccaattcgaatttatgacttggagaagcttatgcatgcggccccaatttgagcctaactgggcaattcgccataaagagaggggatttaaaaaaattgggcggcggttataaccgcggagtggggaaaacacgggggttaccaattaaaaggcttggagaaaacccctttttacagggggggaaaacaaaaaggccccccactgcgcctccaaaatttgcccccctatgggaaggaatttacgcccaatttttttaaaaacgcgcaatttgtta

SEQ ID NO: 406485 - DNA, 2213 bp, Homo sapiens
atatgagctcaggcctggctgggctccaggagaatctttccacaaggcaagagataacacaaagtcaaggtgaagatcagggtagccctttaaaaggcctccttgtgccctagagttgccacagctcttctactccactgctgtctatcttgcctgccggcacccagccaccatgtgggagctcgtggctctcttgctgcttaccctagcttatttgttttggcccaagagaaggtgccctggtgccaagtaccccaagagcctcctgtccctgcccctggtgggcagcctgccattcctccccagacacggccatatgcataacaacttcttcaagctgcagaaaaaatatggccccatctattcggttcgtatgggcaccaagactacagtgattgtcggccaccaccagctggccaaggaggtgcttattaagaagggcaaggacttctctgggcggcctcaaatggcaactctagacatcgcgtccaacaaccgtaagggtatcgccttcgctgactctggcgcacactggcagctgcatcgaaggctggcgatggccacctttgccctgttcaaggatggcgatcagaagctggagaagatcatttgtcaggaaatcagtacattgtgtgatatgctggccacccacaacggacagtccatagacatctcctttcctgtcttcgtggcggtaaccaatgtcatctccttgatctgcttcaatacctcctacaagaatggggaccctgagttgaatgtcatacagaattacaatgaaggcatcatagacaacctgagcaaagacagcctggtggacctagtcccctggttgaagattttccccaacaaaaccctggaaaaattaaagagccatgttaaaatacgaaatgatctgctgaataaaatacttgaaaattacaaggagaaattccggagtgactctatcaccaacatgctggacacactgatgcaagccaagatgaactcagataatggcaatgctggcccagatcaagactcagagctgctttcagataaccacattctcaccaccataggggacatctttggggctggcgtggagaccaccacctctgtggttaaatggaccctggccttcctgctgcacaatcctcaggtgaagaagaagctctacgaggagattgaccagaatgtgggtttcagccgcacaccaactatcagtgaccgtaaccgtctcctcctgctggaggccaccatccgagaggtgcttcgcctcaggcccgtggcccctatgctcatcccccacaaggccaacgttgactccagcatcggtgagtttgctgtggacaagggcacagaagttatcatcaatctgtgggcgctgcatcacaatgagaaggagtggcaccagccggatcagttcatgcctgagcgtttcttgaatccagcggggacccagctcatctcaccgtcagtaagctatttgcccttcggagcaggacctcgctcctgtataggtgagatcctggcccgccaggagctcttcctcatcatggcctggctgctgcagaggttcgacctggaggtgccagatgatgggcagctgccctccctggaaggcatccccaaggtggtctttctgatcgactctttcaaagtgaagatcaaggtgcgccaggcctggagggaagcccaggctgagggtagcacctaaaggctgtaactcacagcccctgtccaccctatgtggccccacaacacagatttagagatacaaccccccacccttctccgccattcttccctactcccaacccactctgccttctttttcagcttgtggcaatgccagtgatgtgcataaacagtttttttttttccataaaacacagattcctcagatccagaagactgaaatatcctttcgacctaatgatcccaagagctatgaggcatatgtactgaacatagttaggttcctggatgtgcccagtgaaccgaaagaacgaggagactttaatcatgaacgatgagagttaagggctgcagattaaacttgaatggctggaaattgtctggataaatgatgaacttatggtacaaagaggcaaccgtgcatatataaagcttaccgagtttaggtttaaactaagcctccagaatgattctcgaaacttaccagtgagaatttacccaaatgcccttccgttatgcaatgccagcggata

SEQ ID NO: 406486 - DNA, 1990 bp, Homo sapiens
atatgagctcaggcctggctgggctccaggagaatctttccacaaggcaagagataacacaaagtcaaggtgaagatcagggtagccctttaaaaggcctccttgtgccctagagttgccacagctcttctactccactgctgtctatcttgcctgccggcacccagccaccatgtgggagctcgtggctctcttgctgcttaccctagcttatttgttttggcccaagagaaggtgccctggtgccaagtaccccaagagcctcctgtccctgcccctggtgggcagcctgccattcctccccagacacggccatatgcataacaacttcttcaagctgcagaaaaaatatggccccatctattcggttcgtatgggcaccaagactacagtgattgtcggccaccaccagctggccaaggaggtgcttattaagaagggcaaggacttctctgggcggcctcaaatggcaactctagacatcgcgtccaacaaccgtaagggtatcgccttcgctgactctggcgcacactggcagctgcatcgaaggctggcgatggccacctttgccctgttcaaggatggcgatcagaagctggagaagatcatttgtcaggaaatcagtacattgtgtgatatgctggccacccacaacggacagtccatagacatctcctttcctgtcttcgtggcggtaaccaatgtcatctccttgatctgcttcaatacctcctacaagaatggggaccctgagttgaatgtcatacagaattacaatgaaggcatcatagacaacctgagcaaagacagcctggtggacctagtcccctggttgaagattttccccaacaaaaccctggaaaaattaaagagccatgttaaaatacgaaatgatctgctgaataaaatacttgaaaattacaaggagaaattccggagtgactctatcaccaacatgctggacacactgatgcaagccaagatgaactcagataatggcaatgctggcccagatcaagactcagagctgctttcagataaccacattctcaccaccataggggacatctttggggctggcgtggagaccaccacctctgtggttaaatggaccctggccttcctgctgcacaatcctcaggtgaagaagaagctctacgaggagattgaccagaatgtgggtttcagccgcacaccaactatcagtgaccgtaaccgtctcctcctgctggaggccaccatccgagaggtgcttcgcctcaggcccgtggcccctatgctcatcccccacaaggccaacgttgactccagcatcggtgagtttgctgtggacaagggcacagaagttatcatcaatctgtgggcgctgcatcacaatgagaaggagtggcaccagccggatcagttcatgcctgagcgtttcttgaatccagcggggacccagctcatctcaccgtcagtaagctatttgcccttcggagcaggacctcgctcctgtataggtgagatcctggcccgccaggagctcttcctcatcatggcctggctgctgcagaggttcgacctggaggtgccagatgatgggcagctgccctccctggaaggcatccccaaggtggtctttctgatcgactctttcaaagtgaagatcaaggtgcgccaggcctggagggaagcccaggctgagggtagcacctaaaggctgtaactcacagcccctgtccaccctatgtggccccacaacacagatttagagatacaaccccccacccttctccgccattcttccctactcccaacccactctgccttctttttcagcttgtggcaatgccagtgatgtgcataaacagtttttttttttccataaaactaaaaaagaaaaaatttcactgcccgtcgcttaaacaacgttggactgggaaacccttggcgtacccaacttaatggctttgaggacatccccctttcccagctgccgaataacgat
